United States Patent Application Publication US 2005/0208558 A1 - sequence listing, part 30

SEQ ID NO: 30822 - protein, 196 aa, DROSOPHILA
MHKIKMISRTYVRLKRSNDSVVQMPRIKMNFANNKGGFAGNRYRKNNRAGNQNRTFPGNNNSNALPKNNEPATAASGQNQANQNANMGQNQRQGQNQNQSIKSMVKEIKVDQNIKEVQAIKEAKEIKEEPEIREMIQDSEVAMLVTIKVAVSPEVRRTSSVTTETVVVHALRRCRWHDEQHQYGWWWRWRRWSARL

SEQ ID NO: 30823 - DNA, 2303 bp, DROSOPHILA
tgcaaagtggattttgtgtatttgacgattgttcgatttcatgttgctggtgctgttgttgctgctactgcagcaccattgcaaaactggttactgttggctgactgcagttggcaactatagctatctctctccctctggccagcctctgtctcacttagctgctggctggtggtaaccctttcttgacgtattttgctctttgctcttccttggaattgcccaataatatgatatgcaatgcaatttatattttctttaagtctctttagcgttaagggaacttatagatacaggtgctacgtagaaattactatatctccaagttcgtttccaattatttgggctaacagagttggtgctagtagcagctattggctaactaacttacggttagcggtgtcatttttattatactatccaaaatacttgtgaatatgcattagctgtgtatgatgcatgcctatccacaccacttcttgctgctggcatcttcatcgactgtcttggcattataattagccgaaacaccgacctatgaaaatgtgaggactaacgctgccaccttcgatttttggcccatgtgccgggtgcggcgggggcatgtatgtatgtatgtgagaaggtatgccccattgtacattatacatatacatatgcgtgagtattcgtatattgtgtacatatgccacgagtactgtacacaagttttgcagtccattttgctacacttaaagtgcgcttgttgccgccgttgttgctgccgtgcgtttctgttggtgttgctgccacagcagcaacatcttgctgctgttgctgctgcctctgttgttgttgttgttgttgttgtatgtgcgtgcggaatattatgcgccgcgcacaacacacacaaatctatggtgtatatgtatatatgtatatccgttggagagagtggtccaaaggggagaggaggggggtctcgagatatatacacacaatcccatctataaaacgacgcatgccgcgattgcgatgcgacgacgttgctgccgtgctgctgcccctgatgatgctgttattgctgttgttgctgttgttgcgtcgtctcgtggttgtcgttgtcggccacttcatcatcgacaagcagcaagagcaagagcaagagcagcagcaccagcagcagcagcagcagcagaggcacaggctgttggctaaaacaaagcagaggacccggacctcggccgacaaaaaggacgacttgtgtcctgtgtgtacgtgctctgctctcacccccctttctctgtctgccgcccagctgtagatggacaaagagcaacgccaacagtgtgcccctgcgctccttcaattaccctcgaaagtgacggaatggcatgatggaatcttggatggtcgtccggccaccggaggcagcgaactccgacggagtgagctaacctaataactcctaattggaagaccaatttcatgccctactttttggggtagacataggacatagagtattatggacctaaaccgactatgcttaaagagctcttaagtcttcttcttattcagatagttatatatatctaaaaatatatcgcgcctttaaagtcaaattaaatcataaatgaagtaaatttgtactatgataaggcataatgataaccatccattgttctataatgcaaatcacatcaactgtcactcataacaaggctaatttggcagtaactagcctgcgatttactttttatatgatggaatcccgtccagtcgagtcgagattcgcgctgtgtaccaggcgaataaatgtatctatgcagtccctgggctgcaacgcaattgttgccaccttgttctgcctcttctcggctgaagagcgagtcaagcggatggatgagatgagagggggacgcggatcagggtatatggccaagacggatgccaaaaggggtgctaaagagcaggtgtcgagtggggggtgtgtgtgtttgtgtgtgtgtgtgtgtgtggtggtggtggtggtggtgaagtaaccacgatgaggccgcgaacctggcgacgaaaactgaactggctgaaaacgatgcgaatttagtgagttaagtctcgtgtttggagggttaacataggcacacgccggtgggcaagaaaagataatcgcaacaactgtattatgtatattgcttgagcgaaagtatgcaatttaaatggcgttgtttctacctctgtaatatttcaataccaatgaatataccatcctgtttatgatatttcatttcaaatatattgtaaatatacaaaatgatataaaa

SEQ ID NO: 30824 - DNA, 303 bp, DROSOPHILA
atgccgcgattgcgatgcgacgacgttgctgccgtgctgctgcccctgatgatgctgttattgctgttgttgctgttgttgcgtcgtctcgtggttgtcgttgtcggccacttcatcatcgacaagcagcaagagcaagagcaagagcagcagcaccagcagcagcagcagcagcagaggcacaggctgttggctaaaacaaagcagaggacccggacctcggccgacaaaaaggacgacttgtgtcctgtgtgtacgtgctctgctctcacccccctttctctgtctgccgcccagctgtag

SEQ ID NO: 30825 - protein, 100 aa, DROSOPHILA
MPRLRCDDVAAVLLPLMMLLLLLLLLLRRLVVVVVGHFIIDKQQEQEQEQQHQQQQQQQRHRLLAKTKQRTRTSADKKDDLCPVCTCSALTPLSLSAAQL

SEQ ID NO: 30826 - DNA, 3014 bp, DROSOPHILA
aattatgacaacaacaataaacacaatgcaacattattttctcttaatgcttttcgccgctcagttgaatgccccacacacacacacacacgcacacacatatgcgcatacatggaaaaccagcagctgacgaaagatgaaaaatgggaaatgaaaatgagtggttaagggatggggggtggggggggaaggaaaagggaccgggtgatggagttggagaggaaggagaagaagcctgcgcgcacgcgccaatctttcatttttttttttgtttcattactacattattttatcttgccatccacggtgaaaactcagctatgtggatccaatttagacctttaatatgagttagaaactgcgacatgatcagttttgtgtatttgttcataatccagaattcgtttaaaaattgagggaaataatatacgctttactggtccactgtagggagagcactctgttcctgtggctctcgtttattcccctcaatagcaattctttttctgttgactgcaacttgttggttggggctctctccatctctttctctctctcgctctcattctctctttttatttgctatttggttcggtgttttgtttggtgtttttgtctgtattgttgccacgcagctgtgcacaattagcgcaaacgcaacagctgctgccgtcgacgttggcagcgctgctcagctggcagcagagaggcaagaaagatacaaataaactaagtgggcttggagtcgaccaatttgaacttattaccaactatagatgtcaaccaaccttatttattgcccgatttggtgacctttttgtgtgtgacgttgcgtgctaaataatattagtatcaggttttcgaaatacgtgtaattttcattccaattaggcggtattgaaacctataagcatctggttaggttacaaaataaaacaaatagtattatttacgattatgtagcctgtagagaaaactaacagcaattgtgactttctgtcattccagccaaatcaacttgaaacaaaacgcccaaattataagcaacagaaagctagaaccaccgaacaatcaacatctaaagcggcaaaaaaaaactcatcagcttcgaagcaacaaaacaaaccacaatcagtaaccatttttaacaaacaattttgtaaacaatatttgaaaccaaaaccattttcaaaaacttttaacaatcatttaagtaacaacaaatacgaaggattcaaccaaaatttatacaaaaaataagaactgaaccaattctcaacaccaattcaacaactatttcaacaaataactgtaaacgtgtcgcgactcaaagctcctcccgctatcctgctctctcgcgtaaactcgtcgccatcgtctttttccgttgtggtgtacgattttggtgttttttctccaaaatatatatatttattgttctacgcgttcgtcgtccttgtcccgtgcgtgagaccttgtcctcgtgtgcgtctgtgtgtgtgcgtgtgcgagaagaggagtgcggtagtttgtgtatgctatgtcagggatcgggggcattggggtgctcctcgaggcggctcaatttcttgagcagcatgagaagctcccgcaggcgggaggcggcggcggtagcgccctgggcgtgggcgtggcactgcctcaacagcagcagcagacggtgcactgcaagagcaactccattatcaacaacaacaatagcagccagcacaatagaaatagcagcagtagcagtaacgggattattgcaacgccaccgttcacgaacggaaatggcaacggtaccgtcggcgtcggtaacgcgagcgccattttcaacgttagcgtcaatgcgaacgggaacggtctgagcaacggtcacagcagtccgcgcagtcaattagccgccgcagccactgcccacgattacgagtatagcgccgccggagttgccaatggacacagcgaaggtcgcccccacgtctcgggtaagtctctccaatttgacctatgacccacgacatccatacccacaagcccgaccgacccttcatgaatcccagtactcaagtcggagttttccccaggtggaaactgtgtctttaaattgctatttcaggccttttacttaaaaaacaaaaaaaaactaattggacaacaaatggttgggaaaattccgacttaccaaagtctcaaacgaccaattcttatcactcatcattaacatacatcacattcatccaaactgttactactctgctgcccactactgtgcgagcatcgtctaacactcttctctggtgcaacaccatcagctgcttaggtctgctgttaactgttgttgggctctctcgtcaggcgacaaaagtttccaaaaggaaaaggaaatagtgtcgagaaaaatcaaactagcttagtcgctttcttagctctagtgcgttgctaattggcactttgcttgcatgtgtgtatgcaaatatataaaatattggtgataaaaaatatcgcagataacgttgctcaattttgaacttgattgattataatagcaaggtgtagccaaatgctcgattgcaggcgataacctttaataaacttgtatacatgcatacatacacacaaatatagataaagagttattcccacatagaagacgaaccagacacctatggaaagtaaactaatcgtcatttaaaataatatttataccgagatatttgatagtaaacaacagccactcgaagcagacactttggtcgcctttacgaaacgaaaccgtttgtgctctctttctccatttgcttttgctgcatttaaacttgttttgaccttgtttgcgacgtcgactgcattttgcgtgggcgtgcactgtaccaaaaaaagttaaaattaaatacaaaccccaaaagacaacaacagcacggtgctctttgtctctctttctctctcctgcgctctcattttggcacaggttgcaagcgtggcaagcagcaggttctgttatatttttagct

SEQ ID NO: 30827 - DNA, 1014 bp, DROSOPHILA
cattccagccaaatcaacttgaaacaaaacgcccaaattataagcaacagaaagctagaaccaccgaacaatcaacatctaaagcggcaaaaaaaaactcatcagcttcgaagcaacaaaacaaaccacaatcagtaaccatttttaacaaacaattttgtaaacaatatttgaaaccaaaaccattttcaaaaacttttaacaatcatttaagtaacaacaaatacgaaggattcaaccaaaatttatacaaaaaataagaactgaaccaattctcaacaccaattcaacaactatttcaacaaataactgtaaacgtgtcgcgactcaaagctcctcccgctatcctgctctctcgcgtaaactcgtcgccatcgtctttttccgttgtggtgtacgattttggtgttttttctccaaaatatatatatttattgttctacgcgttcgtcgtccttgtcccgtgcgtgagaccttgtcctcgtgtgcgtctgtgtgtgtgcgtgtgcgagaagaggagtgcggtagtttgtgtatgctatgtcagggatcgggggcattggggtgctcctcgaggcggctcaatttcttgagcagcatgagaagctcccgcaggcgggaggcggcggcggtagcgccctgggcgtgggcgtggcactgcctcaacagcagcagcagacggtgcactgcaagagcaactccattatcaacaacaacaatagcagccagcacaatagaaatagcagcagtagcagtaacgggattattgcaacgccaccgttcacgaacggaaatggcaacggtaccgtcggcgtcggtaacgcgagcgccattttcaacgttagcgtcaatgcgaacgggaacggtctgagcaacggtcacagcagtccgcgcagtcaattagccgccgcagccactgcccacgattacgagtatagcgccgccggagttgccaatggacacagcgaaggtcgcccccacgtctcgggtaagtctctccaatttgacctatga

SEQ ID NO: 30828 - protein, 157 aa, DROSOPHILA
MSGIGGIGVLLEAAQFLEQHEKLPQAGGGGGSALGVGVALPQQQQQTVHCKSNSIINNNNSSQHNRNSSSSSNGIIATPPFTNGNGNGTVGVGNASAIFNVSVNANGNGLSNGHSSPRSQLAAAATAHDYEYSAAGVANGHSEGRPHVSGKSLQFDL

SEQ ID NO: 30829 - DNA, 2652 bp, DROSOPHILA
cttacaaaaaaaaaaaaaattctggaaaataaggcttccaaaaggcaaccaaacaccggcagtgtcatccaagaactaaactcgaatagcaagccaaggaggaaggacctccacttggagctgttggagcattgtgtgcagaaaaggtgcatcataaattcacacggaacgtgtaaacagcgacattatttagctaagctattgtctcatgtgggcggcttttcttatgcatactcgcacagtgggctcaaagaaaatcaacttcataatttaaaaaaaaaatcttaagatgtataattggttggttagagtaacatacctatttattaatcccaatgattgccacatattaacatattacatattttttttatattttcccgcttttagcccactgtttcgcccacagtattgaaattcgtgcaaatattgcaaaatttatgccagcttcgaaataaaaacaagtgcccggcattccggctcgttttacgaggcaaacagcgtaacttgcccgattttatgttgttttgttagccaagcaacaggttgcaggtggaaaatcggcaggtgaaaccaaccaaccacatgtatgtagagaagtgcctccaatttgctgcccaatggaaccgcagataaacaaggcaataagcggacaacgggccgcatacgcaattgctgccgtagctcttcattagattggattgtattggattgattgaattggattggattggccggttgtgaaagaggtcctgacccggtcctgggcctcattacttcaaatagagcgctgaccaaacgatttaattataccgccgacgcccgacagttggccggcactcaggtggagaccgggttcggttatatttcaaaacctgacaacacaccgaccagagcgctcagtcggcacgcatccgccgtgtgagccgcatcaggatcagcattccttcgatagccttcgagcacaattcgagcacaagaactaaccaatatgaccagaatgataatacaaaactcgggcagctggacactttgcggagctgtactcctgttcgtcctgccgctgatacccacgccggaggcactgcagcacaccgaggagggtctcgagatgcttttccgcgagcggtgagttgtcaactccattgacatcgaaccgttccgatgtctatgtctccatcttttagttcccaatcggactgggagaacgtgtggcaccaggagacgcactcccgctgccgtgacaagctggtccgccagctatattgggcctgcgagaaggacatttaccgactgacacggcgcaacaaaaagaggacgggcaatgatgaggcttggatcaagaagacaaccacggaacgtaagttgttgaatcgaaatccattccaaccaaagacgattggaatttcaagcgatgtacacatgtacatctatgctatagatccattgatatcgatatgataccacctgctgtctttccagctgatggctccacctggctgcacgtgaactatgccaacatgtttctgcgaagtcgtcgatcggatggaaacactccatcgatatcgaacgaatgctgcaccaaggcgggctgcacctgggaggaatacgccgagtattgtccatccaacaagcgacgcaatcactactgattggccatcgacgttggatctgcttagatatatatatatatatacgaacaaacaaatatatattcgctttttttttcgtggttgttgttgttgatgttcttgttgtggtcaaataaaataaacaaaaggtttcggttaaataaaaagaaactttactggctttaactacaaatttcgcataataaaagctagatttgcatgatataacaaattatattaatcaatcaatgttatacaaatttaacagtaaaattgtctttgcagattagaatagtataattaaaaaaaaaaaaaaaatttcactttattcgacttacaatgatcctactttaaaatgccctaaatatgtccttaaagttatctacaatacattttatacctcttcaattttgggggcagtaacaatcctgtagtgcaatatcacctagtcaacaatatcgtccttttcgtccttgtcggtcacatcgatctccttacgactctttgctgaaccctcagccttgctgcagttgggtgattttcgtggcctcttcgaggccgaacccttttcataatgggtgtccagcatctcgagcaggctcaactggcggccacctgaacccattgatttcgtggctgtactgctcgttttggacgttgtgctgctgttgcttatttctacgctgcttttagcctccagactagcggcctccatcatggcattggcctcctcatcgtccgacagcataagaagggcctgatcttccgaagaatttgagttatcttgcgataattgcgcgggcaatagatcggtactttgttgcgttatggtgatttgcggtcgggcgggttgcttgttgagttctggcgaggatttcgctgatgtttctgattttccttcgcctaatccagctactctagagcttccagcttcggcggatgctccctctccgggcacatctctgaccttcttaagttcctctttaataaaatcatatagcttctttttggatgccttatt

SEQ ID NO: 30830 - DNA, 471 bp, DROSOPHILA
atgataatacaaaactcgggcagctggacactttgcggagctgtactcctgttcgtcctgccgctgatacccacgccggaggcactgcagcacaccgaggagggtctcgagatgcttttccgcgagcgttcccaatcggactgggagaacgtgtggcaccaggagacgcactcccgctgccgtgacaagctggtccgccagctatattgggcctgcgagaaggacatttaccgactgacacggcgcaacaaaaagaggacgggcaatgatgaggcttggatcaagaagacaaccacggaacctgatggctccacctggctgcacgtgaactatgccaacatgtttctgcgaagtcgtcgatcggatggaaacactccatcgatatcgaacgaatgctgcaccaaggcgggctgcacctgggaggaatacgccgagtattgtccatccaacaagcgacgcaatcactactga

SEQ ID NO: 30831 - protein, 156 aa, DROSOPHILA
MIIQNSGSWTLCGAVLLFVLPLIPTPEALQHTEEGLEMLFRERSQSDWENVWHQETHSRCRDKLVRQLYWACEKDIYRLTRRNKKRTGNDEAWIKKTTTEPDGSTWLHVNYANMFLRSRRSDGNTPSISNECCTKAGCTWEEYAEYCPSNKRRNHY

SEQ ID NO: 30832 - DNA, 2582 bp, DROSOPHILA
gcctggtgccgtttcacgccgtttatatcgtcccctacggttcaccctacttgggtttcctggactcactgatccggagttcgcatgagtttggattcgagcgatactgggatcgcatcatgaactccgcctttattaagtctggagtaaaggtggtaaaccgtcgacgcgggagtggcaatgatgaaccggtggtcctcaaactgcagcatttccacgccgtattcgctctgtggctggtggggatcgggatggcatgcattgtgctggcctgggagcacttgacccacaactacaatttggcggtaacaaagcggcgggactaactatcgcatgcagcatgcaatgtgaggcggatgattgtgttgatgtggcgtccacttacctgggtcttctcctccttgtttcgattcgcttccttcagcacggcaatctcgttagtcagtctttggatttcatagttgatgaggccatcggcggtcacatgtgcaccactcgattctgggcccgattcgatggccttctttataccgttgctcttcttggccatttccagcgtatgctgcaacttcttcacttcactcttccaccgacgactatctgcgtcattctgagccctgggttgaaataaaaaagcgatagattgcattttttaatgtctctttaaattcaaaagatcagatcgaaatgggttttaatatcaaacgtgtgactattctatcatattttatatctagatgaaaccagaaatatttaaatgtaatcttgaacaaactgattgcatgtatatttatttccgagtttactgattgccaatcgtcactttcatgaaaggtcaaatatgttttcagtgcacgaatacttttaaaacgaatgtatttgtatttgataactcaatttaaaaagtttcacaacattatgcaatataaaatggtgcgattaaggtaaaatgaaatgggcttatcacgttccttattggtatatatgtatattaatggacttaccttaaggctctcactgcaccgcgttctgtgatcagactggacttcagttcatttacctccagacgcagttgctccgtgagggcatttagcttctggatggtgtccatgttctcctgcagttttctcttgatcctttgtggaggtgctgctatcacatttgtggtagtcacgccaccaattattacgggtcgttctcgatctttttctgcctttcccagttgcttctgggagccggcagatgggcccttctcggcctcaaaggattgggtctccttgggtcgcaatttgccgcgacaatgcagctggatgccctcgatgcgagtgcgcttctcctgattcaccgtatccccaacggaagtcagggagctgctcagtttcttcttgcgcttcaacttgttcttggccatcgtttgccagtcttcgatatcgtgcttctccgtgtggaagctctctttgagtttggagccaggatccgtccggcggaccacagtcccattgtggggcgccaggatatgggcggtcctgctcattgtattacatcccttgctagaggtcgttttggtttggttttcagccatttttatgtaactttagtatataaaaatgttgccgtcgtttttttttgggtttctgctttttcaagtactgcatatgccggtgcaccccgatcctgccgaaagtccctgctatacttcacctggtcatcgttggattctcctcaatctgtaagcgatatattcaaaataaagtatacaataatgtggctttaataatgctttaagcatatacaataaaagccctactcttatctacttattacaaattatgccttgaaaaattacacagtatacagaattccgagtctttgcccgcatggaggttgtttcttcagaatcgcaaagattcccctttgtctgtcagcatttcaatggcttctgtttagccgtagactcttcaacgcttttcttcactgggttgaactaatcaacaagtttcccccattattgatttcagcggaaaagctttttccttcatttcgccacatcgggtcgggccacacatatgaatgaaaaacgaaacatataggcaccctgggactgggaaatagtttacaacgccaattgcgttgggcttaccaaataaactggtccggaatgacttttcttaatgacgtcatgtggcgcgccttttggaatagaacagaatatgtacgtacattcatatgtacatgtgttttttttgttttgtgaggttccccactggggcgctttacacgcaataaaaccgcttttcattactttttttgttctacagaaacagaattctttgcactgctcccacatccgccccaaagattataacaaagcatctatatatatactgtatgaggtgcacacacgagtaggcccacagttcatatgttcatagaatgctctccgagatttctggccgatcatctttatcaaggccacgatctatatacacatgtagagcgacagatttgtgtacttagcaaccttctggcgcctaattggaatttgatttgtttttccagctcgatacactaggtgttaatag

SEQ ID NO: 30833 - DNA, 582 bp, DROSOPHILA
atggctgaaaaccaaaccaaaacgacctctagcaagggatgtaatacaatgagcaggaccgcccatatcctggcgccccacaatgggactgtggtccgccggacggatcctggctccaaactcaaagagagcttccacacggagaagcacgatatcgaagactggcaaacgatggccaagaacaagttgaagcgcaagaagaaactgagcagctccctgacttccgttggggatacggtgaatcaggagaagcgcactcgcatcgagggcatccagctgcattgtcgcggcaaattgcgacccaaggagacccaatcctttgaggccgagaagggcccatctgccggctcccagaagcaactgggaaaggcagaaaaagatcgagaacgacccgtaataattggtggcgtgactaccacaaatgtgatagcagcacctccacaaaggatcaagagaaaactgcaggagaacatggacaccatccagaagctaaatgccctcacggagcaactgcgtctggaggtaaatgaactgaagtccagtctgatcacagaacgcggtgcagtgagagccttaaggtaa

SEQ ID NO: 30834 - protein, 193 aa, DROSOPHILA
MAENQTKTTSSKGCNTMSRTAHILAPHNGTVVRRTDPGSKLKESFHTEKHDIEDWQTMAKNKLKRKKKLSSSLTSVGDTVNQEKRTRIEGIQLHCRGKLRPKETQSFEAEKGPSAGSQKQLGKAEKDRERPVIIGGVTTTNVIAAPPQRIKRKLQENMDTIQKLNALTEQLRLEVNELKSSLITERGAVRALR

SEQ ID NO: 30835 - DNA, 3699 bp, DROSOPHILA
acccgttagcagccgctacgcacaacttaccaaacgtgttatttcaattttggctgatttctgtatgtgagtcaatcggttttcgtacgcgttcttcaattgccgcatatcggcagccttgagtctatcagcctgccccataatctgcaagaaatggtcgaatcatacatgtttgcgtgttgccaactttttggatacggggctccaagcagcgggagataccagaagcaagttaatccatgctgttagtttgcactttgcgattaggtcgcgtaccgtccattaaccaaacgagacacaaaaacacacaaaaaatgctacataaagaacgggaaaggaaagttcttgccacagtcgaagaatcgcatacccttcataaaaaaaaattaaaaaaaacgaaaattttacaaatagcaaacacctaaagactttcactttattgagttatatgcctacttaaaattcatcgcacaatcttgggaactatagagggttactaaaacctgaaattaaaacagtatggaaaagaatatttctgtgttaattaggtaatgcaatctgtaggcagtaactcgcaatgttccttttacagggtataaaagtgcagaagatatagcataatatttgcttaacgccctttgccgatatggcaagcattagggaaattgctatatcgaaattggctctgggtataaaaacaatggtgtcatccctctgctcaaacagttggcattgcaatgtccatccagtggctaaaacacattctgctcctggcaatcctggtcaatttggccgggacacgggagaatcacattccgttagatttgaagaaaagttcgatcgtgatggtcaagatgagtcagatcctctgcaaggctcggattaaggtcctgttcgtctacttcgagaatcaaacctcccacgagcatacgggtcaaatactcaaagaggtgaccaagtgcgacatatcgtacatatctctcaggcaagttgatcatttaatcccataacaatactgataacatataataaccacaaatattcgaatattttactttcaggaatcaaaatacaccactggaggcggtcaaggatgatggcatactaatgtacatggtgatgatcaccacaaacatatcacaaccattggagctttcacttatccggaagaaatcggctgccaagcatcgatcgcatgtttttctcttggtcagagatgcggataccgtttccgatgcttggatgcgggccagtttccggcaattctggaagatatggctactgaacatcgtgatcctctactggcgagatggacgactgaatgcctatcggtacaacccgtttatggacaactatttgataccagtggacaataaaccaaacgaggttccaactttagagcagcttttcccaaagaccatacccaatatgcagaggaagccgctgagaatgtgcatctacaaggacgatgtgagggcaatcttctggagacagggaactatcttggggaccgatggcctgctggcggcctatgtggctgagcgactgaacgcgaccatgatgataacgcgtccgcactcgtataacaaccacaatctcagctcggacatatgtttccttgaggtggccaaggagtacgtggatgtggccatgaacattcgtttcttggttccggataccttcaggaaacaggcggaaagcacggtatcccacacgcgtgatgatctttgcgtgattgtgccgaaagccaagactgctcccactttctggaacatatttcgctcatttggctcattagtttgggccctaattctggtttctgttctggtggcgaatgtcttctgctacatcctgaaatctgaagtgggtagggttcccatgcaacttttcgccggagccctaactatgcccatgacccagattccgccaaaccactcgatccgattgtttctgatcttctggctttactttggactacttatatgctcggcattcaagggaaatctgaccagcatgatggtgttccagccttatctacccgatataaaccaattgggtgcgttggctaggtcccactaccacatcatcattcgtccaaggcacgtaaaacatatccaacacttcctaaccctgggacacaagcacgagtccagaattcgggaacaaatgctggaagtttccgacacccagatgtacgaaatgatgaggaacaatgacataaggtatgcgtgtacgtggattaattgctgtaattccataaaatctactttcgcagatttgcctatttggagaagtatcacatcgcccgtttccaggtgaacagccgtgtgcacatgcacctgggtcgtccgcttttccacctgatgaacagctgcctggtgccgtttcacgccgtttatatcgtcccctacggttcaccctacttgggtttcctggactcactgatccggagttcgcatgagtttggattcgagcgatactgggatcgcatcatgaactccgcctttattaagtctggagtaaaggtggtaaaccgtcgacgcgggagtggcaatgatgaaccggtggtcctcaaactgcagcatttccacgccgtattcgctctgtggctggtggggatcgggatggcatgcattgtgctggcctgggagcacttgacccacaactacaatttggcggtaacaaagcggcgggactaactatcgcatgcagcatgcaatgtgaggcggatgattgtgttgatgtggcgtccacttacctgggtcttctcctccttgtttcgattcgcttccttcagcacggcaatctcgttagtcagtctttggatttcatagttgatgaggccatcggcggtcacatgtgcaccactcgattctgggcccgattcgatggccttctttataccgttgctcttcttggccatttccagcgtatgctgcaacttcttcacttcactcttccaccgacgactatctgcgtcattctgagccctgggttgaaataaaaaagcgatagattgcattttttaatgtctctttaaattcaaaagatcagatcgaaatgggttttaatatcaaacgtgtgactattctatcatattttatatctagatgaaaccagaaatatttaaatgtaatcttgaacaaactgattgcatgtatatttatttccgagtttactgattgccaatcgtcactttcatgaaaggtcaaatatgttttcagtgcacgaatacttttaaaacgaatgtatttgtatttgataactcaatttaaaaagtttcacaacattatgcaatataaaatggtgcgattaaggtaaaatgaaatgggcttatcacgttccttattggtatatatgtatattaatggacttaccttaaggctctcactgcaccgcgttctgtgatcagactggacttcagttcatttacctccagacgcagttgctccgtgagggcatttagcttctggatggtgtccatgttctcctgcagttttctcttgatcctttgtggaggtgctgctatcacatttgtggtagtcacgccaccaattattacgggtcgttctcgatctttttctgcctttcccagttgcttctgggagccggcagatgggcccttctcggcctcaaaggattgggtctccttgggtcgcaatttgccgcgacaatgcagctggatgccctcgatgcgag

SEQ ID NO: 30836 - DNA, 1818 bp, DROSOPHILA
atgtccatccagtggctaaaacacattctgctcctggcaatcctggtcaatttggccgggacacgggagaatcacattccgttagatttgaagaaaagttcgatcgtgatggtcaagatgagtcagatcctctgcaaggctcggattaaggtcctgttcgtctacttcgagaatcaaacctcccacgagcatacgggtcaaatactcaaagaggtgaccaagtgcgacatatcgaatcaaaatacaccactggaggcggtcaaggatgatggcatactaatgtacatggtgatgatcaccacaaacatatcacaaccattggagctttcacttatccggaagaaatcggctgccaagcatcgatcgcatgtttttctcttggtcagagatgcggataccgtttccgatgcttggatgcgggccagtttccggcaattctggaagatatggctactgaacatcgtgatcctctactggcgagatggacgactgaatgcctatcggtacaacccgtttatggacaactatttgataccagtggacaataaaccaaacgaggttccaactttagagcagcttttcccaaagaccatacccaatatgcagaggaagccgctgagaatgtgcatctacaaggacgatgtgagggcaatcttctggagacagggaactatcttggggaccgatggcctgctggcggcctatgtggctgagcgactgaacgcgaccatgatgataacgcgtccgcactcgtataacaaccacaatctcagctcggacatatgtttccttgaggtggccaaggagtacgtggatgtggccatgaacattcgtttcttggttccggataccttcaggaaacaggcggaaagcacggtatcccacacgcgtgatgatctttgcgtgattgtgccgaaagccaagactgctcccactttctggaacatatttcgctcatttggctcattagtttgggccctaattctggtttctgttctggtggcgaatgtcttctgctacatcctgaaatctgaagtgggtagggttcccatgcaacttttcgccggagccctaactatgcccatgacccagattccgccaaaccactcgatccgattgtttctgatcttctggctttactttggactacttatatgctcggcattcaagggaaatctgaccagcatgatggtgttccagccttatctacccgatataaaccaattgggtgcgttggctaggtcccactaccacatcatcattcgtccaaggcacgtaaaacatatccaacacttcctaaccctgggacacaagcacgagtccagaattcgggaacaaatgctggaagtttccgacacccagatgtacgaaatgatgaggaacaatgacataagatttgcctatttggagaagtatcacatcgcccgtttccaggtgaacagccgtgtgcacatgcacctgggtcgtccgcttttccacctgatgaacagctgcctggtgccgtttcacgccgtttatatcgtcccctacggttcaccctacttgggtttcctggactcactgatccggagttcgcatgagtttggattcgagcgatactgggatcgcatcatgaactccgcctttattaagtctggagtaaaggtggtaaaccgtcgacgcgggagtggcaatgatgaaccggtggtcctcaaactgcagcatttccacgccgtattcgctctgtggctggtggggatcgggatggcatgcattgtgctggcctgggagcacttgacccacaactacaatttggcggtaacaaagcggcgggactaa

SEQ ID NO: 30837 - protein, 605 aa, DROSOPHILA
MSIQWLKHILLLAILVNLAGTRENHIPLDLKKSSIVMVKMSQILCKARIKVLFVYFENQTSHEHTGQILKEVTKCDISNQNTPLEAVKDDGILMYMVMITTNISQPLELSLIRKKSAAKHRSHVFLLVRDADTVSDAWMRASFRQFWKIWLLNIVILYWRDGRLNAYRYNPFMDNYLIPVDNKPNEVPTLEQLFPKTIPNMQRKPLRMCIYKDDVRAIFWRQGTILGTDGLLAAYVAERLNATMMITRPHSYNNHNLSSDICFLEVAKEYVDVAMNIRFLVPDTFRKQAESTVSHTRDDLCVIVPKAKTAPTFWNIFRSFGSLVWALILVSVLVANVFCYILKSEVGRVPMQLFAGALTMPMTQIPPNHSIRLFLIFWLYFGLLICSAFKGNLTSMMVFQPYLPDINQLGALARSHYHIIIRPRHVKHIQHFLTLGHKHESRIREQMLEVSDTQMYEMMRNNDIRFAYLEKYHIARFQVNSRVHMHLGRPLFHLMNSCLVPFHAVYIVPYGSPYLGFLDSLIRSSHEFGFERYWDRIMNSAFIKSGVKVVNRRRGSGNDEPVVLKLQHFHAVFALWLVGIGMACIVLAWEHLTHNYNLAVTKRRD

SEQ ID NO: 30838 - DNA, 3157 bp, DROSOPHILA
gacacactctcatgtgcacaacgatctacatctaatttcactttgctggctgctcgaataattacttttggttattgcaattagacgagtgaattggattttcaagctgaacgacttcactgctgctggctgccagctgaaactgttcggctctagaaattaagcgtaccgaaactgaaaagcagcaaaaatgattgacggaatagggcatcgaactggagataccccttaagagattttacagataactgagcattatagctaagatatttatgtgattgaatataatacaggattatgtgaccaccaaatcgattgaaaatatttctaagcccccatatcatcgatatacctttatatgctccatttaatggtcatcacaaaggtgtggggccatcaaagcctttttgctcgatttggttttctatgagcaatggcaaaacactcataagtataacaagatacatagatggcatccacttagggcgctacccttataagtagcgttttaagcgcttgaacacggatttgggtaaaacaactcttagacctaagcgtctacatggccaagaagcgactctagcatggggaaaattgtaggcgttgatcacagatcgaggtagtgacataaagtcaatgtgcgcagatagagtcactaacaattggaaagtttaaccacagttttcaattcctgaatattttataacaacacaggctaatgagttagccattaactgcggctgatccagtgaaacaatttcaattggaaaatacagaaagattgtttgtgccgttaaaccaaaacaatttccgtgctggcttagatgccaaacaaaactaaaagagactccagcacacatagttggccaacatcgctagcttggctctgagcgaactcaagtcgggttccaccgaatggctcaattcattcataaacaaccaagccaagtgagtcactcgttcgagtggattcgcaaactggtcttcgagtgaatcgtgctcagtggtgggggtgccgtttgcctaccttatcgctatcatcttccagctcgagtatgcgaaactcaaggagttcattctgctccctcagttcgctggcctcgtcctccaagctcgactgcatctcttccagctccttgatgcgctgcatcagctccccgatctgggcctgcttcttggccctgcttatggccgccttttccgcggcatccagctcctgtttcatcagctgcacctccgtctgcaggcgttcgttctccttttggtacatttccgcttccttttgcaacttgtccaggtcctgcagctgcaagaaaacgggggtggatttgattagaatctaaaggaaacggttctagaaacgatgggaaaactatgtcgaaaacaatcttcagttctgcgaaacattctgtctcacaagatattccttttgaaactcaaccaatagttacttttaacataatatctatttatgatgcatataaatagtaagaggaatataggtcctcttacttaatttactataatttatatgttataattataattttgatctatttcatcaaaatcaaaataaaaaaaaatctattgtttgaaagcaaacatgtataaagagttatcaatatgaaatcgtaagactattaactaagagatcttgctttgggttcctagttaagatagatcgttaaacacggactatcattaatcaaatctattcaaagcaaacttctcatgccaaaaatttgatggacttgtgatgtattttaaaaacccagctttatgtaggtccatctcttggcaaagagattccggtacttactgtttgccaaatcacgccgctgtcggatccgctggatggcggctgcgggctgatggagggcggggccgaggacaaggccgagtccgtgtccgaattgggatccttgggaaggcagggagagcggggttaatcgaatgccagatttcgacagaatttctatgccatgactcactcaccttcgacttggctactgccggatggctgtggctgtggctatggcagttactgcctaccagcgtcgtcatccaagtggtggccctcatctcgtcgggggccctcatccgtgtaggagcatcatccaatccattcggctgactgctcttcattgttgtgcgcatctcgagcgctgatttatgtgcatttttcgtattgttgattagctcaatgttcttgagttgggttatctgcgggaaatggatggggaaaaattagaaaatgtcgtgccatagttacatttattcaccacctattcaccatcactctctatcactccatttacccacgttttcttcgggcgacctggcccagaatggacaaagcaattaacaaaagaatctgttttttatctgctgttcgtggagcgtgtttgtggcatatgctatataaagaggggggcattgaagaacgaagaactttgaaaagaacgctccgctttgcggtatgctctttacatgtgtgttaacagttatgacttgatttcttgccacagacacacttttcgcttaaaaagcgcccaatcattactatggacaggtacaggttgcttttaatccggataatgggggtaccacagtgggtcccagaagtgggttcaatgacacggtcgagagatcagagcggtcggcaaaggtgcgtcttaatcgcagattagctgggccaaggcaccggcctcatgcacatccaaatccacagccacatccagtgtagcaacaatgatcctggtcgtgcatcacgacactccacgcactattgagtttaccattcaaaagatttcgctttatcgccgggtcgcatcacgactttcatggtcacgatgccatccatctggccagctgtcagctaattagcctctaagcccaaagccaacacaactcaactggactcagctcagctcaaaaatcaagcaatttcagccgaacccagttcaaaaagccaaatcactttccaatcaagcaacgcccagttatgttttactttcatgtcaatcgcatgttttatataacacccataatagcagtgttattatacgcataatgcagcattatgctaatttgtgggtctcgttggacatgtgtgtctggggccggagaaatcattaatcaattgtgaaacgagcta

SEQ ID NO: 30839 - DNA, 570 bp, DROSOPHILA
atgcgcacaacaatgaagagcagtcagccgaatggattggatgatgctcctacacggatgagggcccccgacgagatgagggccaccacttggatgacgacgctggtaggcagtaactgccatagccacagccacagccatccggcagtagccaagtcgaaggatcccaattcggacacggactcggccttgtcctcggccccgccctccatcagcccgcagccgccatccagcggatccgacagcggcgtgatttggcaaacactgcaggacctggacaagttgcaaaaggaagcggaaatgtaccaaaaggagaacgaacgcctgcagacggaggtgcagctgatgaaacaggagctggatgccgcggaaaaggcggccataagcagggccaagaagcaggcccagatcggggagctgatgcagcgcatcaaggagctggaagagatgcagtcgagcttggaggacgaggccagcgaactgagggagcagaatgaactccttgagtttcgcatactcgagctggaagatgatagcgataaggtaggcaaacggcacccccaccactga

SEQ ID NO: 30840 - protein, 189 aa, DROSOPHILA
MRTTMKSSQPNGLDDAPTRMRAPDEMRATTWMTTLVGSNCHSHSHSHPAVAKSKDPNSDTDSALSSAPPSISPQPPSSGSDSGVIWQTLQDLDKLQKEAEMYQKENERLQTEVQLMKQELDAAEKAAISRAKKQAQIGELMQRIKELEEMQSSLEDEASELREQNELLEFRILELEDDSDKVGKRHPHH

SEQ ID NO: 30841 - DNA, 3393 bp, DROSOPHILA
ttgagcatccgggccagaacttctccatggtcacgctggacgagcaggctgagaacctcatggatgcggttagtatggttacccttttctattacattatatccttaaaattcccatctccacagtcggcagaacgttttgtcgagtggctgaactcctttggcaccttggaaagcaatttgaccccggaaaaggtcaagaaccttttttccatcaagggcgatcgcaccctgttggcctccgtgaagacagatcccaaggaggtcaacgccattgctcagacagtggccgataaatggaacaagccacatgtaggtaacgatagagaaatccccttataatcaatatacaagttatccagattattaattatattacatttctagatggccattgagcttaagtacgagaagcacattaatgaccacgctacccgagtgaaccagaaacccctgctaagtgcatttggacgcactgttccactgaaggatcgtccgtggttaaaacgatccggggacaccgtcattaagacagtctatccggatgatctgctgacccgcgagaagatctttaagggcatcacccacctgcggagcaccactgccctgatcgatttctatctggcccatccggaactggagcggccacagtatctcctgcagagcggtgactttgaggagtccagcgccagtgaatctgtggctgaggtgccgctctacgaacttctgggattgcgttattaagccattgattgccattacgttgattagttaaattccctgttgtctgaatatgaatggttgcagtcaaatataaataaattgtccaatatgtttagagaaatataaacaaatatacataacataaaatgaaataaattttagtcttattaaatgaatgtaatgaaaatcgttttaaaattttaaatgttatattaaaatgttttcactaagaaaagaatattaagcaagcagtaaagtttattgtttaaaattggtttctataacgtcagcgttgtttggatccagggcagataggtgcccacattgacatagacacccggaactcctgcctgggcgcatccaatgccccaggccaccaaacccaccacgtaccatacaccattgctggtgcagacaagcggagatcccccatccccggtgcaggcatccttgccagcttctccgccggcacaaatgaagctggtgggactgaggacgaaggaggagcccagtcgggttgcctgcagcgccgcctggcaattggcattgggaatcaggggcacatccacttgcctctcaatggcctggtacgctccggtggcaccgaagtcattcttgccccacccagctacccagcatctctgacccacgaaactggtggtgggcagacagacagtgcccacagtggatttgctggtcagcgaaacgggtgtggacaacttcaggatggccacatcgttctgcagattgttgggattgaaggacggattgacgtacacattcgagatgtacacatcctgggcgggaatcggttcgctcgtactggcagcatcccattcccccagacgaaccttaaagtaagtgagcctaacacgatgaagttaaagaattggacagggatctgggaaaaacagaaacgaacctaccccagattgtaaactttgtgggcggcggtcagaacatgttgtgcggtgatcagtgctccgccacccagataaacatccgcggtggtaagcagtgccgcctgccaaggatatgctccaaaactggcctgtccaggcgcagcggtggtggatcccggtggaggcgggaacctccgaccacactgatagcttcccgcctggcagcaggccaccagaccatagctacatgtcagagtggaagatgtggttggaacagtgggctaaacaggagttacaggagttaaacaggataacccaatcatttatgattatctatcccttacatatcctccattgttgacaatcctgatgtcaatctggccactgccatcgctgggtgcggtgggcagaggattggcgcatgatccgggcggaacgcactggcagtagctggttccgggactcacgatggagggcacaggtggccaggtgcccggcgcaacctgcggtggcagcagggtgcccacaatcagctgccgggcgagtactgataggcaataaaatcctgcacaaagcattgcgttgattggagatacttacttgtgtgattcgcagtgctgcccacatcgctgggttgcggcactcgatttgtatcctggctggcatccgattgaactggtccaaagctccaggcacccacacctaatcctgatccgatgttaagccactgcagcagtggcacccaccacatgcgaccaaactgagtcatagccaatgacaactaaatcgagccgacaaaattgtggtcggctatatagcgatggcctgtccataactccccctattaaattgactgacgaatggcctcctctgctcagggattttccctactgcatagaagcaacaaaaaagcaatcataaaaagcaaattaggcgagtagtaactgcaccacgaagtggagttactcttttcattcgttcatgtgcagtatatatttacaatatttcctacttttaccaaaatatttattaccatatgtgtatattgcataagtggtctaccatgactaaactaagcaaaagagtattcctcaaaaatagcaccaaataaataaagtatagatacgacgtgttgacaactctatggttcgataattttatttatctgaatactttcattgttccaaaacaattttctaggtgctccacattttttagccatttaatttgattgtaataacttaatagtttaattgcaaacaatttggtgtcgattcatgtttgacactttccgcttgaaatgcaatcgcatttccctcaacgccccgaacaactgttaacaacttggcaccagaatttgtttaatgattcacggcccacaacattccgctcgatctaacactaatccccgtctagagctgttaaactgggcgaatgttaagtccgcgatacgaaaagctttcgagctttcatatcaggtgtacctaactatgggtaacttggtctggtctaatcagtttgtgcgctaaagtggaacgaaatgggtcacctgcagttggatttccattccatacctaagctccatggcagggagaactattggcagtggcgcatcctcctgaagacctttctggaggccaacgatctgtggaagcacaacgaaccgaaggaggtacctatcctaatcttacattcgaagtaagagttatttttaaccttatcaccataatatcatttccagagcccagaaaccaaattcctgattttgg

SEQ ID NO: 30842 - DNA, 1134 bp, DROSOPHILA
atgactcagtttggtcgcatgtggtgggtgccactgctgcagtggcttaacatcggatcaggattaggtgtgggtgcctggagctttggaccagttcaatcggatgccagccaggatacaaatcgagtgccgcaacccagcgatgtgggcagcactgcgaatcacacaatactcgcccggcagctgattgtgggcaccctgctgccaccgcaggttgcgccgggcacctggccacctgtgccctccatcgtgagtcccggaaccagctactgccagtgcgttccgcccggatcatgcgccaatcctctgcccaccgcacccagcgatggcagtggccagattgacatcaggattgtcaacaatggaggatatcccactgttccaaccacatcttccactctgacatgtagctatggtctggtggcctgctgccaggcgggaagctatcagtgtggtcggaggttcccgcctccaccgggatccaccaccgctgcgcctggacaggccagttttggagcatatccttggcaggcggcactgcttaccaccgcggatgtttatctgggtggcggagcactgatcaccgcacaacatgttctgaccgccgcccacaaagtttacaatctggggctcacttactttaaggttcgtctgggggaatgggatgctgccaacgatgtggccatcctgaagttgtccacacccgtttcgctgaccagcaaatccactgtgggcactgtctgtctgcccaccaccagtttcgtgggtcagagatgctgggtagctgggtggggcaagaatgacttcggtgccaccggagcgtaccaggccattgagaggcaagtggatgtgcccctgattcccaatgccaattgccaggcggcgctgcaggcaacccgactgggctcctccttcgtcctcagtcccaccagcttcatttgtgccggcggagaagctggcaaggatgcctgcaccggggatgggggatctccgcttgtctgcaccagcaatggtgtatggtacgtggtgggtttggtggcctggggcattggatgcgcccaggcaggagttccgggtgtctatgtcaatgtgggcacctatctgccctggatccaaacaacgctgacgttatag

SEQ ID NO: 30843 - protein, 377 aa, DROSOPHILA
MTQFGRMWWVPLLQWLNIGSGLGVGAWSFGPVQSDASQDTNRVPQPSDVGSTANHTILARQLIVGTLLPPQVAPGTWPPVPSIVSPGTSYCQCVPPGSCANPLPTAPSDGSGQIDIRIVNNGGYPTVPTTSSTLTCSYGLVACCQAGSYQCGRRFPPPPGSTTAAPGQASFGAYPWQAALLTTADVYLGGGALITAQHVLTAAHKVYNLGLTYFKVRLGEWDAANDVAILKLSTPVSLTSKSTVGTVCLPTTSFVGQRCWVAGWGKNDFGATGAYQAIERQVDVPLIPNANCQAALQATRLGSSFVLSPTSFICAGGEAGKDACTGDGGSPLVCTSNGVWYVVGLVAWGIGCAQAGVPGVYVNVGTYLPWIQTTLTL

SEQ ID NO: 30844 - DNA, 3561 bp, DROSOPHILA
gaagattatggtgagttcacaaatacatattgtgtaatcggtactgtaactaatgtacatcttacattttagagaaagcactgaagatccacggagagctgcccacaagaaaccgacgtgctttggccgagttgcattacaagatcgggctgacctatttgatgcagcaactcaacaaggaaggagcgacagcactgcgtcaatcaagcgtgttgatcgaggaggaaatcgccgagattaagggcaaggacgaacctagcgagcgcgacagaaacaatatgttggatttggaggaaactaagcaggagattttggccaagatccaggaaatcgaagagatgcaggcccaggtaaataaatattggtcaacttaatttttagattatctataaaaaatcggttattctcttagaccattgctgaagtgcgagctgccctggatagctacatcaagccaatgagcagtggtgatgcagctgctgcctcctcctcgtcgtcgtcgtcagccaatggagccgccagctcttcgtcgtcctcctccaaaggtgctgcggcggcctcctcatcgaccattagcagcagttcggccaagcccacagacatcacacatttgatcaagcgcaagaagccggaggatcccagctcggaggctgaggccctgtgctcgccggccaagcgtgccgccgtctaggggaatcattccagttgcccagtggcacaccagcacccactcacaaccaagcccttaaaatacaccacactcatcggctacttaaaccaacccacacgcattaaacaccattcaactgtcctatacctcgaacctacatatttatgctacttgtttgctgttttctaccaaaattctctgtaagtctgtaagtttacaatcacaattagtgctaagtgcgtacataaaataatgttttgtattaaaagaaaaactaagtaggaaggcaaaaagtgtacacaataaatacgggagatttcccccagaaagttagtagagcggatgtggatctgggactgggattaacaaaccggctgcccctgaatacgtactcagatgcggctgcagagtgacctgtgactcactgtgctgccagtcgttgcgctgctcctcgcctcgtgcgttttccattgagccggccaggtagtttacacacggaggagcaccgcgtgggaacttggggttgcgccgcagttcctgcagctgctgaatgggcagatcaatgcacagtgtccagatgccgccgtgcatgggcaccaggaaaacagagtcgcgccgaaagcgatgatcggctgcgagaggagaaacgcaccgcggggttcaatattcaatcggtatataattatttaatatagatatttggctcacccctcttgtccggcttgagcatagccacctggtcgtcgagaagccactccagatgcagtcccgatcgattggagtagcgatcaaggctgttgcggtcccatgtaacgtgctcccagtgatcagtcatgatggcagcgcacagcatggctgtggcgcttgtagtcatcagcagagtgacgaacaggaagagcaccggcggcgggcccatgcagcagctggagcaacaggtgctgccgcctcccctaccgcccatgcccattcccagaccctccatctgggagcccagtgagttgggtgaaccactaccgctgccccgacgctgaatgaccttggcgcagctgttctgtcgcaacaggatgctgttgctccgccttagactctcgactgccgccgccgctgctgctgtggtcgttggattatcaaactgcagggatcctccaaccaccgaggaggggtgctcataaatgctgttgtgccggctgggtgcaaagtagtagcacgtcgtctggcggttatcgacggaactcgaggctaccggctcgccgccgggcaactcctcattgctgctggagtagacgatggactgcttaaactgattcgagtagcagttttgcttgaagctctgctgttgctgctgctgttgcacgtacaaggcctcgtagtcgcagtgatgtggattccggtagatgactggccaggagcgagtggtcttggagttgtggctataacgctgggtcgatgtggttggcgctatagagccgggctcctccaccaacggcgttagctcattgggcggttccgccggctcggacaacttagtgtgctgctcctgcgcggaatgctccagatccggatcctcctgctgaacggtggttgccagctggcgctgaagcacgttcttaaccgctgtaccactgccgctggccaagctgaaatcctcctcttcgaccagagtggccccgcctggcgtggagaaaaggatgttagacgtcggcggcgaaggttgcgagcgactgcggagcagggcaaagtgcttgggctggatggagccggttgctgtcgtcggcgacgtgatgctcacttcgggcacacagcgggccgtcaccttgtaccggctgccgctgccaacggcgacgccgacgttgaccccaacgccgacgccgacgttgcccttggagcgcatcagtcataagtcgctcgcgtcccgcttcttgatcttgttcaggctcatgtggttcgtggtggtggcgatggtggattgttggatgtttgcgatttcggatggatgttgtattttgctctggttgctgatgttgcagatgttgctgttgtgttcttgggttgtttttgtgtgcgacgcctaagagtctacgttgcaaaatattactttgctggggtgcctcgacaaaaaatgtatgtaagttttacataaatgttgtacggttttttttttatatatctactagcagcggttgttgttgcttttcttgttgcagtaactctgttcttgttgttgctgttgttgttgttattgtagtttttattgttgctgttgtatttgtttgatctgttgttgttgttgttgttgttgcatcggcaattatggttaagtttatttgcataccaatttacatttatgtttgtcttgttttgatttggacttttgatttttgatgctattttttttttcgtttgttcatttactacgtttttgcttagcttgaagctataaaaagaaagaaagtagaagaaaacaaatgtacaacatgagtttgaagaatagagagtcgagaactaagacgggacagtaagaattcttctacgaaaagtgcaatctattgcaatgattacaaacagtaatacaagtatctaaagtgcaagagcatcttaggtgcagattatttctaaaacaacattgttatacagtgtagaatatagatatcatatagcttctttaagtgaacaaaataattaggatggacgtggttatgaggtttagttgttagttgcacagtagctttctttagaaaaacacgaagaacaaatgaaattatattttaatttaatttcgaattgcttgccttttcagcgtaaaaacaacgagtttgcacctaataaacccaaattgcatttaaaattcccccttggcgtaatctaatcagacttcatagtcgccaccactg

SEQ ID NO: 30845 - DNA, 1485 bp, DROSOPHILA
atgcgctccaagggcaacgtcggcgtcggcgttggggtcaacgtcggcgtcgccgttggcagcggcagccggtacaaggtgacggcccgctgtgtgcccgaagtgagcatcacgtcgccgacgacagcaaccggctccatccagcccaagcactttgccctgctccgcagtcgctcgcaaccttcgccgccgacgtctaacatccttttctccacgccaggcggggccactctggtcgaagaggaggatttcagcttggccagcggcagtggtacagcggttaagaacgtgcttcagcgccagctggcaaccaccgttcagcaggaggatccggatctggagcattccgcgcaggagcagcacactaagttgtccgagccggcggaaccgcccaatgagctaacgccgttggtggaggagcccggctctatagcgccaaccacatcgacccagcgttatagccacaactccaagaccactcgctcctggccagtcatctaccggaatccacatcactgcgactacgaggccttgtacgtgcaacagcagcagcaacagcagagcttcaagcaaaactgctactcgaatcagtttaagcagtccatcgtctactccagcagcaatgaggagttgcccggcggcgagccggtagcctcgagttccgtcgataaccgccagacgacgtgctactactttgcacccagccggcacaacagcatttatgagcacccctcctcggtggttggaggatccctgcagtttgataatccaacgaccacagcagcagcggcggcggcagtcgagagtctaaggcggagcaacagcatcctgttgcgacagaacagctgcgccaaggtcattcagcgtcggggcagcggtagtggttcacccaactcactgggctcccagatggagggtctgggaatgggcatgggcggtaggggaggcggcagcacctgttgctccagctgctgcatgggcccgccgccggtgctcttcctgttcgtcactctgctgatgactacaagcgccacagccatgctgtgcgctgccatcatgactgatcactgggagcacgttacatgggaccgcaacagccttgatcgctactccaatcgatcgggactgcatctggagtggcttctcgacgaccaggtggctatgctcaagccggacaagagggccgatcatcgctttcggcgcgactctgttttcctggtgcccatgcacggcggcatctggacactgtgcattgatctgcccattcagcagctgcaggaactgcggcgcaaccccaagttcccacgcggtgctcctccgtgtgtaaactacctggccggctcaatggaaaacgcacgaggcgaggagcagcgcaacgactggcagcacagtgagtcacaggtcactctgcagccgcatctgagtacgtattcaggggcagccggtttgttaatcccagtcccagatccacatccgctctactaa

SEQ ID NO: 30846 - protein, 494 aa, DROSOPHILA
MRSKGNVGVGVGVNVGVAVGSGSRYKVTARCVPEVSITSPTTATGSIQPKHFALLRSRSQPSPPTSNILFSTPGGATLVEEEDFSLASGSGTAVKNVLQRQLATTVQQEDPDLEHSAQEQHTKLSEPAEPPNELTPLVEEPGSIAPTTSTQRYSHNSKTTRSWPVIYRNPHHCDYEALYVQQQQQQQSFKQNCYSNQFKQSIVYSSSNEELPGGEPVASSSVDNRQTTCYYFAPSRHNSIYEHPSSVVGGSLQFDNPTTTAAAAAAVESLRRSNSILLRQNSCAKVIQRRGSGSGSPNSLGSQMEGLGMGMGGRGGGSTCCSSCCMGPPPVLFLFVTLLMTTSATAMLCAAIMTDHWEHVTWDRNSLDRYSNRSGLHLEWLLDDQVAMLKPDKRADHRFRRDSVFLVPMHGGIWTLCIDLPIQQLQELRRNPKFPRGAPPCVNYLAGSMENARGEEQRNDWQHSESQVTLQPHLSTYSGAAGLLIPVPDPHPLY

SEQ ID NO: 30847 - DNA, 2621 bp, DROSOPHILA
cccgaacaccctgtacataatccgctatcgggctcatggtggtcttgttccggcccagattcacgcccacaactccattgaagttctcctttttgcggagcaagcgcagccgttggagcacggcctgatgcccgtcgctattaaatccgtaccgattaatgatggccttgtcctcggtcaaccggaatactctcggcttgggattgccctcctgagccgccggggtaactgtgcccacctctataaatccgaatcctagatcctgcaggccgtccaccgcctccgcgttcttatcgaatcccgctgcaatgccaatgggattgctaagcatccggccaaagaacgacgtgtgcaagttctggtcatcatggtactgtgaaaccgggcacaggcggtacttgcacgccagcacggccagttgatggctggcttccgccggaagaagtcgcaccgctggcatcacgaaggtccggaacaactggtcctggttcttgtatgccgtaatgcccgccaccaaggcagctcctccgactgtaacgattcccagcgaccgcaaacgaccctgtgggcggaatcattctgtaatccggtcccgtttaagccgtactttactcacaactctccgcgtggcgtttttagcattctttaagtgatcctgatccatgacgactatcgccggatatcgattgtacccgatagagtattaaaagtataatatgtaaaaaagtaaatgcatgtactagagttttaacgaaaattcaatttgggagtaagtctggccattttgaaggaaaactcatgcgatatatagttactacggcaagcatcaataattttcttttttttctgtgtagcaaatgaaccccttctattcacaaccatgccgaagagaatcgatagtcctccagtgtcacctctaatggttgagtcagtttgttatggccagctaaaaattagaaatttcgttctctaaacgctgatttggccacccgaggcaaccatgaagggcggcacctttcgcaacacgcagtgggatcccacgctgctgtcctcacagattgtgtccatgcagttctgcgtgtacttcacccttggcctactcgtcttcgtggccaacaagttgtccggggacaactatagtctggatcacttgttcgaataccatgtatgccatatgctatataccatatatcatggaaacccctctccttactttgatttaatgttgcttaaaggagatccacatctacgacatgggtggccgcctggtgatctgcgcatttgttttaaatgcgttcttagcctccctggcactgtggtgcattgtgagaagagccaagctctgtctggactttaggtgggcttatagctagtgcacacacttaatcttttgcttttacaactcatgcttccctttcatggcagttgcaccttccacgtgctgcatttgctgatctgctggtggtacaaccgctcctttcccgcgaacgcatcgtggtggctactgaatgtcatcaccggcacaataatgtgcataggcggcgagtttctctgcctgcagaccgagatgaaggagatcccagtgggctatgcggccctcaatcaaaagtcggacgtctgactcgaagccaccaacttgtgatgcctgctacccccccaaccaagccacccaaagcagcttctgtgtacatgtaatttattgttaaactagcgtaagattacatagcatataaacactatattgtacttctactttcaatgtaatatctggtaaacgaagggcggtctctgccgaagcttaagttcctcaggtactgctgacggcggcagggagtactttattccagatccactgtagttcgatatcattgaccatagtgactcctcgcgcggcacaaacatccagtagctgaaggccagcataaaagtaccgatcagcgatgccagtagaagcaacatccagcacggaccatgatgtggcttctgcatcctcgtcgtgtttatatgttgacagtctgaaattgacacagctgagatccgcgaatacaactgggagtgcactgaaaatttccgccggactgccgaaaataataataaaacggggtgtggcctagtcaagcgcccacgctgtttattatttcaaaatccagcgatcaagaagcgtagagctttgctgttcaagcaaatttatctggcaaacaaacaacgacaaatcgacaagctcccctctttagaaaacatcagagcaaactaatcaacttgccctatctaatctaattagcaaacgggtaggcatcgccacgatcgtcacatcctcggcactatttgatgcatttcctacttacattctcgctccccacgtttcgaacattcaattatactgattgcttaaatgtgcataattgaagctttgccgctgggaaaccggcgacaaagctctcatctgagaagctcctaaaggttactaacctatcctatggatattccactccttaattattttgataatatggccagcagctcgtcgcggttgaaaatccaatgatctcttacatcgaaacgtattggttcgaaaagcgtactgaactaaaaccaaagaacaggcaacttgccaattctta

SEQ ID NO: 30848 - DNA, 483 bp, DROSOPHILA
atgaagggcggcacctttcgcaacacgcagtgggatcccacgctgctgtcctcacagattgtgtccatgcagttctgcgtgtacttcacccttggcctactcgtcttcgtggccaacaagttgtccggggacaactatagtctggatcacttgttcgaataccatgagatccacatctacgacatgggtggccgcctggtgatctgcgcatttgttttaaatgcgttcttagcctccctggcactgtggtgcattgtgagaagagccaagctctgtctggactttagttgcaccttccacgtgctgcatttgctgatctgctggtggtacaaccgctcctttcccgcgaacgcatcgtggtggctactgaatgtcatcaccggcacaataatgtgcataggcggcgagtttctctgcctgcagaccgagatgaaggagatcccagtgggctatgcggccctcaatcaaaagtcggacgtctga

SEQ ID NO: 30849 - protein, 160 aa, DROSOPHILA
MKGGTFRNTQWDPTLLSSQIVSMQFCVYFTLGLLVFVANKLSGDNYSLDHLFEYHEIHIYDMGGRLVICAFVLNAFLASLALWCIVRRAKLCLDFSCTFHVLHLLICWWYNRSFPANASWWLLNVITGTIMCIGGEFLCLQTEMKEIPVGYAALNQKSDV

SEQ ID NO: 30850 - DNA, 4407 bp, DROSOPHILA
cgaactcgtagccgtgtgactaataaacctcgtatattttatatgtcctggcagcaggacaatgggtggaatcacacatgagcatggcatcacattttcatcaacaggaatccggtttatcgcactttcccactcctgagcacacatctacattttattagccctgcagctatccgttcacataattcgatggcgccatttcccgtcctatttttactgtcttctggtttattgccaccacctatccaatccaatgagcaaataaggatgggtatttatcctgatttaattaaagtcacccagcaacaacacacctttgaagagtaagtgaataccaatgcccactagcaacataatattcaacaaaatattcacaacacatatttatttgattagtaccaatttttcaacaccaccacccttctaagcgcaattatatatccttttcaaggcaattagcagttgatagggaaactcaatctggcaaaactctgtgttggtcttgcactccaccctacatatatacatatttcaatattatgcgactaagctaatgcaacgactgcgattgactgagtggcttccaaatggatgatacggatcaacaggcagtatcaacacagaatcaaatcgtcaaaaaatttgattagtcgtcacttggtcctgcaaatagtgggtgtgtccttggccaccaatcgcaccctcccatgcttcagcagcagggacaccagcatccgatagctccgttgtgtgccggacttgagagtactcctgcactccaatgtgaaggacagaagagggaaaagtgctgagattgcgtagggtccgatgtccgtgcatatcgatgtgaagaagggtggagtaggtgagcagtggatggcatgtagggacttgcaagcaaataacaagatttcacgcttgattttcacatcaaaagccggataaagaaatgggaaaatctctgtgtcgtgtgcaaatgaaacgaggcagcaaacagaatggggattggacccgtgcctctgcatcggattgtttttcatagcagcaaattgaagtttacaaagtatcgcatttgatgaacatagagtgggtttagtaaattcattttttcagtctgtgcttcggtcttcctttacagctgctccatggactccaattttagtaggcgttgctcgcctaaatgctgctccagggcctccagcatggcgtccagaaagtccgatagactgatcttctggtccaactcgaacagagtgctgctggtgtactgggcatgggccaaaagcggcagcttccgcaatgtgcggccacttagcccaacgctgcgctcagccaattgcgtcagcaaaccttcctcggcgtcctccgactccagaacttcgcgctgcagaactcccgccgacattagttcagccagcatgcccttgtatatttctcggatagcggaaatgccgggataaccaatgaagagtcggatatcggcgcgatccacgaaggccagatcaatgctttgagccaggttagatgtggccaggatcagtacgttgggacaagtcttaagggaatccagctgggtgagtaccgcatttaccacacgcatggcatcccttggttcattactagacatggcactcctggcgtatgccagcgactcaacctcgtcgatcagcacgcacaccaggttgttgggatcggagactagctctgcaatcttattaaacagttgcgccactagcttgccgctctcagagaaccacttcgagaacaggctgtggctgtttatctccaccaggtgcgtgtaagcatagctgccttgggtacggatagacaacttctgggccagggccttgcaaaggctcgtctttcctgttccaggtggtccgtggagcagtatcagtcggttacaggcaatcacattcgtgtccacacggtgttcagagaacatcagtgccgaaagagcaaactttagaagctggaaaaaaatgatttcctttataaaaccataaataaaaactatgcatactccccgtctcaccttttccttgagtcctgtctcgtagatgaggttctcccacagacccacaaactgagcggctggcaggagcgcatgactggccgccacgatgctatcgatgccatccgagccttcttcgcccgaaaacagaccaagttgcccttcctctggcctagtggcatagaaatggaagcgaaatttggtctcggcgacctttagaggctgcacaccgccattgtcgcgctccaggagaacagagtgcacatgttcagtttgctcagctgtgagatccggcaggaatgacacatttctgggcaattttctagccgtctgaaaataggcctttagggctgtctccacattgttgcgaattgcattagagcgactgaaaaaatggataattaactgaaaatcccaactgaggacggatgctactcacagatcgttacctcgcaggcaaacttccacatgaactgtgtcgctgttgcttaaaaaactcattttaatgcaggagaagctttgaaaagccgcgggaacaaagaaattataaaaagcgacgccggcgtagagtgaccaaacttctcaaggaaaaaatacggcgcaaaaaaataattgcaagtagtaatattaaaattaagagtattttttatatatctaaaaaggcggtagttcaataggaaaataaaataaatatgcatttcgttccaagataatttaaaagcaaacataaccacaatcatattttctattaacaacatttattgtatttaacactagtatttaattgtggactccaggaagtacttgttgaacttgcgccagccgaagcgcttcttgggatctcttttactccactcgggcgccagatttggcatcagtcccgccttctgagccatggttaccagagtgcccatcttcttttgttgccggtggcaaagtccggtgatccttctgggcagcatacagccgtcggaacggacatactgcgacaggattagcacatccgtgtgcttgatgtccaggcccaaggtgcattccgggcaaaacttggtctggcaggcggatttaagcatcaggtgagcacgcggcgattccacattaacgccctcgaagatctttacactgttctcctgcttctcatgaactggaacaggcattgaacagaaattcgaattaattttaaagatgtgcatttatttgaggggttatgaaacacttcacagaggtctctgtaactcactctcttttatttgccttggcattgtggtggctacgccacgcacctgagcaatggtacttcgtactgtcctggtggccaattgcaacacaaaggacatgttgaaggcgttttttatttacaatttattaaaattgtgctcaagtgtaatgttgttactacaaatgtcattcaccacgaaagccgcagcgttgccacatcaattgatttaaatattacttctcaaaaaaaattatcgatgtcagtatttaaataacgatatctgtttttatttttattgcaagcacaaatttgtcattcgagaatttttcatgtaaatacgtaaaaaaaatagagaaaaatgcctgcctaacgaataaaactttgtttagtcgttacatactggaatatcccttgtattatcaaatatcagtttcgatagttcgataattcactacacgtataagaaagacgccggctggaagaaaaagtaatatgtgtaagcaaatgcaaggaaattacggccaacaaaaactaaactctgaacctttgcagccgcttcagtgagcagtaagagcaccgtggtatcctccatcatctcgggcctcctgagcattgttttgttcggcacactgcgtttctgctcagaatggtttaacgactcgcagctgagggtccttttgggcggatacctcttctcctgggtgttcatcctgagcctcacgtgcgtctccaacgcggagatggttgttttcggccaggacttccaggccaagctgctaccagagattattttctgtctctcactcacggtggccgccgcgggactcgtgcatcgtgtctgcgccaccaccagtgttctcttttccctggtggggctctacttccttaacaggatctccacgaagtattactccgttcaggtgcccagcgtggatgctcctacgacgagaaagggcggaaagaagttcaaatgaaccattcgtctgcttcttatttcattactaacacattcgaatacctaatctttaataacctttaataaataactaacttataaagtcatgtcaatcggtcactttgaagctatccaagctccattattacagttggccagccttatactactgagtattggtgctgtggaataggggatcttattgggaattcatgaatt

SEQ ID NO: 30851 - DNA, 1877 bp, DROSOPHILA
acaacattacacttgagcacaattttaataaattgtaaataaaaaacgccttcaacatgtcctttgtgttgcaattggccaccaggacagtacgaagtaccattgctcaggtgcgtggcgtagccaccacaatgccaaggcaaataaaagagattcatgagaagcaggagaacagtgtaaagatcttcgagggcgttaatgtggaatcgccgcgtgctcacctgatgcttaaatccgcctgccagaccaagttttgcccggaatgcaccttgggcctggacatcaagcacacggatgtgctaatcctgtcgcagtatgtccgttccgacggctgtatgctgcccagaaggatcaccggactttgccaccggcaacaaaagaagatgggcactctggtaaccatggctcagaaggcgggactgatgccaaatctggcgcccgagtggagtaaaagagatcccaagaagcgcttcggctggcgcaagttcaacaacaacagcgacacagttcatgtggaagtttgcctgcgaggtaacgatcttcgctctaatgcaattcgcaacaatgtggagacagccctaaaggcctattttcagacggctagaaaattgcccagaaatgtgtcattcctgccggatctcacagctgagcaaactgaacatgtgcactctgttctcctggagcgcgacaatggcggtgtgcagcctctaaaggtcgccgagaccaaatttcgcttccatttctatgccactaggccagaggaagggcaacttggtctgttttcgggcgaagaaggctcggatggcatcgatagcatcgtggcggccagtcatgcgctcctgccagccgctcagtttgtgggtctgtgggagaacctcatctacgagacaggactcaaggaaaagcttctaaagtttgctctttcggcactgatgttctctgaacaccgtgtggacacgaatgtgattgcctgtaaccgactgatactgctccacggaccacctggaacaggaaagacgagcctttgcaaggccctggcccagaagttgtctatccgtacccaaggcagctatgcttacacgcacctggtggagataaacagccacagcctgttctcgaagtggttctctgagagcggcaagctagtggcgcaactgtttaataagattgcagagctagtctccgatcccaacaacctggtgtgcgtgctgatcgacgaggttgagtcgctggcatacgccaggagtgccatgtctagtaatgaaccaagggatgccatgcgtgtggtaaatgcggtactcacccagctggattcccttaagacttgtcccaacgtactgatcctggccacatctaacctggctcaaagcattgatctggccttcgtggatcgcgccgatatccgactcttcattggttatcccggcatttccgctatccgagaaatatacaagggcatgctggctgaactaatgtcggcgggagttctgcagcgcgaagttctggagtcggaggacgccgaggaaggtttgctgacgcaattggctgagcgcagcgttgggctaagtggccgcacattgcggaagctgccgcttttggcccatgcccagtacaccagcagcactctgttcgagttggaccagaagatcagtctatcggactttctggacgccatgctggaggccctggagcagcatttaggcgagcaacgcctactaaaattggagtccatggagcagctgtaaaggaagaccgaagcacagactgaaaaaatgaatttactaaacccactctatgttcatcaaatgcgatactttgtaaacttcaatttgctgctatgaaaaacaatccgatgcagaggcacgggtccaatcccc

SEQ ID NO: 30852 - protein, 562 aa, DROSOPHILA
MSFVLQLATRTVRSTIAQVRGVATTMPRQIKEIHEKQENSVKIFEGVNVESPRAHLMLKSACQTKFCPECTLGLDIKHTDVLILSQYVRSDGCMLPRRITGLCHRQQKKMGTLVTMAQKAGLMPNLAPEWSKRDPKKRFGWRKFNNNSDTVHVEVCLRGNDLRSNAIRNNVETALKAYFQTARKLPRNVSFLPDLTAEQTEHVHSVLLERDNGGVQPLKVAETKFRFHFYATRPEEGQLGLFSGEEGSDGIDSIVAASHALLPAAQFVGLWENLIYETGLKEKLLKFALSALMFSEHRVDTNVIACNRLILLHGPPGTGKTSLCKALAQKLSIRTQGSYAYTHLVEINSHSLFSKWFSESGKLVAQLFNKIAELVSDPNNLVCVLIDEVESLAYARSAMSSNEPRDAMRVVNAVLTQLDSLKTCPNVLILATSNLAQSIDLAFVDRADIRLFIGYPGISAIREIYKGMLAELMSAGVLQREVLESEDAEEGLLTQLAERSVGLSGRTLRKLPLLAHAQYTSSTLFELDQKISLSDFLDAMLEALEQHLGEQRLLKLESMEQL

SEQ ID NO: 30853 - DNA, 2796 bp, DROSOPHILA
atgacccgtggctgtttgtctttggtgattttcatttttaaattgagttgaaaataatgaaaatgcaaattcgaccgccagctgctgctgctcttggactgttggacacgcttcttggccggcccgcagtcctgcctcctgcaattgcaggctccttggcatttatgaaatttatatgcatgtcagtgggctcccaaggatggcgaggggggtggctgctctagcccagtcaacagcatggaaaatacaaatgaagccagtgacaaatctcattaatcacagcgccagaaaaggggcgctcgcgaagggggcgtggcgctgcctgagtgggtgcagctgttggcgccttcaaatctgggattatcagcttagcagttgcagttgtttctgttgtttctgtcgtttccgcagctcctactacttgttggtgtaactcgaaggagcctcgaggagattggagatgcaaaaagtgcatataaattgaatattataaattttcttattttgcaactgctgctttcacttagctgctgctgttactgctgatgctgccaagttgtaacttcatttaagtcaatcgctcttttctgtggcacacaaattgtaaacaagggaattatgcaaatgaataaactcccgtcccatggcagcgtaatgaaatattattgaggactgtagccccaagcactgcgagtgcgcaaatcgaacggaaaatgaactttcaactgtcaaaataggtgaaatggagaagaagccaggatagcagtgccccaccgaagtgaaagagcaactttttactactcggccaagactttcgacttgccataaatttcgttttatatatttctatgaactgacaaggtatgtcatcgcaagataagcaaccccaagctgtccgaattctgccccaaataaatgacacttttttgtgcgtccggagaagaaatgaatttttaattaaaatttgcagttgtgctgtgcgaagattgaatgggaaattctatagtgccagataacctagagatgcataataaataaatgataatgataaataaataaatttagcttggaatgcattaacttatccgtgcttccaacagaaatttgtaagaactcgaattcaagaatgatttggctttaagaaaatgcaccaacatttctcacaatgaggcaatctactgctgattgcatatattatctttactatttaccttttatctaaagtcatcaacctttgaggttttaatatatacaaagaatcttgattgcattgtgcacatagcatataaaaatatagtattgtttaagtgtcagtttaactgccctaaaacgggccggaaaaaaaaaactagtttcattccatgatactttgtatttgctatatttacaatcgaatcgaatattttaagttaaaagataagattatatggaaacgtgctagtactagcaatactattcttaaaggtatacaattaatcaatgttttcatttctttgttaacataactagaaatgtaaggtaacagtaacagtcagagtaggtaattataatgagtttgaataataattaaagatgaatccctatagcagtcattaaaaggcgaacatacgaatgctgatggctcccagggtgcactcgccctcgatttcccgctcttcgtcctcgatctctctcagccgcaccagctgaaggggtacgaaatccttgaggaactccaggccggcattgatgatacccagttgaatccagactagtgacagccagaagcaggcaatgccgtcgaagggagacgtcattccgccgacgagcttgggaacccactgaggtgtatacaatcgttgtggaatcggtgggatcaggtaggtgctgagctccccacgaccccgttgaaaacgtgccgcctctaaagtgataaggggccgaaacaaaattgccgcccagctatagcaaggccattatcttttgagtcccaacattcggctagcaacatgaccattacgatttgagtcgcaacattgtgttgctgggaaatccgctcaaactgctcaaaactgctccatcgaacctctgcgacagcgttccagagttcgttcgtttcgacattgaatccttcggctcttgcattcgtgtgctttcgcaacaggatgcgcattgtgccgggacacatgtggcccagctccacacgtcgcactctctggggagatttcagtgccacacggtccgcgactaactgggttagtggtacaagttcagtttgacgcattcgccttatcgatggtttctcttccgcacgttccgctcgttgggctcattcggtcaggatgcgtgcatcccaatggtggtgcgcattatccttttgccaggctagctctggactaagtgaataaccggcgtgctctcatgcacccgctttttcgttctcaaaggaaaccgacttcatcagcaaagcgactccttatcccgctttcttgcgcttcattgcatcgtgcagccgccattttcccggcacatccttaattgaaagtacatcgtttacctacttgtaagccatcctatctgcagtttctgtggcgctgtctttgtccatatctctttgcctttcggagcctttgtttgttttcccccgacatatagccacctttatctttggcggaggagcggcaagcagctgcgaatgcatcattgggcgttgacaggggccactcccatcgcttattggcaaaagacttcctgggatccatctcagtgacgcctttgttctgttcatcctccttgccagccctcctatttttacta

SEQ ID NO: 30854 - DNA, 204 bp, DROSOPHILA
atgacgtctcccttcgacggcattgcctgcttctggctgtcactagtctggattcaactgggtatcatcaatgccggcctggagttcctcaaggatttcgtaccccttcagctggtgcggctgagagagatcgaggacgaagagcgggaaatcgagggcgagtgcaccctgggagccatcagcattcgttatctggcactatag

SEQ ID NO: 30855 - protein, 67 aa, DROSOPHILA
MTSPFDGIACFWLSLVWIQLGIINAGLEFLKDFVPLQLVRLREIEDEEREIEGECTLGAISIRYLAL

SEQ ID NO: 30856 - DNA, 3680 bp, DROSOPHILA
atttgttattgatttataatatgaatttgtttaattgttctttggttcgccacagttgcatgctaatttgcaatgtttgtcggctcttgtacaatttgcgtggcgccaggataaccatgacagtatcagtaattgacttcacctgatatgatcttcatcctgggcacggacacggacttgggatggacagataggcggacacatataaacatgataataaacgtgaccatgtttggggcgacttaaattatgcaatatgacagcgtgagatattgaaagactttttcaacctcatataatgctgttgctgtaactgttgccatttggaaatcgaccagaacgtgaccagaaattaaattgtagcacattgggagctttgtaaaaatttcaaatgaaaaataaatccccaaaaagagccaaagcacacacacatagggcagggaaaaaagcacaaaataaataagaaagtaaaccttgcacataaaaaatgtgtcgcattttaggcaagggaaattgacagggtcttcgttacgttttgaaaactgggattgctgaccaaaaaatacgttttcataaaatttcatgcacacggccttctcaaacaataactatgcaggtgctgtgggattccgtcaaaatgaaaatattatgcgagaaactcccacatcctgtcccgtcctcgtcattcatttttgcacaggacacgctccaatgcataaattgctaatattgttgagtgcgtatacacagccacacatcatgggaaaactgcattagatgccatcaaacggttttgttgtccactgccttcgcaaggagctttccccttttctcattttctcgcaacactttcctccaaacgccaaactcgacgttgtaaaaaatatccttgtaccaatagtactgaattcaatgtagaagcattgaacacacttaagcgcaaagttataataaatagaaaattgcaatatatttaaacattttcttcatatcgtatatttcgtgctatcttaggtgcagctaccttaaagtattttaaaatgagccaagctctgattcttcaattcgaaaggaaatcaagctgacttcaatatagagcataaagagcagtgaaaactcataagcgcaacttgtgtgcagtgaagtgtaaaatgtactctgcaattttcttttgtagcaacatattttctcgctctccagtggagccgtagaactgcctttttagtggcagctcgctgcgctaaaaagattactacgttttttgcctgtgtcgaagaggcgatggacatgcgtggagctcgtgcctccgcataattaagttcgcgttgagcctttgaaagcattgtacgaggcacatagatgcgggattaggaattgagggatcttccctggtcatccctattgggtatacattgtgcgcagcagggcgaagaatttgtatgatatttgaagcagctgaaagaaaaacaatcattaaattcaaactcacactgacaatacacagttgcgtacatctgtcatagtggacctggtaatatccaagaatatagtggcctttagaaaagttaccttctgcgatctagctataataataaccaaggctcgtttatagcgcacatcggctttataccacttctgattgtaggtggcaaccgaaaatccgtagctctgaaaacaacaaacgaataaaataaagaaagctccataaagttaaacttacagcatcggccaccagttgaccatagtgacaaatcaaatagacctgactcatcgaagagacaaggaagaggaagagcttcacaactatatccggcggaactccaacagtcatctggaatcccacgaagcagatgacgaacgaggataccatgaagttgagtagtagtggaattccaaatatatcgttcactgcatctgaaaggcggagtatacgttcgtgatacctaacaatgtccaccagaaatcgggagtccttcttccaatctccactcaattcgtggcgttccatactatttgagagaaagtcgaagtgcattaccaactgagtggccaccgcgcagagcaagacatcggttgaaatttgaccagctgcagatgtgtatcctgcaaaattctgggagaataacagtggatagtacgaccagttatcctgccatttccaaggaatgtacatgaggtacggcaactgtttgcccaccactcgaatgttgagccacttgtcatagacccaatactccattacacaaaacaagttgaatgtccagatgagaacagagtagagcaaggaatatataaggctgattctggagcaggtgcccagatacatcggcagattgtatctttcctctcggatcaaaccattcggatagatctccttcaattcattaatcagttcagttatagccgttttcttccaccggatgaagaacatcttgctcatgcctacggttacgaagccaatgtaggacaacgcagtgactgcttccaggaacttattatccatgaaggcactgtaaacgtaaatgctctcaaataatccaacgaagctcaggttaatcacattggaccaaaaaactatgtgaaatataagtttgttcattttggattcttcaccattggtatatggccgtatgcccactgctgtgtagaagaagctagcgtacttcattagcttctccatcctttagttggtcggaactgaggtagagaagtgtcctttctgattgagcgtccttagaatggttcagggcttttatagccttgtgcaaaatagctcttgtgtgattacaaatgcggtaaatattaaataagaaaataataactaagcacccttgaaggtaatgctaatgaacttgcgaatccttttcgcgtgctttgtagatttaacagctgcaacgattccagatggttcaagaccaaaggttttcctaatgatacttattacgattacgacgtcatcttataaatataatgctaattctttagtacataaattttcattataacttttaacatttgcaaatccaaataagtgaactaagctaagaataaatgtttactttatgtacatggtacgaagcagagcgaaaaatttgtaggatacttgaagaagctgaaaacataaatataatattagttttaaagcttaatgacatttcaaattgtatcttacgtccgtcatggtggcccttgttatattcatgaaaattgtagcttttagataagttgtcctctgaggtcgagctataaagaataccagagcccgacgatagcgaatgtcagcattttgccaattctgcttatatgcagaaatcgataagctagagctctaaaaatatgttagttgaatatttatatttaattaacatatactcgaaagtctcttaccgcatcggcaatcagctggccgtagtggcatatcaagtacacttgcgacaaggacgagaacaggaacaagaagagcttaatcatgatgtccggcgggacacccacggtcatttggaatcccacaaagcagatgacaaatgtggagaccataaagttaagcagtagcggtatcccgaatatatcgttgagaacgtccattagccgaagaatgcgctgatgatattgtacagtttttgccaaaaatctggagttttcgctccaatcgcgatctaacacttgtttttccaccactc

SEQ ID NO: 30857 - DNA, 1628 bp, DROSOPHILA
atggagaagctaatgaagtacgctagcttcttctacacagcagtgggcatacggccatataccaatggtgaagaatccaaaatgaacaaacttatatttcacatagttttttggtccaatgtgattaacctgagcttcgttggattatttgagagcatttacgtttacagtgccttcatggataataagttcctggaagcagtcactgcgttgtcctacattggcttcgtaaccgtaggcatgagcaagatgttcttcatccggtggaagaaaacggctataactgaactgattaatgaattgaaggagatctatccgaatggtttgatccgagaggaaagatacaatctgccgatgtatctgggcacctgctccagaatcagccttatatattccttgctctactctgttctcatctggacattcaacttgttttgtgtaatggagtattgggtctatgacaagtggctcaacattcgagtggtgggcaaacagttgccgtacctcatgtacattccttggaaatggcaggataactggtcgtactatccactgttattctcccagaattttgcaggatacacatctgcagctggtcaaatttcaaccgatgtcttgctctgcgcggtggccactcagttggtaatgcacttcgactttctctcaaatagtatggaacgccacgaattgagtggagattggaagaaggactcccgatttctggtggacattgttaggtatcacgaacgtatactccgcctttcagatgcagtgaacgatatatttggaattccactactactcaacttcatggtatcctcgttcgtcatctgcttcgtgggattccagatgactgttggagttccgccggatatagttgtgaagctcttcctcttccttgtctcttcgatgagtcaggtctatttgatttgtcactatggtcaactggtggccgatgctagctacggattttcggttgccacctacaatcagaagtggtataaagccgatgtgcgctataaacgagccttggttattattatagctagatcgcagaaggtaacttttctaaaggccactatattcttggatattaccaggtccactatgacagatgtacgcaactgtgtattgtcagtgtgagtttgaatttaatgattgtttttctttcagctgcttcaaatatcatacaaattcttcgccctgctgcgcacaatgtatacccaatagggatgaccagggaagatccctcaattcctaatcccgcatctatgtgcctcgtacaatgctttcaaaggctcaacgcgaacttaattatgcggaggcacgagctccacgcatgtccatcgcctcttcgacacaggcaaaaaacgtagtaatctttttagcgcagcgagctgccactaaaaaggcagttctacggctccactggagagcgagaaaatatgttgctacaaaagaaaattgcagagtacattttacacttcactgcacacaagttgcgcttatgagttttcactgctctttatgctctatattgaagtcagcttgatttcctttcgaattgaagaatcagagcttggctcattttaaaatactttaaggtagctgcacctaagatagcacga

SEQ ID NO: 30858 - protein, 380 aa, DROSOPHILA
MEKLMKYASFFYTAVGIRPYTNGEESKMNKLIFHIVFWSNVINLSFVGLFESIYVYSAFMDNKFLEAVTALSYIGFVTVGMSKMFFIRWKKTAITELINELKEIYPNGLIREERYNLPMYLGTCSRISLIYSLLYSVLIWTFNLFCVMEYWVYDKWLNIRVVGKQLPYLMYIPWKWQDNWSYYPLLFSQNFAGYTSAAGQISTDVLLCAVATQLVMHFDFLSNSMERHELSGDWKKDSRFLVDIVRYHERILRLSDAVNDIFGIPLLLNFMVSSFVICFVGFQMTVGVPPDIVVKLFLFLVSSMSQVYLICHYGQLVADASYGFSVATYNQKWYKADVRYKRALVIIIARSQKVTFLKATIFLDITRSTMTDVRNCVLSV

SEQ ID NO: 30859 - DNA, 2195 bp, DROSOPHILA
tcccatctgctgatttgtgatgggcaaataaaagaaagaaatgctcgaaatgcccgaaaaagaagccaacaaaactatcatttactttgccccattgttttgcatgtccaaaatgcttttattggtgagctaacgctgcgtatacgtaatccccatgtgaacttgcctttaattcgccatttagatgtgcaatgaatgggggtgggtgtggagggtggtgtggtggcacaaaccaattgttgatgaaaaatgatggaatgcccacttacatttaaaaccaattcgtttcagtaattgccttaagcccctttccctgattccatacgattatgggattacacttgtgagaaaacaacattcaggataatggcgaatgcatattaataacaagcagtaatatttattaaaacgatgcctgttgttgcgcttgcccgcatttaaaattcaccagcgatgctgtaaagagctgaattgttaatgaaataatgaatatatatcagtttaaaggctgaacgatttaagctgctttcacgcgagtaattatatttcaattacatgctgactacccgctgacctagatcacctctgaactcctgcggaaaatgttcaaaaagagattgaactcatcggcttacggctcattagcacgtttcttctccaaatggaggggggcttcgagaaaaactgagggattgtcagacaacttgattgaacttcaatgggctctaagatggctgctctttggagctcgagattaatgctaatgtgacaacttaatcgaaagccatttacaagtcatgtcaagtggagagcggctcatgctctgtctccatggcagtggagctcgttattatgacaggacctcgatgtggggacgttggttgtgggctgtaggctgatgtcgggcaaggggacatgagggcatgacgacgccaaatccataaaaaagcacgttaaatatttgcattaattccgggcgctggctgataagtcctggatgctaacagccaacaggaaacaggagacaaggagacagggactgctgttgacacttacccggcaaacaagatgcgactgcgatgccgataaggagcaatagttgggcaatcttggtgctgctcccgctgctgctgatgctggtgctgatgctactcctgctcctgctgctccttttgctcctgttttggctgctcattttgccagcaagtcgtttcgtccttatcactaaatgcgttactttgtcaacgacccgagttctcggggtgtttcgtgtggacgttaggtggggctgactgctgactgcttactgctgactttgacttttactgcacgactcactcgcacttgaatttcagtgttcacggctcaattttgtgtaagagctatcagttaggtgtgtttatggctaggggaaccgcaagcggcgatcttgttgtgcataaacaataaaaaatatagcagaatgtaggcccgaactgtcatgacaaaaaaaaaggtaactcgaactgcaaagtgatttgttgctcgattagagaagttctgcgatatttgatatttgatttgatgccaaagttacgctggatcaaatcgagttaattggaatcctttcggggaatattatattacgtttcgcgccgcacgtttttgttgatggtgtcttgttccttaatcagaaatttacacaatccagaatggatgaaagcacagtgaaaatttcaatcaaaactttactctttttgtctttctgtatgttggtgtgtctgtctttttggtggcttttgctcgatttttgttgtttttttttttttgctttttagcgctcgttaactccagcgtttcgttttgcgtctttgtttgttccgtttttagtcttttcgccgccttttgttttcgcaatttttttttgctcaatttttaatgcaatttccacgcttaactgcactttttgccatttcgcttgttattcctgtttcttctgatgttgctgtttctgtttttgcacagcatttatttacacgaaatacacccacaatcacacacacaggcacaagctcaagcaaacgcacacaatggcaggcgaccggaaacagacagagacaaaatatgtacacaatttgcagcgctctcgttccctccggtgcattccaaattcaaattactgttgcagctcttccagttatggttatcgttcgcct

SEQ ID NO: 30860 - DNA, 195 bp, DROSOPHILA
atgagcagccaaaacaggagcaaaaggagcagcaggagcaggagtagcatcagcaccagcatcagcagcagcgggagcagcaccaagattgcccaactattgctccttatcggcatcgcagtcgcatcttgtttgccgggtaagtgtcaacagcagtccctgtctccttgtctcctgtttcctgttggctgttag

SEQ ID NO: 30861 - protein, 64 aa, DROSOPHILA
MSSQNRSKRSSRSRSSISTSISSSGSSTKIAQLLLLIGIAVASCLPGKCQQQSLSPCLLFPVGC

SEQ ID NO: 30862 - DNA, 7822 bp, DROSOPHILA
catacagccgtcggaacggacatactgcgacaggattagcacatccgtgtgcttgatgtccaggcccaaggtgcattccgggcaaaacttggtctggcaggcggatttaagcatcaggtgagcacgcggcgattccacattaacgccctcgaagatctttacactgttctcctgcttctcatgaactggaacaggcattgaacagaaattcgaattaattttaaagatgtgcatttatttgaggggttatgaaacacttcacagaggtctctgtaactcactctcttttatttgccttggcattgtggtggctacgccacgcacctgagcaatggtacttcgtactgtcctggtggccaattgcaacacaaaggacatgttgaaggcgttttttatttacaatttattaaaattgtgctcaagtgtaatgttgttactacaaatgtcattcaccacgaaagccgcagcgttgccacatcaattgatttaaatattacttctcaaaaaaaattatcgatgtcagtatttaaataacgatatctgtttttatttttattgcaagcacaaatttgtcattcgagaatttttcatgtaaatacgtaaaaaaaatagagaaaaatgcctgcctaacgaataaaactttgtttagtcgttacatactggaatatcccttgtattatcaaatatcagtttcgatagttcgataattcactacacgtataagaaagacgccggctggaagaaaaagtaatatgtgtaagcaaatgcaaggaaattacggccaacaaaaactaaactctgaacctttgcagccgcttcagtgagcagtaagagcaccgtggtatcctccatcatctcgggcctcctgagcattgttttgttcggcacactgcgtttctgctcagaatggtttaacgactcgcagctgagggtccttttgggcggatacctcttctcctgggtgttcatcctgagcctcacgtgcgtctccaacgcggagatggttgttttcggccaggacttccaggccaagctgctaccagagattattttctgtctctcactcacggtggccgccgcgggactcgtgcatcgtgtctgcgccaccaccagtgttctcttttccctggtggggctctacttccttaacaggatctccacgaagtattactccgttcaggtgcccagcgtggatgctcctacgacgagaaagggcggaaagaagttcaaatgaaccattcgtctgcttcttatttcattactaacacattcgaatacctaatctttaataacctttaataaataactaacttataaagtcatgtcaatcggtcactttgaagctatccaagctccattattacagttggccagccttatactactgagtattggtgctgtggaataggggatcttattgggaattcatgaattcagttaaaaaactccaatctctggttatatggatatcgtaatccttttccaacagaatcaaaacctcgaacgcaaagtcgttttcacagcgtctctattgcatgccttctcgcagaaaatgtatagctccactttttggttgcttttcaaagctgcttccagttgttataaagtgaattcgaacaaatagatcaatctgaaaagtcggtttagtttgctttaaacattttggatttgttttgtcaacaaaaattgccggcaaagtgtgaccagcttgcgttttacgcgtttagtatattttagtaatgaaatactgcatataatggttgcctgctggtcaacgctttcgagtatattttcaataaaaacttttgaaataaactcagctgtatttaacaataactgtttaaaaacgattgcatcatgcatttgtaattatacagggtgatgtcttattattatcaaagaaacttttagatatttatagctcttttctgatagtctattcgagcgctctggcaacaccccacctaggcgcgcctacagacgttactggcaacgccaaatgaatagcgtcgcgtcttttttgtagtttaaaattttgtggagttttagcgaaataagttaagtttattgttgtcgtgtatgtaacttcgtgaagaatccttttttcaagtttcaattgcaaatatgtaagttgccaccgcgagcatgccataggcaagagaacatacaaactccgagctcacccgtctgtttttcaggtcgaagccccagaacaacgacactctggagctggacgacatcctaagccagccagtgaaggacaaggagcgcttcgccgcctttatgatgcgcaagcttgccgaaaataagccggcacagaatgacaatctctttggaaacttcaaacttgactttgaccttgatttcgaggttccactgatcaagaagtctcaggctaagcccaagtccaaactaccagaagtacagccccttggggagttggtcagcaaaaacagtgccgccaccgagaaagtcaatgagccgcctgtggaccaggcccccaatgagaacgtgcctccgcgtcgatcgccaacattgtcgcccaataaccgacgttccatgcgccgcagtggaaatgtacccggatctgataaactacgtcgacatgccatccgccggcggtccaggagctgtggacgccaattgcttccagagtttgaggagaccgtaaacttgacccgcagcatatcaagtcctgtaaacttcgtatgttaaatacatgtcccacaaatacctaatccttgtactaacaacaatgctcttttagttaccagaaataagcagcacaccttgcacagagaaacaaaaagaggaagttgccaaaaatacaacaagagtggaaactgataaaccagcggaaaaacctatggaactatcacaagaaccagagccggaaaatccgctgcagacaaaggtgacctcacctgccaggaaccctattcttgcagctgaaattgaacaaatctgcaaagagcgacagagttcctttcacaagaatgtactgcagctggactattctggacgggcaccgtactcgcgaccccctactccgtcatcaccatccgttgcgggcctacgacgtacctacacaatggaaaagggcccagctccaggccagctgctgctatcgccatcacatcgctatgacacaccgagcaaaatgccagtagttaaggcaaagcggttcaatcaggagttaatggtcccggacacgccagagcgacaaagtcacgacccagcctggcaatcagagccccaaccggagttcgtagtgccggaaacccagccgcaggatctgggagagttggtgcagactctgtcgcgcagcgcgatcagcccaattgtggtgataaacacatccaattcgaatcgtagtgtaagaagggacgctgtcgcaatgaaatctgttccgacttcgccagttacggcgttatcttcaccaccgattgcgccttctcctaggcgatccgccgctgcctctccccagaaatccattgcacaactgccgcgggtggaagaaaatatggatgccataatgaccgacgacgaaagcgacgaacatcccagcactgtgccattaaatctagctccttcaggtgggaacacaacccggcaacggcgtttgcgcagtagtaatcgggctcgagctacaatcgaatctcaggagagctctatgcgcttgcttaaccttcacaagtcggtcaatgccaaaaagtcaaagccgcgaaagactgctataccgctgaataaggctccaagtgcccccattaatggcgagcagtttgcccgcgagctaacccggatgagcaactacgagattttggatttgcgcaagcgcaactcgttgaacgagatatatcctttaaatgggcacagaaaccatcgttcagagaagcttatcctagaagaagagattcagagggagctgctacgtagaaatctaatggatgaggccgaaggtttgccaaaacaacagtcctcggatgattcgaatgaagactatataccggttccgccaaaaacacaaagtcttcgaactaaaagcaatgatcgatcgcagggacgagggcgaccacgatctactcgtcgtgatcttccaatggtaagttcaagatcgcttatatgttgcgaaggaaaaaaaaaaccttttttccccgttttgcagacaacagaattggtaaactatttgggtctctcccagactttagagactcgacgcaaatcttcaaaggacggcaagcgttgtctgtacacaaagggtagctcggaccatgaagataacgattcattatcacctgtaaaattgccaagactaagcaagagcatccaaattgttccgccacctccagtttcactgcgctattcgcaatctttgcaaaatctgccctgctccggaaaatttgatttcgataatgtcgtgatggcagccccaccagatttccatgatagtgtaaatagtgatgcaattgagattgctcccccgcctccagagtacgttgtaaatacacggggcagaagcacaagtgggcgaaagagcaataaaaatgacctggttttacctccaccggggtacgaagggggccaggaagaagaacatgatgagcgaccaagccagccgcgttgcacagccaaagaacttcaacaatccactcagaatggacgaagggcgatggagaacgaactggtaccacctcctatcgaatatgttgaagaagagaatcgcaacaatgagcaatcaaggagatcgacgaaaaatggcaatcttgttgatcgaaatacacataacgcagtagaatattgtgaaccgccagagccaccagagtacgacgatagtgaccatgggcaagcaagtatactgaggagaagtggaaaaaaattgcagcactccaaacagagtgtacaaaagtccaataaggaacaaattattgcaccttcgtacgaaaataacgaagactatgacagtgacgaggaaccaatttacaatgaagaatacggaaaagaggaatctcaaaataaaaatgtcactagaagaaagagcgataaggatgaaatggcatcacatacattagaatgtattgaaggtccagatccaaattggaattcgtcctgtaacaaacagaatcgtaatcaccagaacgcatcaaaaagcaaagaaaatgataagttagccaatcgttcatctaagtcccagaaactctcaaatccccgccagaatgcagttggtacagaaaaatccgtagctctaagcaatcgaggggaagaatgtaccgagaaatcatcagacgttatggaatcacttcgcgttaacacacccactcctccgattgatcaaaactcagatgatgttcccagcagaaatccatctcccagtaggactcttttgtctgacgacgtacccagcacgagtagagcggcgttggagtttttgcagcgtagtcagaacatgtcaaagagtcgtcccccggatgaatcaagcgcggatgtggtgttcaagaaaccattggcacctgcaccaagggcgaaatcaaaaaaagggaagtctgaagtagacaaattaaagctggccaaaatgccggtggaagctgaggaactaaatactagtgagtatattcaataataaatgttttgataaaattaaatgtatgctctattattttctgctcccttagccggtattcggagatcaaagcgcggtcaagttccacttcagatgagttggtgtcacaccatggatcctagcaagtttaactttatgagtggcttcatagagcctcgcagcaaaaactcaaagacgaaaaagggaaatttgagtaaggcgaagaaagccagtgccacaaagccaaagcctactgtagagaagaacttacccgacaaccggggaccattgtgcagcagtaccccaagaatttctgaaaagctgccaggggccataccgcattccgaatcccttggcctgagtaccttgacgtgggaagaaactgaagtgcaagcagaggctgagaaggtgcccaagaaaaggggacgaccaaagaaggcagttggaggtgtccaaactgatacggaggctgagccagaaccagagccagagcctatgatatcttcggttgctccacttacaagcgatcaggaagagcctgacgttcctgacgagcaggcgccttatacggaagctgcgctaggtcccgtcgtattttcaactcccctgagagacgagcaggaagaagcctccactaaactgatgcagtggctgcgtggcgtcggcgatgcaccacccagtgcaagtatgtcggatgaaaacgccagtgtctgtaagtgtaaaatctatagaaattgaatccatatagcttatttattaataattgctatttttcattgccagcttctgcaaacgaattgattttctgtcaggtagatggtatcgactacgctttctacaatacaaaggagaaagcaatgctgggttatatgcgattcaagccataccaaaaacgtagcatgaaacaagcgaaagtccatccacttgtaagtaaaatataagattattcccattcaactcgcagatcattttaaaacctattctgcttttagaaactccttgtgcaatttggcgaatttaatgtggagaccttagccgtgggcgaagagaaggaagtccattctgttctgcgtgttggtgacatgatcgagatagataggggtaagatattgctgaataatatttattatatattatttgaatgtttcttttcttccttaggcactaggtatagtattcaaaatgcgatagataaagtcagtgtgctgatgtgtatacgcagttagtaattgctttgtaatttatatacggataagtattgagccgatttatatttcttacgttttcgccacagaaaataaaaataataaagagttgttttgttaaaatatgtaagaccgacatagttttttcatgtattttaagtagcaaaggtgatagacccacgccataacttcgggtcatatcctagctgcttagaatttcaagttcattttatttccattttctttgaaattcacaagtcgctcgccgtgatgttgatggcattggagacttcaaaagcgaaatggcaaacaggggtaacaacgccagaaagaacaaataagcaggcaactttcaaaacaatctgcacgtctgctttgtatggcaatttttaaaaaagcacacacacgaatcacacgcagcaggaacacaaacataaatttgtaaaaaaaaaaaaaacaaaacaaaaattgaatcaacagaaacttttccggcaggtgtgccagtgcctgcatccccacacgggacttggaacatcgtttaaaattaacaaaacaccatctaacattcattacagcagtgtcaaccctttgatcatcccacacgccgcactctattacgagtttcccggaaaataccttgcaaataaaaggaattaatagaacgattttatatatagataatcttatatatattctttagttcacttgattggtttaaaatatgttaatgggaagctaaaaaactaaatattttatattcacatgcttgcacatgttctcggttcacatattttcgccgagtgtgcacagacaattgaatcggaatttttcaggtctcgcttaggcagctggactccacgcccaccgccatgtgcagctcatgcatggcaatcagcgggaaacctgtagtgtttctttgaagtcttgcaatccaatggagaatggctgacgaactagagagaagacgtcttacaatgtggacagatattggtgcctggttagctggatgtccaaccagttg

SEQ ID NO: 30863 - DNA, 4422 bp, DROSOPHILA
atggttgttttcggccaggacttccaggccaagctgctaccagagattattttctgtctctcactcacggtggccgccgcgggactcgtgcatcgtgtctgcgccaccaccagtgttctcttttccctggtggggctctacttccttaacaggatctccacgaagtattactccgttcaggtgcccagcgtggatgctcctacgacgagaaagggcggaaagaagtcgaagccccagaacaacgacactctggagctggacgacatcctaagccagccagtgaaggacaaggagcgcttcgccgcctttatgatgcgcaagcttgccgaaaataagccggcacagaatgacaatctctttggaaacttcaaacttgactttgaccttgatttcgaggttccactgatcaagaagtctcaggctaagcccaagtccaaactaccagaagtacagccccttggggagttggtcagcaaaaacagtgccgccaccgagaaagtcaatgagccgcctgtggaccaggcccccaatgagaacgtgcctccgcgtcgatcgccaacattgtcgcccaataaccgacgttccatgcgccgcagtggaaatgtacccggatctgataaactacgtcgacatgccatccgccggcggtccaggagctgtggacgccaattgcttccagagtttgaggagaccgtaaacttgacccgcagcatatcaagtcctgtaaacttcttaccagaaataagcagcacaccttgcacagagaaacaaaaagaggaagttgccaaaaatacaacaagagtggaaactgataaaccagcggaaaaacctatggaactatcacaagaaccagagccggaaaatccgctgcagacaaaggtgacctcacctgccaggaaccctattcttgcagctgaaattgaacaaatctgcaaagagcgacagagttcctttcacaagaatgtactgcagctggactattctggacgggcaccgtactcgcgaccccctactccgtcatcaccatccgttgcgggcctacgacgtacctacacaatggaaaagggcccagctccaggccagctgctgctatcgccatcacatcgctatgacacaccgagcaaaatgccagtagttaaggcaaagcggttcaatcaggagttaatggtcccggacacgccagagcgacaaagtcacgacccagcctggcaatcagagccccaaccggagttcgtagtgccggaaacccagccgcaggatctgggagagttggtgcagactctgtcgcgcagcgcgatcagcccaattgtggtgataaacacatccaattcgaatcgtagtgtaagaagggacgctgtcgcaatgaaatctgttccgacttcgccagttacggcgttatcttcaccaccgattgcgccttctcctaggcgatccgccgctgcctctccccagaaatccattgcacaactgccgcgggtggaagaaaatatggatgccataatgaccgacgacgaaagcgacgaacatcccagcactgtgccattaaatctagctccttcaggtgggaacacaacccggcaacggcgtttgcgcagtagtaatcgggctcgagctacaatcgaatctcaggagagctctatgcgcttgcttaaccttcacaagtcggtcaatgccaaaaagtcaaagccgcgaaagactgctataccgctgaataaggctccaagtgcccccattaatggcgagcagtttgcccgcgagctaacccggatgagcaactacgagattttggatttgcgcaagcgcaactcgttgaacgagatatatcctttaaatgggcacagaaaccatcgttcagagaagcttatcctagaagaagagattcagagggagctgctacgtagaaatctaatggatgaggccgaaggtttgccaaaacaacagtcctcggatgattcgaatgaagactatataccggttccgccaaaaacacaaagtcttcgaactaaaagcaatgatcgatcgcagggacgagggcgaccacgatctactcgtcgtgatcttccaatgactttagagactcgacgcaaatcttcaaaggacggcaagcgttgtctgtacacaaagggtagctcggaccatgaagataacgattcattatcacctgtaaaattgccaagactaagcaagagcatccaaattgttccgccacctccagtttcactgcgctattcgcaatctttgcaaaatctgccctgctccggaaaatttgatttcgataatgtcgtgatggcagccccaccagatttccatgatagtgtaaatagtgatgcaattgagattgctcccccgcctccagagtacgttgtaaatacacggggcagaagcacaagtgggcgaaagagcaataaaaatgacctggttttacctccaccggggtacgaagggggccaggaagaagaacatgatgagcgaccaagccagccgcgttgcacagccaaagaacttcaacaatccactcagaatggacgaagggcgatggagaacgaactggtaccacctcctatcgaatatgttgaagaagagaatcgcaacaatgagcaatcaaggagatcgacgaaaaatggcaatcttgttgatcgaaatacacataacgcagtagaatattgtgaaccgccagagccaccagagtacgacgatagtgaccatgggcaagcaagtatactgaggagaagtggaaaaaaattgcagcactccaaacagagtgtacaaaagtccaataaggaacaaattattgcaccttcgtacgaaaataacgaagactatgacagtgacgaggaaccaatttacaatgaagaatacggaaaagaggaatctcaaaataaaaatgtcactagaagaaagagcgataaggatgaaatggcatcacatacattagaatgtattgaaggtccagatccaaattggaattcgtcctgtaacaaacagaatcgtaatcaccagaacgcatcaaaaagcaaagaaaatgataagttagccaatcgttcatctaagtcccagaaactctcaaatccccgccagaatgcagttggtacagaaaaatccgtagctctaagcaatcgaggggaagaatgtaccgagaaatcatcagacgttatggaatcacttcgcgttaacacacccactcctccgattgatcaaaactcagatgatgttcccagcagaaatccatctcccagtaggactcttttgtctgacgacgtacccagcacgagtagagcggcgttggagtttttgcagcgtagtcagaacatgtcaaagagtcgtcccccggatgaatcaagcgcggatgtggtgttcaagaaaccattggcacctgcaccaagggcgaaatcaaaaaaagggaagtctgaagtagacaaattaaagctggccaaaatgccggtggaagctgaggaactaaatactaccggtattcggagatcaaagcgcggtcaagttccacttcagatgagttggtgtcacaccatggatcctagcaagtttaactttatgagtggcttcatagagcctcgcagcaaaaactcaaagacgaaaaagggaaatttgagtaaggcgaagaaagccagtgccacaaagccaaagcctactgtagagaagaacttacccgacaaccggggaccattgtgcagcagtaccccaagaatttctgaaaagctgccaggggccataccgcattccgaatcccttggcctgagtaccttgacgtgggaagaaactgaagtgcaagcagaggctgagaaggtgcccaagaaaaggggacgaccaaagaaggcagttggaggtgtccaaactgatacggaggctgagccagaaccagagccagagcctatgatatcttcggttgctccacttacaagcgatcaggaagagcctgacgttcctgacgagcaggcgccttatacggaagctgcgctaggtcccgtcgtattttcaactcccctgagagacgagcaggaagaagcctccactaaactgatgcagtggctgcgtggcgtcggcgatgcaccacccagtgcaagtatgtcggatgaaaacgccagtgtctcttctgcaaacgaattgattttctgtcaggtagatggtatcgactacgctttctacaatacaaaggagaaagcaatgctgggttatatgcgattcaagccataccaaaaacgtagcatgaaacaagcgaaagtccatccacttaaactccttgtgcaatttggcgaatttaatgtggagaccttagccgtgggcgaagagaaggaagtccattctgttctgcgtgttggtgacatgatcgagatagataggggcactaggtatagtattcaaaatgcgatagataaagtcagtgtgctgatgtgtatacgcagttag

SEQ ID NO: 30864 - protein, 1473 aa, DROSOPHILA
MVVFGQDFQAKLLPEIIFCLSLTVAAAGLVHRVCATTSVLFSLVGLYFLNRISTKYYSVQVPSVDAPTTRKGGKKSKPQNNDTLELDDILSQPVKDKERFAAFMMRKLAENKPAQNDNLFGNFKLDFDLDFEVPLIKKSQAKPKSKLPEVQPLGELVSKNSAATEKVNEPPVDQAPNENVPPRRSPTLSPNNRRSMRRSGNVPGSDKLRRHAIRRRSRSCGRQLLPEFEETVNLTRSISSPVNFLPEISSTPCTEKQKEEVAKNTTRVETDKPAEKPMELSQEPEPENPLQTKVTSPARNPILAAEIEQICKERQSSFHKNVLQLDYSGRAPYSRPPTPSSPSVAGLRRTYTMEKGPAPGQLLLSPSHRYDTPSKMPVVKAKRFNQELMVPDTPERQSHDPAWQSEPQPEFVVPETQPQDLGELVQTLSRSAISPIVVINTSNSNRSVRRDAVAMKSVPTSPVTALSSPPIAPSPRRSAAASPQKSIAQLPRVEENMDAIMTDDESDEHPSTVPLNLAPSGGNTTRQRRLRSSNRARATIESQESSMRLLNLHKSVNAKKSKPRKTAIPLNKAPSAPINGEQFARELTRMSNYEILDLRKRNSLNEIYPLNGHRNHRSEKLILEEEIQRELLRRNLMDEAEGLPKQQSSDDSNEDYIPVPPKTQSLRTKSNDRSQGRGRPRSTRRDLPMTLETRRKSSKDGKRCLYTKGSSDHEDNDSLSPVKLPRLSKSIQIVPPPPVSLRYSQSLQNLPCSGKFDFDNVVMAAPPDFHDSVNSDAIEIAPPPPEYVVNTRGRSTSGRKSNKNDLVLPPPGYEGGQEEEHDERPSQPRCTAKELQQSTQNGRRAMENELVPPPIEYVEEENRNNEQSRRSTKNGNLVDRNTHNAVEYCEPPEPPEYDDSDHGQASILRRSGKKLQHSKQSVQKSNKEQIIAPSYENNEDYDSDEEPIYNEEYGKEESQNKNVTRRKSDKDEMASHTLECIEGPDPNWNSSCNKQNRNHQNASKSKENDKLANRSSKSQKLSNPRQNAVGTEKSVALSNRGEECTEKSSDVMESLRVNTPTPPIDQNSDDVPSRNPSPSRTLLSDDVPSTSRAALEFLQRSQNMSKSRPPDESSADVVFKKPLAPAPRAKSKKGKSEVDKLKLAKMPVEAEELNTTGIRRSKRGQVPLQMSWCHTMDPSKFNFMSGFIEPRSKNSKTKKGNLSKAKKASATKPKPTVEKNLPDNRGPLCSSTPRISEKLPGAIPHSESLGLSTLTWEETEVQAEAEKVPKKRGRPKKAVGGVQTDTEAEPEPEPEPMISSVAPLTSDQEEPDVPDEQAPYTEAALGPVVFSTPLRDEQEEASTKLMQWLRGVGDAPPSASMSDENASVSSANELIFCQVDGIDYAFYNTKEKAMLGYMRFKPYQKRSMKQAKVHPLKLLVQFGEFNVETLAVGEEKEVHSVLRVGDMIEIDRGTRYSIQNAIDKVSVLMCIRS

SEQ ID NO: 30865 - DNA, 3361 bp, DROSOPHILA
gcaaatgaggtcagctagtcagattcagattctgaatctgattctggaacaggatgaggagatggatagtctgctctgaatcgaatttaattgcaacattccaaggactttttgcattagaagcaaacgagcgaataaacatccagtgaaaagaatgccagcatattttgcattactcgaaggcagcaaaacagttgatccagacataaaccgggtgtcatctggccagaaggaatggcacatccctttggccaactgaatgtgtgtaaacaggaaataggcaaaaagcaaggactcgtgtcactgacacacaccatcatccaggcaagtgtgtcaaggagcaaaaacaaggacgaaacaaatgcaatgcagccgctaagacaacacataaatggttttccaaatactttgagatatcccaaagaaaaacacaacatgaacaataaatgtttaaaagcacaaaatattctctgcatataggagaaaaataaacgaaatgaatgccgttgagatctagattacgcatgaagtacgaactgtgctaacgatgggttaaaatggttttcccattttattaaacaatgggatatatttatagatttaacagatgtacacttgtatattgcaacgtctcataattgaaccaattttgcttgaaaataaaatccctaatgattaggcatttgtccattcgattgttcactcgtggtcgaactaatcgctgacatttgtgagcaactggaagccacttaatcgtagaagtcatcgatttcgagttaggcccagttaaccacgcccccggacgaccaactgacgggttcacaacgccctaattgagagatgctcaccgtgtacatgctaatcaagtgggcgtgccaattgtccagtgtgtgtggcaatagtaaattattaaatcatcgacatccccccgttctggtcttcacattaatttgggtatatataaagcgagccaacgattcggaaaattaacaattacaacatgttgactaagaaggatactcaaagtgccaaggagcaggaaaagttgaaggccattccattgcacagctttctgaaatatgccaacgtgttctatttatcgattggaatgatggcctacgatcacaagtacagtcaaaagtggaaggaggtcctgctgcactggacattcattgcccagatggtcaatctgaatacagtgctcatctcggaactgatttacgtattcctggcgatcggcaaaggtagcaattttctggaggccaccatgaatctgtctttcattggatttgtcatcgttggtgacttcaaaatctggaacatttcgcggcagagaaagagactcacccaagtggtcagccgattggaagaactgcatccgcaaggcttggctcaacaagaaccctataatatagggcatcatctgagcggctatagccgatatagcaaattttacttcggcatgcacatggtgctgatatggacgtacaacctgtattgggccgtttactatctggtctgtgatttctggctgggaatgcgtcaatttgagaggatgctgccctactactgctgggttccctgggattggagtaccggatatagctactatttcatgtatatctcacagaatatcggcggtcaggcttgtctgtccggtcagctagcagctgacatgttaatgtgcgccctggtcactttggtggtgatgcacttcatccggctttccgctcacatcgagagtcatgttgcgggcattggctcattccagcacgatttggagttcctccaagcgacggtggcgtatcaccagagcttgatccacctctgccaggatatcaatgagatattcggtgtttcactgttgtccaactttgtatcctcgtcgtttatcatctgcttcgtgggtttccagatgaccatcggcagcaagatcgacaacctggtaatgcttgtgcttttcctgttttgtgccatggttcaggtcttcatgattgccacccatgctcagaggctcgttgatgcggtaaattcttcttctattctatattttttatattttatcttaaattatatatattaatcagagtgaacagattggtcaagcggtctataatcacgactggttccgtgctgatctgcggtatcgtaaaatgctgatcctgattattaagagggcccaacagccgagtcgactcaaggccacaatgttcctgaacatctcactggtcaccgtgtcggatgtgagtaagaaaagtacgtttttaatccatcatttaatttcgattaatccatttctggcagctcttgcaactctcgtacaaattctttgcccttctgcgcacaatgtacgtgaattagttggcttttgtgattatggccacaatttaacgaccaacatcatgtggcagtgacattgtgtggacaaaaggagcaaatcatcgccagccaataacttacgccatttgccgtacagggctgtggtttttaattaaagtagtagctcaaatgattaccgcgattcgcgcaggtcatggaacaaatcgaagagcggtcaactaaccgcagtagaaatgattaattatcgccatttcgtttgcacaaaggaccagtgccagatgccagacaaatcactgctgcttttacaattagcgacttccccgaaacccttgcgattcacctgaatttcgcaccttcgaaccaatttaactagagatcgcccgaatacgtattaactaaattgctagatatttcgggaaacacagatcggcggctcaataaagtcctagattgataccagcaacatcggtctagaaaagataacttcaaacttaaaaaacaatttgactgctaaccaattatctttttttttcattccatttagaatccatactttttttcaaatcattcgtataatccccatttagacacgctgcgtgaccttatgcagcacttaaaagtaatttcgaaatatctttccgcccagcgaagtggctggcaaattgcattttttttatgaatatttaattgaaaagttgacacaaacagacaacagtcggcggatggatttgcgggcggaggggtttgggccaggctaattacatttctacggctgtcggccgatagaagaaagcaggcagcagtgggccaacaccaggggaacaacctgccagtcagatggatggcaaaattgaagaattttttcaattaaaattacaaaaaaaaaatataaaaaaaaaaagatgaagaaaagaaaaaagtggtctcacgaccaaatggaaatcaaattgggaactgtctgggcaggatgggttctaaacagcaagcaattgggcttaaaattataagtccgttatataaa

SEQ ID NO: 30866 - DNA, 1239 bp, DROSOPHILA
atgttgactaagaaggatactcaaagtgccaaggagcaggaaaagttgaaggccattccattgcacagctttctgaaatatgccaacgtgttctatttatcgattggaatgatggcctacgatcacaagtacagtcaaaagtggaaggaggtcctgctgcactggacattcattgcccagatggtcaatctgaatacagtgctcatctcggaactgatttacgtattcctggcgatcggcaaaggtagcaattttctggaggccaccatgaatctgtctttcattggatttgtcatcgttggtgacttcaaaatctggaacatttcgcggcagagaaagagactcacccaagtggtcagccgattggaagaactgcatccgcaaggcttggctcaacaagaaccctataatatagggcatcatctgagcggctatagccgatatagcaaattttacttcggcatgcacatggtgctgatatggacgtacaacctgtattgggccgtttactatctggtctgtgatttctggctgggaatgcgtcaatttgagaggatgctgccctactactgctgggttccctgggattggagtaccggatatagctactatttcatgtatatctcacagaatatcggcggtcaggcttgtctgtccggtcagctagcagctgacatgttaatgtgcgccctggtcactttggtggtgatgcacttcatccggctttccgctcacatcgagagtcatgttgcgggcattggctcattccagcacgatttggagttcctccaagcgacggtggcgtatcaccagagcttgatccacctctgccaggatatcaatgagatattcggtgtttcactgttgtccaactttgtatcctcgtcgtttatcatctgcttcgtgggtttccagatgaccatcggcagcaagatcgacaacctggtaatgcttgtgcttttcctgttttgtgccatggttcaggtcttcatgattgccacccatgctcagaggctcgttgatgcgagtgaacagattggtcaagcggtctataatcacgactggttccgtgctgatctgcggtatcgtaaaatgctgatcctgattattaagagggcccaacagccgagtcgactcaaggccacaatgttcctgaacatctcactggtcaccgtgtcggatctcttgcaactctcgtacaaattctttgcccttctgcgcacaatgtacgtgaattag

SEQ ID NO: 30867 - protein, 412 aa, DROSOPHILA
MLTKKDTQSAKEQEKLKAIPLHSFLKYANVFYLSIGMMAYDHKYSQKWKEVLLHWTFIAQMVNLNTVLISELIYVFLAIGKGSNFLEATMNLSFIGFVIVGDFKIWNISRQRKRLTQVVSRLEELHPQGLAQQEPYNIGHHLSGYSRYSKFYFGMHMVLIWTYNLYWAVYYLVCDFWLGMRQFERMLPYYCWVPWDWSTGYSYYFMYISQNIGGQACLSGQLAADMLMCALVTLVVMHFIRLSAHIESHVAGIGSFQHDLEFLQATVAYHQSLIHLCQDINEIFGVSLLSNFVSSSFIICFVGFQMTIGSKIDNLVMLVLFLFCAMVQVFMIATHAQRLVDASEQIGQAVYNHDWFRADLRYRKMLILIIKRAQQPSRLKATMFLNISLVTVSDLLQLSYKFFALLRTMYVN

SEQ ID NO: 30868 - DNA, 6023 bp, DROSOPHILA
cagactgagcaagtttaatctgagcgcctttgatgtattcgggctgagcagtcaacaacaggcgctggacaccatcaaggcactgaacatagtagaaaagtcatcgttgccggcctactcctttgcctcctgagccagcagtagtcaattttgatttagtcagtcgcctccaccagaggaccctatatatctcctagtatccgcgttcagctgcaaactgtatatacatacgtcaagagtctcccgcgctcaaagagcgcacaacgattattaaaataagctagtatgggtgaagtgtaaaatttgttgacctttttttatttcgcggcattaataaatcgtataaaaaatatatatttatattttcttctttttaaatccgaaccacctttttgattagaaagctctaattattcggagtaaactctacaacaaattattcaataaagctctctaaaatggcaaactttttatgagagccttaagtaagagaaacctcggcgtgttttgatgaatcagcgtaaacaaaacagagggagacgatctaccacaaattctgtctggcacggcatgggtgcgataagcataagtttaactaacaccctaagataaagtagttcccgcatatcgacgaacttggcgcccacctgttgattagcaagcacttgagatggaggtgcgtaagccactaaatcgcccagaatatcagtcagttgtacctaatacttgatccggtccaaacgtgcggcgaaaattgaagttattggattaccagtagcagtcgattctaggaaggttacgccgaaaatgaacagaacgcggttcaactgatagtggattacctttagattaatagttggcatatttcaaataatactagtgcatatgcatgcaaattatctgagccaattcaagggttgtgattaaccttatcagtcgtctgcattcgataagcgaagccagaagttccccagtcatttccgtgtgttcaaattggataatggcggcacagagtaaactagccgaggccgcatacaaatgcagctgccaggagttcgtgcatccttggacctccagctgcgcctgtgcgacggctgggatgctattatccctaatccctggcacatttaagacctatagtatggtctacatggtgagttaatcaaaggtttcagttaatctataagtcctatgagtgtatataactgatattgaataactttcagttggcacttttaatgcgcaggcgcattccatcgctcaaggaccttggcaggactttagccagtacattgcagtcgacggctttcctttcgctaaatggaagcctctttgtcctcgccatttgcctggtgcgccagtttctcggtggtttctacttcgctaccgccgcatggttgccagcacttttggtgagctccatatcgctagcagtcgagcgtccgcagcgccgtgctccactggcattgtatgtggccaatgtgggcatcgaaacgctatggaaaatgttagaggcccgaggactggtgcgatccattgccaaaggacaggtgctcatcatgggtgccagtatcaccgctttgatgtatctatatcgtgccggattgcataggactgttgccaaagatgcgacttttaagggattgggtctgatcataggcagggaggaggagggtcccctaaagccctctacggtgatcatcccccagagatctaacctaggaagcctaaattttcgatgtatcacgtcgtaccttaaggtctataatcacctgactaccctcagacacccttgctgtcctcaccagtttggctgtgcggtatacgccctccttggtggagttaaaccatttctgggcggtgtgggtgttcaagtgggtttcaagctcctgctcaacattacgaggatactccagcaaaagatggagtggcgcaagcagatcttcaacaagggctccctgcagttgggcctagcgctcggcatattttcactgctttttaaggtgagtcaaaattattcaaaattaattcaaactaattgaaaaactatcttttagatgtcttcatgtggcttgcgtcactcttttggatatgataacgctctctttgccattcaatctggattaataggatcatttggccttctacactttcccaataccacggtgtctctgtatctgatgttgaagtccttgcaactcttgtacaactggggtgtcgccgaggaaaaggtacccgaggtgccacatttctccatgattatgtatggatttttcaccgccgtactctgtcactcaacggttctggaggcaaaatccatgcggcccagttactttaagtttatcgaaaacatttctggaggtcgtctaagccggttcaatatgaaatccttcgaggcttttggagttaaaagtcaggatcaagctaattatattatcaaaaaacttggcattgtcaagtcctcatcgaaccctctatttccactgattgtttagaaggtcaatatatattatataaagatttaataatttgtattataattttcaagttttctaatgctatgtaaatatatgaactttcctatccatgtaattaaattcgtatacgtaatttattatagacctttaaataccttttttggggtttgctgcaactgggaatgacccctcaagagaaatatctaagagaattcgtagagcatgccgggtgcttttggaaattgataaggaatacccagctggaggtgacgcagcgacaacaaaccgatcgccattgagcaagtaagccaactttcggctcgcgtgtacgcgataagtaggtgccctctgcatccgacgcacttcagccgaaccacttgcgggaatttgggggagtgctgatacgacggcataggaatggagctctttaagtgcgtctacacacggaccgtacttggccaaatcggcagtcagttgtatttgatggccgaccaggccataacgtggtttcctagtaggagaaaatattattaaataaccaacgtgccataacaactaaataaacaaccaatgctagttccttgctgaagcttgtcgtattttttagttgacatatatgcagctgagaccaagtggataacaagctgcagctgattcgaggaatgcccagcgtcatttactgcgaatcgagcaatttggatcatcgaatttttaactgcattcattagattttcaagctgaaattacactggattaatcgtaagtccgggaaatcgagttgaactaggccattgtggacattgcgtgccacgttcgaacttttggcgataagccccttctcgataagctttatcatccccacgaagccaattcgttaatcgtcgacggcggagcataagtcaatattcaaagtggatcatgggcgcccaaagtaaactggccgagatagccttgaactgcacctgctatgagtatcaccatccgtggacaaagagctgtgcctgcgctgcggcaggaatgatgatctctgagatccctcccagtctgcgcacctacgccactgtatacgtggtgagttgaatgggggaacatgggctacaaatttagaccttatttaagtgcgttatatatggcagttcaactgatacgaacctagaagtgcaaaggttatattatatataatccattcaagatttagtcaaattatacttaactttagtaaatcttattgtaattatctattccctgtacgccacagtttgctctaatcatgcgaggacgcattccatcgctgaaggatctgagacgcactgcatctggaatcctacagtcgacagcgtttctttcgatgaatggaggcctctttgtctttgccgtgtgctacttgcgacagatcttgggaggattctacttcggcacagttgcttggctgccctcgtttttggccagctttgcatgtcttgccttcgagcgtccggaacgccgtgctcctctcgcattgtatgtggccaatgtgggtatcgaaacgctgtggaagatgatggaggcacgaggctgggttcgatccattcctaatggacaggtgttcatcatgggtgcaagtgtgaccgccttgatgtatttatatcgcgccggattgcacaagacagtggccaaggatccgacgttcaaggctattgccctgatcgtgggcaaagaggacgagggtccactgaagacaccggtggtcaccaccacgcaaagctctcgccaggctcccctcaacttccaaagcatttcagcctacgtacagctctatgaccgcatgctgaaggccaaacatccaagttgtccccacaagaggggctgtgttccctacgcccttattggaggactaaagccattcctgggcggtgttggcctatcggtgggtctaaagctgctgctcaacattcccaagatctttaagtctaagatgcagtggcgcaagcacatcttcaacgggggatccttgcagttgggattggcgctgggcatcttctcatttcttttcaaggtgagcaataccagcccttaattagatactgagttaaaccaatatatcttatcacttccttttcaactttcagtcgactacctgcggactgcgtcacacgtttggtttcgacaatgctctcttcgccattccggctggcctcatcggatcgattggcttcttccgtttcccgaacaccacggtggcctgttatctaatgtggaagtccatgcatctgctctacaactggggcatcgcggagggcaagttgcccgaggtgccgcactttgcgatgctcatgtacggattcttcacggccgtgctcttccactcggcaatcctggaggctcgttccctgcggcccagctactacaagttcctcatgggcatctccggaaatcgcatcagtcgctttaatgtgaagcccttcgaggcttacggactgaagagccaggaccagatcaactatgtgatcaagaaactgggcatcgacatgacctcacccttccccctttacgccctgactgtctagatgggtttcccccataacttcgcatacctactgtacagtaaaaaaaaaaaacagaaacaataaatgtgtaacacaacgatgcagcaaaactttaaattaaatgcgcgacgcagaatggccattaaggacttttaagtgaggagccgcagagtgggccaacatcaatcacggagacaacaagccgctggcacccttaaagccccccttaaagccccctcgaaaaaaacccgtctccgtccccgagccactgcctcaccgctgtgacaactctagacggcggctccgcgccgctcaattatttacatttatatgtcatataaatttattgcccaccataactcagccggcccaaaagcgaactgggatgagcggagagttgagctgagacagaccaactcgagatacccgaaatgcagctacaaaatcactaaaaataaaaataataataaagcacggagccaaatgagtaaaagtgcacaacttgtttcaagaactacgaaactggggataccctgaagtcgttgcaactcaatggggaaaagttttatttcggttgatgtctgtgggattggtaactggctttatacagaaatcggaatttatacaaatataacacattaaattgtttgttatggaatgaaaattctaaaaaagatgtgttttcatataagtccaatactcccatctgaagggtacagtcttaaccacgccctccgtgcgcagtatccttttcgggataataccagagtaccccaaaaaccgggctataataagctctactcgtccttggccccgcctctaatgatcatcttggccagcaatggaagcggaacccgaactggcggaacagtggaagcgaggccgacttaacaaatgaattataggctcgggtaaatttaatgtgccacttagttatcggtgcggtatggggcgcatgaggggaggtccctggcctttattgttatgcgaatcataataaggcacgccagctaagcgactt

SEQ ID NO: 30869 - DNA, 2667 bp, DROSOPHILA
atggcggcacagagtaaactagccgaggccgcatacaaatgcagctgccaggagttcgtgcatccttggacctccagctgcgcctgtgcgacggctgggatgctattatccctaatccctggcacatttaagacctatagtatggtctacatgttggcacttttaatgcgcaggcgcattccatcgctcaaggaccttggcaggactttagccagtacattgcagtcgacggctttcctttcgctaaatggaagcctctttgtcctcgccatttgcctggtgcgccagtttctcggtggtttctacttcgctaccgccgcatggttgccagcacttttggtgagctccatatcgctagcagtcgagcgtccgcagcgccgtgctccactggcattgtatgtggccaatgtgggcatcgaaacgctatggaaaatgttagaggcccgaggactggtgcgatccattgccaaaggacaggtgctcatcatgggtgccagtatcaccgctttgatgtatctatatcgtgccggattgcataggactgttgccaaagatgcgacttttaagggattgggtctgatcataggcagggaggaggagggtcccctaaagccctctacggtgatcatcccccagagatctaacctaggaagcctaaattttcgatgtatcacgtcgtaccttaaggtctataatcacctgactaccctcagacacccttgctgtcctcaccagtttggctgtgcggtatacgccctccttggtggagttaaaccatttctgggcggtgtgggtgttcaagtgggtttcaagctcctgctcaacattacgaggatactccagcaaaagatggagtggcgcaagcagatcttcaacaagggctccctgcagttgggcctagcgctcggcatattttcactgctttttaagatgtcttcatgtggcttgcgtcactcttttggatatgataacgctctctttgccattcaatctggattaataggatcatttggccttctacactttcccaataccacggtgtctctgtatctgatgttgaagtccttgcaactcttgtacaactggggtgtcgccgaggaaaaggtacccgaggtgccacatttctccatgattatgtatggatttttcaccgccgtactctgtcactcaacggttctggaggcaaaatccatgcggcccagttactttaagtttatcgaaaacatttctggaggtcgtctaagccgccaattcgttaatcgtcgacggcggagcataagtcaatattcaaagtggatcatgggcgcccaaagtaaactggccgagatagccttgaactgcacctgctatgagtatcaccatccgtggacaaagagctgtgcctgcgctgcggcaggaatgatgatctctgagatccctcccagtctgcgcacctacgccactgtatacgtgtttgctctaatcatgcgaggacgcattccatcgctgaaggatctgagacgcactgcatctggaatcctacagtcgacagcgtttctttcgatgaatggaggcctctttgtctttgccgtgtgctacttgcgacagatcttgggaggattctacttcggcacagttgcttggctgccctcgtttttggccagctttgcatgtcttgccttcgagcgtccggaacgccgtgctcctctcgcattgtatgtggccaatgtgggtatcgaaacgctgtggaagatgatggaggcacgaggctgggttcgatccattcctaatggacaggtgttcatcatgggtgcaagtgtgaccgccttgatgtatttatatcgcgccggattgcacaagacagtggccaaggatccgacgttcaaggctattgccctgatcgtgggcaaagaggacgagggtccactgaagacaccggtggtcaccaccacgcaaagctctcgccaggctcccctcaacttccaaagcatttcagcctacgtacagctctatgaccgcatgctgaaggccaaacatccaagttgtccccacaagaggggctgtgttccctacgcccttattggaggactaaagccattcctgggcggtgttggcctatcggtgggtctaaagctgctgctcaacattcccaagatctttaagtctaagatgcagtggcgcaagcacatcttcaacgggggatccttgcagttgggattggcgctgggcatcttctcatttcttttcaagtcgactacctgcggactgcgtcacacgtttggtttcgacaatgctctcttcgccattccggctggcctcatcggatcgattggcttcttccgtttcccgaacaccacggtggcctgttatctaatgtggaagtccatgcatctgctctacaactggggcatcgcggagggcaagttgcccgaggtgccgcactttgcgatgctcatgtacggattcttcacggccgtgctcttccactcggcaatcctggaggctcgttccctgcggcccagctactacaagttcctcatgggcatctccggaaatcgcatcagtcgctttaatgtgaagcccttcgaggcttacggactgaagagccaggaccagatcaactatgtgatcaagaaactgggcatcgacatgacctcacccttccccctttacgccctgactgtctag

SEQ ID NO: 30870 - protein, 888 aa, DROSOPHILA
MAAQSKLAEAAYKCSCQEFVHPWTSSCACATAGMLLSLIPGTFKTYSMVYMLALLMRRRIPSLKDLGRTLASTLQSTAFLSLNGSLFVLAICLVRQFLGGFYFATAAWLPALLVSSISLAVERPQRRAPLALYVANVGIETLWKMLEARGLVRSIAKGQVLIMGASITALMYLYRAGLHRTVAKDATFKGLGLIIGREEEGPLKPSTVIIPQRSNLGSLNFRCITSYLKVYNHLTTLRHPCCPHQFGCAVYALLGGVKPFLGGVGVQVGFKLLLNITRILQQKMEWRKQIFNKGSLQLGLALGIFSLLFKMSSCGLRHSFGYDNALFAIQSGLIGSFGLLHFPNTTVSLYLMLKSLQLLYNWGVAEEKVPEVPHFSMIMYGFFTAVLCHSTVLEAKSMRPSYFKFIENISGGRLSRQFVNRRRRSISQYSKWIMGAQSKLAEIALNCTCYEYHHPWTKSCACAAAGMMISEIPPSLRTYATVYVFALIMRGRIPSLKDLRRTASGILQSTAFLSMNGGLFVFAVCYLRQILGGFYFGTVAWLPSFLASFACLAFERPERRAPLALYVANVGIETLWKMMEARGWVRSIPNGQVFIMGASVTALMYLYRAGLHKTVAKDPTFKAIALIVGKEDEGPLKTPVVTTTQSSRQAPLNFQSISAYVQLYDRMLKAKHPSCPHKRGCVPYALIGGLKPFLGGVGLSVGLKLLLNIPKIFKSKMQWRKHIFNGGSLQLGLALGIFSFLFKSTTCGLRHTFGFDNALFAIPAGLIGSIGFFRFPNTTVACYLMWKSMHLLYNWGIAEGKLPEVPHFAMLMYGFFTAVLFHSAILEARSLRPSYYKFLMGISGNRISRFNVKPFEAYGLKSQDQINYVIKKLGIDMTSPFPLYALTV

SEQ ID NO: 30871 - DNA, 5492 bp, DROSOPHILA
atctgtcaaatgaggagtaaaaatggaataaacttacaataaacatttgttggtgtgcaaacaaaaaattgaggagaatttcgttttatgtctaacagtatgtctctttaattaaatatttattgatattatcaatttttattaagatattctttcagtgcatgcgtaaatgaatataggcaggagctggagcaaaaggacgctggaattgaaagtggaacaagtgctcagccagagacatgcacagatacactttatgaactacaaccgaaatccaattgattgtgcaggcaaagagtctctgcctgagtctaccattttggcaggccaagtgctttggtagtcgggatggagtctgagttgattgtggcacgaattgtggcctcagaggccacaggattcacaaatgaaaattcgagcaacgcgtgggcggcaggccgcaaaggaaaatggaaaacaggatgagcaagagcggaatctacagcttagcacgataattttcagccaatttaattccactcgaggtgaaatatattgtttaattaggaacgaagaatactgttcctattcgactcaataaacaaacgaaattgaaatgtgcaacaaataagttaagcttcaatcccattaatctttttcccatatatatatatacagctttattacgaaatgatgggttttaatacacatatttaaaaatgagataacaattttaagttttacaagccattttgccattttcagatatataccaaaaaaaaaaaaaaaatttccaaaatgtgtatagagaaatatatttcttatgaaacagaactaattttttattcatacctaacatattgtaaacactgaccaatgatttatccaacaagttgctcacaaatttagcattcaaaactcgcgcgcaaaagcaacaattaaaagctgaatgctacatcactggaaccatgggtctccgcctgtctatcgataacgcgataggcagaggcgcagtcgatagccatcagttcgccttattattgtttacaaagcgcaattcccgtcaaaataaagctgataaattagtgattaaagtcgcgcgtatactaaaaaaaatgcagtttgtggcctgctaaagggcgcagcatttgctgctcgacggcagcggactcagaaagcatttatcactccgcccaaccacttgttgttgttggactctgcccgccccatacaacgccatccattatccattaaaatacccccgcccgatttcgcgtccgtcggtgagggggacgaggtccagaatcggggtaatcagtgcgttacactcacatctcaatccggtactccagtcggcgtcactttgttgtcacatattgtcaaattctcaactcgaagagctagaaaagttgcaactctataaatctcagactgaacaaacatcaaacagcgtattaagtaaccaatattggaaatcaaggtgcgattagagagtgattgccgccgtcaagtgtccagtagtttcagcgtaagtgcccctcttcacttccacaatgcagattagctgtctttttgttgtttttttttttcagtactgtatttaactcgtgtctctctgttagattgcgcaaagatctcgaagttgaccccgcgtttagtgccttggcttcatccatatagtttctcatgcaaatcgcgggcaagaaaagtcggttgctaagttcgagagatagcatctcgtggcaggtggttcgatttgaagggccttttaaaacatagctttctttatggctgtaatcttaagtgctttaagttgacgataatcttaacaataaatacaactacaaaaaaaaagtacctcgtgagttaaaaattcagctaatcttatcgcagcataataacattaatgattccttgattcgttttactcgtgcaaatatatctcaaaataaacttccatatttttcactcatttacttctcgacaaatattaacaaacctacgtatttcgtgaaacctttgttcctgcctttggcgaatcccccgcaacggctaatctgtcgcatatcttatcgattgacagcagtaaattgccacagatacccgacgaacagctctaatcctccaatacaacccatcgttcctgggtttgcctctaggaataagtcagttctggcctggccagcagttgtcgcagttctcccccgggaatacaaaataaattgaccaaaccgaatcaaaattcggatctattttcaagttcagtggaacaaccgatagcgtcgagagaagaacaataacagcttgtacgttcgtagctcaaagataagattaaaggttaaaaaacggacttggacccggccacctcatttgcggtgactaaccattacatatacatattctaaccaaagttgtcaaagttaatttaagtttttattaaattttggtaaatgggtaacaactatagtttcgttactacaatcttactaaggtatggtagcttcttatcattcacagtgcgtgcttatcaaaatcgaatgacaatggtatcatatctactataattaacgtattaaagtggcaaagttttaatttataaatgtttaccgagtttgagagagataatcgagcctggcaggttcttttataactcactaatcctttcgtatagcagtccataggtggacttttgcatctaatgatattatctttatataaattgaaagcacaatttgtttgcagatctacattccaaaatggcgggacaaagcaagctgatcgatccactgtgcatcacttgcaaggagttccagcacccatggacggaccactgcgtgagcgccaccgccggtatactactctcggccacgccctactgcctgcgggtctacacaatagtgtacgccctgtccttgctgatgcgccaccgcattccaagtcgcgacgatctgcgcaagacgctgctagggatcatccaatcgacggcttttctagttactaatgcctacacctttatcctgtacaactgtgcgctgcggcacatgctcgggaggtacaacttctacacagtggcctttgtgccctgctttttggcctcgttttcggccattttggttgagagaccagcccgccgaccactactcactctctacgtggccaatgtggccactgaagcgctgtggaaaatggcagaatcgaggggatgggtgcgctccgttcctaatggacagacactcatctttggcgtgagcatggcggcgctgctctacatctatcgtactggcaccaccaaggattccatcttcaacatccttcgcattttcgtgggcaaggaggaggcggggccgattgtcaagtccgggcccgcagtgcccggtgagcagcctgcgccagaccgccgacgtcccaccgtcagtttttcgactgtatccgactgggtgcgcgtgtacagcaatctcattcgcgcaaaacacgaaagctgtcggcatcaacagagctgcattggatactccctgatgggtggaattaaaccctttgtgggtggagtgggtcttcaggttgcccttaagctggtcatgaacgtcaaacgaattacggctggaaaaatgccgtggaagaagatgatcttcaaccgtggtactctacaactgggcatcttcatgggcagcttttcatttctctataaggtaagcgttttgacattggctaccagcagttagtcatttcttcgtccttgacagtcggtgtcctgcctgctgcggcacagttttaaccgggacgatgccagatttgcaattccagcgtcgttaattgcctctatatccttcacccagtatccggataacacggtagccctgtatgttatgtggaaggcgctacaggtaagcttgttaatatatctgcattatttaccttaataaataactccttatctttagattctttgcacaaagggccaagaacatggtattgtgccacacatccccaactttatgcttttcttgtactcctttttcacggctgtgcttttccatgcgggaatattggaacccaagagcctgcgccccagctactacaagtttctgcaggccatttcgggcgatcggtgagcaaagttcacacgtgctgcgtaagcagtagattaagaattccttatcattcgcagactgagcaagtttaatctgagcgcctttgatgtattcgggctgagcagtcaacaacaggcgctggacaccatcaaggcactgaacatagtagaaaagtcatcgttgccggcctactcctttgcctcctgagccagcagtagtcaattttgatttagtcagtcgcctccaccagaggaccctatatatctcctagtatccgcgttcagctgcaaactgtatatacatacgtcaagagtctcccgcgctcaaagagcgcacaacgattattaaaataagctagtatgggtgaagtgtaaaatttgttgacctttttttatttcgcggcattaataaatcgtataaaaaatatatatttatattttcttctttttaaatccgaaccacctttttgattagaaagctctaattattcggagtaaactctacaacaaattattcaataaagctctctaaaatggcaaactttttatgagagccttaagtaagagaaacctcggcgtgttttgatgaatcagcgtaaacaaaacagagggagacgatctaccacaaattctgtctggcacggcatgggtgcgataagcataagtttaactaacaccctaagataaagtagttcccgcatatcgacgaacttggcgcccacctgttgattagcaagcacttgagatggaggtgcgtaagccactaaatcgcccagaatatcagtcagttgtacctaatacttgatccggtccaaacgtgcggcgaaaattgaagttattggattaccagtagcagtcgattctaggaaggttacgccgaaaatgaacagaacgcggttcaactgatagtggattacctttagattaatagttggcatatttcaaataatactagtgcatatgcatgcaaattatctgagccaattcaagggttgtgattaaccttatcagtcgtctgcattcgataagcgaagccagaagttccccagtcatttccgtgtgttcaaattggataatggcggcacagagtaaactagccgaggccgcatacaaatgcagctgccaggagttcgtgcatccttggacctccagctgcgcctgtgcgacggctgggatgctattatccctaatccctggcacatttaagacctatagtatggtctacatggtgagttaatcaaaggtttcagttaatctataagtcctatgagtgtatataactgatattgaataactttcagttggcacttttaatgcgcaggcgcattccatcgctcaaggaccttggcaggactttagccagtacattgcagtcgacggctttcctttcgctaaatggaagcctctttgtcctcgccatttgcct

SEQ ID NO: 30872 - DNA, 2107 bp, DROSOPHILA
ccatcagttcgccttattattgtttacaaagcgcaattcccgtcaaaataaagctgataaattagtgattaaagtcgcgcgtatactaaaaaaaatgcagtttgtggcctgctaaagggcgcagcatttgctgctcgacggcagcggactcagaaagcatttatcactccgcccaaccacttgttgttgttggactctgcccgccccatacaacgccatccattatccattaaaatacccccgcccgatttcgcgtccgtcggtgagggggacgaggtccagaatcggggtaatcagtgcgttacactcacatctcaatccggtactccagtcggcgtcactttgttgtcacatattgtcaaattctcaactcgaagagctagaaaagttgcaactctataaatctcagactgaacaaacatcaaacagcgtattaagtaaccaatattggaaatcaaggtgcgattagagagtgattgccgccgtcaagtgtccagtagtttcagcatctacattccaaaatggcgggacaaagcaagctgatcgatccactgtgcatcacttgcaaggagttccagcacccatggacggaccactgcgtgagcgccaccgccggtatactactctcggccacgccctactgcctgcgggtctacacaatagtgtacgccctgtccttgctgatgcgccaccgcattccaagtcgcgacgatctgcgcaagacgctgctagggatcatccaatcgacggcttttctagttactaatgcctacacctttatcctgtacaactgtgcgctgcggcacatgctcgggaggtacaacttctacacagtggcctttgtgccctgctttttggcctcgttttcggccattttggttgagagaccagcccgccgaccactactcactctctacgtggccaatgtggccactgaagcgctgtggaaaatggcagaatcgaggggatgggtgcgctccgttcctaatggacagacactcatctttggcgtgagcatggcggcgctgctctacatctatcgtactggcaccaccaaggattccatcttcaacatccttcgcattttcgtgggcaaggaggaggcggggccgattgtcaagtccgggcccgcagtgcccggtgagcagcctgcgccagaccgccgacgtcccaccgtcagtttttcgactgtatccgactgggtgcgcgtgtacagcaatctcattcgcgcaaaacacgaaagctgtcggcatcaacagagctgcattggatactccctgatgggtggaattaaaccctttgtgggtggagtgggtcttcaggttgcccttaagctggtcatgaacgtcaaacgaattacggctggaaaaatgccgtggaagaagatgatcttcaaccgtggtactctacaactgggcatcttcatgggcagcttttcatttctctataagtcggtgtcctgcctgctgcggcacagttttaaccgggacgatgccagatttgcaattccagcgtcgttaattgcctctatatccttcacccagtatccggataacacggtagccctgtatgttatgtggaaggcgctacagattctttgcacaaagggccaagaacatggtattgtgccacacatccccaactttatgcttttcttgtactcctttttcacggctgtgcttttccatgcgggaatattggaacccaagagcctgcgccccagctactacaagtttctgcaggccatttcgggcgatcgactgagcaagtttaatctgagcgcctttgatgtattcgggctgagcagtcaacaacaggcgctggacaccatcaaggcactgaacatagtagaaaagtcatcgttgccggcctactcctttgcctcctgagccagcagtagtcaattttgatttagtcagtcgcctccaccagaggaccctatatatctcctagtatccgcgttcagctgcaaactgtatatacatacgtcaagagtctcccgcgctcaaagagcgcacaacgattattaaaataagctagtatgggtgaagtgtaaaatttgttgacctttttttatttcgcggcattaataaatcgtataaaaaat

SEQ ID NO: 30873 - protein, 455 aa, DROSOPHILA
MAGQSKLIDPLCITCKEFQHPWTDHCVSATAGILLSATPYCLRVYTIVYALSLLMRHRIPSRDDLRKTLLGIIQSTAFLVTNAYTFILYNCALRHMLGRYNFYTVAFVPCFLASFSAILVERPARRPLLTLYVANVATEALWKMAESRGWVRSVPNGQTLIFGVSMAALLYIYRTGTTKDSIFNILRIFVGKEEAGPIVKSGPAVPGEQPAPDRRRPTVSFSTVSDWVRVYSNLIRAKHESCRHQQSCIGYSLMGGIKPFVGGVGLQVALKLVMNVKRITAGKMPWKKMIFNRGTLQLGIFMGSFSFLYKSVSCLLRHSFNRDDARFAIPASLIASISFTQYPDNTVALYVMWKALQILCTKGQEHGIVPHIPNFMLFLYSFFTAVLFHAGILEPKSLRPSYYKFLQAISGDRLSKFNLSAFDVFGLSSQQQALDTIKALNIVEKSSLPAYSFAS

SEQ ID NO: 30874 - DNA, 2441 bp, DROSOPHILA
ggggcatccagttggcatccctgccagcttcttctcggctggaaatgcaaatcagttcagaacgggatccactccctgccagagaaacaaacatggaacagagatggatttgtcaggagagcgaggccaaaggagagagccgtaattcgttaattgttttaagaaaacaggctgagactgcacgtctcgaaggacataaatcccgtttaacctgacgctgcaaagccagacacattggcacgccgaggacgcaaggggcagggcggcagtgggttggggccaaggacttgctggcacagtcatccagctaacacataaattctgctcctttattccagttgcataacatgtcctgcgacaccgacaaaaaaacacagtgaaaccacccgaagacagaccgacagacgtgttatatataacggcaacttttgctgctgacttggctgggccaatgttgctttaacaagtgatcgaatagggattactcaacattagttatcacgtagattccttagaaacttttttcccttgcatattaacagttgaaagtgttatactcttttaaaatcagtttatgttaatcctggcattatctcgcaaccaaataatccttagattggacatacccgtttgcattgcaagtaatgtgcatgtgttaaaaaaaagtgtcaaaaaactaacaactttaaatagtgaaagacaagcttttggggcaaggggggctggcagcagcagacgaagttatgcaaagtcagcagaggacattgacatgcgagcatgtgtgtgtgtatgtgtgtgtgactatgagtgcgattcaatttgcagttgtgacagtgcagccaagagcagaataacccacaccgaggacttcacagtcaaattgccatatttcatctatgacttttacgactttttcctttatttttcaacacattctagcacgttccagtggaagttctcacaggatacgtatgaactttcgccgatttcaggttgatgcctaggcaagattggtttcaatatccccgacgcactgggtgaagtattccctggccaatcggcactcgtcgctgtccacgtaaaattcgctgggacacttttgcatggcatggatgcggacgcatatggtgatttgtaaggcaaagggattgcagggttcctcgatgaattcaatatctggcaggtggagagtgaatcgtcttccgtgcgacgatcggaatagctcgcatttccgatacgcatccaccaggaatggtatcgattcattctgtggctggggtgcaatcgtctgcagattggtgcgaatgttggccagatccaagcgaaagggtggatcgatttcgatgtagccacagcctatgaagttgcactcctcaatgcactgtgtttgtaggatcaaatgaatatagtttgtattggctacaccacccgagctcaccatattaatcgtatatagttcggcaaagttgaatttccggtgcgcaggcaagttgaggcttttcctacattcggaattgcctttatctaaactgggacgtgttagctggcagcatttaatggataggtcctggtaggatatataaaactagagtcgtgtgtttttgattttgttttttacatactgcggctctttttctttccaatttgcaattaatttcgcagttgaacaggtaaaaatacctgagcagtagctaaaccaaactaatcaacaaatttgcgaattataacaatgatctaacttacgaacatggaaaataccaccgacccaggggacatttcagaactgactgatgcataaaactaatttatttccaaatcagacaaaacattttacaattaaaacatgcttaattgaccatgatgaaattaattatttatattaatcaccgtttttgacaccatcaatacctgcgctgataaagtgctcacaccaatgcgacctcatataactttcatatgtatcctgacaaaagtgcaatccaatacgtccgagccgcagggcttcttgattaattggtttggcacgccatcagattgcgtatacgtcacgttgccagcctcaaggtcgaacgacttggcccgctgtgagttaataaattgtttggcgttgttaaataaattttgattgccccgacggcgaaggacagaggcgttgccgcaccaacaccactcatttcttgatttattgatatgctaattgagtatttgcacgttgctcgccttttggtccttttttaatggctcaaagagtgcgtcggcgtgtgggtttcggtggccattggaagttatgagccatggcacgccatttgcatggcggcgtgttgttcaaattaattgtaaatggttgtaatttgctgttgccgccgctgccatcgctcgccagcggaccgttcgcttttacagtttaattgcagcttaaagaagcgaaaggggcggggcca

SEQ ID NO: 30875 - DNA, 441 bp, DROSOPHILA
atggtgagctcgggtggtgtagccaatacaaactatattcatttgatcctacaaacacagtgcattgaggagtgcaacttcataggctgtggctacatcgaaatcgatccaccctttcgcttggatctggccaacattcgcaccaatctgcagacgattgcaccccagccacagaatgaatcgataccattcctggtggatgcgtatcggaaatgcgagctattccgatcgtcgcacggaagacgattcactctccacctgccagatattgaattcatcgaggaaccctgcaatccctttgccttacaaatcaccatatgcgtccgcatccatgccatgcaaaagtgtcccagcgaattttacgtggacagcgacgagtgccgattggccagggaatacttcacccagtgcgtcggggatattgaaaccaatcttgcctag

SEQ ID NO: 30876 - protein, 146 aa, DROSOPHILA
MVSSGGVANTNYIHLILQTQCIEECNFIGCGYIEIDPPFRLDLANIRTNLQTIAPQPQNESIPFLVDAYRKCELFRSSHGRRFTLHLPDIEFIEEPCNPFALQITICVRIHAMQKCPSEFYVDSDECRLAREYFTQCVGDIETNLA

SEQ ID NO: 30877 - DNA, 3471 bp, DROSOPHILA
cgatccgaaccgtttcgttccgttccgcgctccagcttgaccggtgggcgtgcgcctgaacctaggggtttatcagccaagatgcacatttgcagcagcagcagcagcagcagaaatagcagcagcagccgccgcggagaaggttccacgcgtagtccagccggcttatcgctgcagtgggaacccactgggggcgctgatatgactatggtagtcccgcagaaggctaattactttgttgccgccaacgatagacttccaaagtccatgtaccgccagccgggccagccagtcatccaagccagggacatgcaaccgaggcatggaagccacaactactcgcactcacattccgacccgataattacagatggctgctcgaattcggccgactcggatctattatttatagggcgcttatcgccagacagcttttgatatggccaaaaaggaaaagttattaggcaactggggaaaccaaaagcagaaaaaaaaaaacgggggaaaaaaacattccagacattcgtgggagcccacagaccccggagcgcagaccttccggctgaagctctatttttatacccgttcaatgggtgctgctattttttttttggagcgatatgctcttgtcgctgttaccaccactgatacgcctgacaatatctcgtctagactgggcattattatgagaggcgaaatttgtttttttcgtacattagtgtttttcattttgttgctgctccctccctcccattgggttgtttagcggaaaagtttcaatggcacctccaggcggtgtgatccaacacaaccatagcacaacgctgctgggggctgttccattaaaaatatgactggcattcttggcgggggtaattcagacgtcttatcaaccgatttatatttacgattggcgggcaggaagtatagccaactttcagtctgagaatgccgatagataaagggcattatgaaggtgtcgcgttggtccttcaactatctatacctgagtatcaaactgttcaagttgcagactttctgtgacatagaaccattctgaaatagtgaatagtgacttggatattttggatatcgcaatcattataattgggaactcatgcaggaagtgacatcaactttttgctcgtgggtaattagtaaagttgagagttcctatagtcagtcatcaccaatatcattttttcaaaagctaaacgaactgtaacaagagatataatattttcaaccagtattattcacacaaatttagaagcttgttaatcacattgtgaattgtaaacccgctagttaatacatacatttgatagtggtatcctactaacttttcgaatagttcaaattaacaacataaaaacaaatctaatgatattatttgtcagaggtattcagtgatcaaactgaaatggtacccatttggaaaacttccgaatgattattacatattaacttctccctaaacctaaacattcattcgaaagggaaaccgaaacggaggcctgatgaacaaaccggcgcaatgcgaacacacacatatgtatattcgaatttaatacgatggcggggaaatcacctatcaagcgatcatcactgcagccaaactgaccttcaaatcattgggtggtgaagcagcagcatgaatagcatgcgggtggcacgcgatcactcacacagcgggtgacttcttcttacattgagcactgctatcgcgacacaattgataaagcccacatgcgtctgtaaacttacttagggcaataaatttattgtacaaaattcgtatcaccgatacacgtttaaagttcgtgctcactcggccgccgcatgacgtctgagcggagatcgggaatcggagatcccagatagttagctgatggagtgcgtagagtacgtgaagctgcgtccgtggggtagccgccggtccccgaaatagacgttgacccccacgcggcgccgtgtcatcggtagcgcaggcgggccctgtgtgcacgtgaaccagaaataagtcagcgattgaggattaaatttatgccacactaagttgttgtacccactcaagcgaagtgctccagatggtcttgcatgtaggtgactagcgtcttctcgaacagagggcccattaatcgatccagtttgagattaaggctcacgtagaactggcggcagtagcgtttactcaatttggcggccagaacagatgagtcggtctgcccgtgtccgcccaggattgtggaggatagggactggctgctggcgggattgcgagagggcatggccaccgctagctcctcgaaaacctccaatcccttggggtttatgatcagcatggtgctgccttgcattttcagggcgcgcacggtgaattgcgagggacccgccgccaagtggacgcaatgtgaggtgaaaccaccagactccttcgcaggcacaacattcgcaggaacgctatccattagtcgtgaattttatacataaacaagcaatattcacaaggaaaacaatgaaatagcaagtttgaccggagcggtgttgccagataacgaaacgaccatagatagcttttcaaaataatcgaaaattgtatcgataggcagctattacagagcttaggcgcggattttaaatttgcattactccctcaaaagccaatgaaagtcagtttgatttcgccgttcgcagtgttggttgcatttattaaggctctatttaatgtgggcgagttttttaatgtttacgttggttgagttaaatacatatatacgatattttgttcacaattacattcagattttgttttgctctcttcggcgcgcgtcgattggtttttccttttctataatgttaatgttgtcgctttgatttgacctacttatttaaatacacaaaagggaaatcgtcgagagtaccaaaaaaaggcaattgaaatcaacgttattcgatttaaagatcagttccggttgttatgttaaaaaaaaaagatgaaattcactaattattcgttatgcttgaaatgtcaatgagaattatgatgtatggataaatatcggttatatttgacgtctattgcgctttatttattgataattgattgttaatgttctttgaatttgttggatatcaaataattttgattaattttttttgttttgtttttcttttttactataatttgactaagttttgcaaccgcgatttcaaacttccaccctgatggtattttgtttcttatttttcgtgttttgttagttttgttgtttttcatcatgtaatcattatcgatttgtgaataaatattggaagtgataaacatatagcgctgttattatgcgggactgcgttgctttctaatcctcatcgtcctcagattcggcctcctgcagccaagtcaaccaggcgttcacttggaacaaagcggatcctttgcctggatatttgtcggaaatctcctccttc

SEQ ID NO: 30878 - DNA, 609 bp, DROSOPHILA
atggatagcgttcctgcgaatgttgtgcctgcgaaggagtctggtggtttcacctcacattgcgtccacttggcggcgggtccctcgcaattcaccgtgcgcgccctgaaaatgcaaggcagcaccatgctgatcataaaccccaagggattggaggttttcgaggagctagcggtggccatgccctctcgcaatcccgccagcagccagtccctatcctccacaatcctgggcggacacgggcagaccgactcatctgttctggccgccaaattgaacgctagtcacctacatgcaagaccatctggagcacttcgcttgaggcccgcctgcgctaccgatgacacggcgccgcgtgggggtcaacgtctatttcggggaccggcggctaccccacggacgcagcttcacgtactctacgcactccatcagctaactatctgggatctccgattcccgatctccgctcagacgtcatgcggcggccgagtgagcacgaactttaaacgtgtatcggtgatacgaattttgtacaataaatttattgccctaaaatggttctatgtcacagaaagtctgcaacttgaacagtttgatactcaggtatag

SEQ ID NO: 30879 - protein, 202 aa, DROSOPHILA
MDSVPANVVPAKESGGFTSHCVHLAAGPSQFTVRALKMQGSTMLIINPKGLEVFEELAVAMPSRNPASSQSLSSTILGGHGQTDSSVLAAKLNASHLHARPSGALRLRPACATDDTAPRGGQRLFRGPAATPRTQLHVLYALHQLTIWDLRFPISAQTSCGGRVSTNFKRVSVIRILYNKFIALKWFYVTESLQLEQFDTQV

SEQ ID NO: 30880 - DNA, 3865 bp, DROSOPHILA
gacgcctaatggatctcttcaagcgcacctcaacgcagcccaatccgccacagagtccctacaatacagttgaggtaagtcaacatttcgccaatcgaaaccgtacattatgttggaaactcaaatttgattgtttttttttagaaatccgagggagacattgtctatgaaaacgtgggcttcgaatatcccaccaggaagggcactcccattctgcagggcctaaatctcaccatcaagaaatcgacgacggttgctctggtgggtccatctggttccggcaagtccacctgcgtgcaactgctgcttcgctactacgatcccgtatcgggatccgtgaatctgagcggagtgccgagcacggaattcccgttggacacactgcgctccaagctgggcctggtctcgcaggaacccgtgctcttcgatcgcaccattgccgagaacatagcttatggcaacaatttccgtgacgatgtgtccatgcaggagattattgaggcggccaagaagtcgaatatccacaactttataagtgctttgccccaaggctacgacacccgactgggcaagacatcgcagctctctggaggtcagaagcagcgcatcgccatcgctcgagccctggttagaaacccgaagatactcatcctggacgaggccacctctgcgctggacttggagagcgagaaggtggtgcaacaggcgctggatgaggcgagatcaggccgcacatgcctgacgattgcgcatcgtctgaccaccgtgcggaatgcggatctcatctgtgtgctaaaacgcggcgtggtagtggagcacggcacccacgatgagttgatggcactgaacaaaatctacgccaatctctatctgatgcaacaggtgtcgggctaacacagcgaactggagtgataattgttaggctttaatttagtatgtacactaggctaattgaacatgttgaagtattacaaaaaaaatagaatgattaggccaactactacagtcgactgtctaccaggggtccgggattggccagggcgttacgtctctcctgaatggcgaaggtgagtttacggaatggccccagtggcaagccaagtgacttaaggtccgattctgtgagcagcatcagagtctccaagtcgatctcttgcttctgaaatctgaaatggtaaaggaggatacgagttgaatacacatacattccagacaaatttggttttgttactcacactggcaggtattcttccagggcccaaacggccaggaatcgctgcaaggcacttcctccggcatctcggtcgtcgtcgtcatcatcgctatagatgtcatgaccgccgccctccgagtccgtatcatccgaaaggttcaaatataaacgaccctttcctccgccatttcgtgtctttggaggattgctgcccgcattccgcatcgtggaagtggaactggtgtccgtgtgcagttgaagctgacttaaagcagcagttacggatcgacgaaaggcaatgctgcccagcatggtgggtctatcgaagagtccaacgggtctctggagggtcacttcctcgcttagttcctgggtcaactgaccatcccccagaatatccggttgggagaaggaacgcgctaaagtagagctatagccactgcggttatcgctgtggtccaactcatcggcctccatgcactcaaaaacatcgctgatcttgccgcgcttgccgacactgtcctcgttggaactaaaggtgcccacatacagcacctcggagtctctctgcagacccgtaagcgatgtaatggttcgctttccatctggctccacctcgcgcaccttgaagccaccgtctgtgtcgctggatatcttcgagtgtggacatgtgctgctgtgctgcttttggagctgcgacggtctcttttgcaccgttcccgctcgactggctattgtggagccaccgctgctgctgctaccgttcccaaccagatcgctgaactttgtgggaggcggtgtatcccttggtgtcttatttagattgccctggctggaccagatcttctgcttcagagtggacagcatgttgccggtcttgctggagccactgggtgcgcttagatccgaatactccggatcctggcgctgttgctgctgattctggcgcttcatgtactccctaacacgtttctcgcagtttttctcggccaattctttcagggccttgcttttttttctgttagttgaagtattagttttaatatatacaaaaaataaattatgcaaacaaaaatgcaagcaagtggcagatatttcataaacttacttttcagtggcctcaaagtttgtgaaggcaacatccaagtagcgcaggatctcgtccctgccattaatagccgccagatccttggcgctgtgcttatcgatatccaaggcatagatgtttactccgaatttcaccaagaagtcgacgcaatgcaaatgacccttggcggaggccaagtgcaaggctgtgtttccgaactgatcgcatttgtcagggtcaccactgaagggagaggaaaggattatcttcagtggatatagaattatcatttaaacgaatgcgtacccccttccgcacagcagacgcagtgcatccagacgcccctcgaaggcagcccacatgaccggcgtcatggaatcactgtccttggcattcgtatccttccgtgtggctgctgccaacacatccaacagcccatctttggcggctctaaacggaaacgattgtaccagaaagttaatgagtctcttgtgcatcaccattggtgataagatagagtcaaattaattgcatgtacccacttgtgaaaccgatccgatgacatattcgtctgtgttatctttcaatcaggttggcgatggaaattcttgaatcgatctgaaaggaatccaaggcgagatgagtaggctgttcattatacttgccattcctttccatcacacatctcaagattctcaaaattaggtcacacacataagcgccaacaattctttacaattaaaaagcatgtctatagaaaaaatctcctccgagctgcgtaagatgataatatctgacaatccaatcgaagcaacaactttcgataaatctgcaatagaggcaactttggattccaacaaattcgaagatctacgaattccgaagcatacactgaagcaaaagtttcttcttcgaaagtcaataattgaacatccctttaaaagaattcgtgccgaaggagtggattgggctcacaaaattcgagacaccgacgaagagaaggaatctaattgggcaaagattgcgactggaaaggtttctggcaatgcctacgatcttaaaaccatgatgagcgagtgtgaaaatatttgtggttacggaaacgccataaacttgacggtcccaagggtggacaaactacaggatctggctaaatcgatcccaacggatcccgatacagtctacctgacctgtcaatgtgatgatattttctctaatggaggcacagaagctccgactcaaagccccgacgaagttaatttcgaagagctgtccagctacttcgaaaatatgctcaacatacccaagaatcttccgctcagcgctgaaataatgtatacttaatgattggaacggtgtgtgtattgttatatttagagtaaaaaaagatataaatcattttagtttacggttttctcattttagatgtggtgatgttaggtttggatccctatatatgcatatacatatgtacaatgtatgtatcagatcgactgatttccgttttggtgttactggtaccaaatgtagacggggttttcgtacttcttgtcttactccacttt

SEQ ID NO: 30881 - DNA, 1551 bp, DROSOPHILA
atgtcatcggatcggtttcacaaagccgccaaagatgggctgttggatgtgttggcagcagccacacggaaggatacgaatgccaaggacagtgattccatgacgccggtcatgtgggctgccttcgaggggcgtctggatgcactgcgtctgctgtgcggaaggggtggtgaccctgacaaatgcgatcagttcggaaacacagccttgcacttggcctccgccaagggtcatttgcattgcgtcgacttcttggtgaaattcggagtaaacatctatgccttggatatcgataagcacagcgccaaggatctggcggctattaatggcagggacgagatcctgcgctacttggatgttgccttcacaaactttgaggccactgaaaaaaaaaaaagcaaggccctgaaagaattggccgagaaaaactgcgagaaacgtgttagggagtacatgaagcgccagaatcagcagcaacagcgccaggatccggagtattcggatctaagcgcacccagtggctccagcaagaccggcaacatgctgtccactctgaagcagaagatctggtccagccagggcaatctaaataagacaccaagggatacaccgcctcccacaaagttcagcgatctggttgggaacggtagcagcagcagcggtggctccacaatagccagtcgagcgggaacggtgcaaaagagaccgtcgcagctccaaaagcagcacagcagcacatgtccacactcgaagatatccagcgacacagacggtggcttcaaggtgcgcgaggtggagccagatggaaagcgaaccattacatcgcttacgggtctgcagagagactccgaggtgctgtatgtgggcacctttagttccaacgaggacagtgtcggcaagcgcggcaagatcagcgatgtttttgagtgcatggaggccgatgagttggaccacagcgataaccgcagtggctatagctctactttagcgcgttccttctcccaaccggatattctgggggatggtcagttgacccaggaactaagcgaggaagtgaccctccagagacccgttggactcttcgatagacccaccatgctgggcagcattgcctttcgtcgatccgtaactgctgctttaagtcagcttcaactgcacacggacaccagttccacttccacgatgcggaatgcgggcagcaatcctccaaagacacgaaatggcggaggaaagggtcgtttatatttgaacctttcggatgatacggactcggagggcggcggtcatgacatctatagcgatgatgacgacgacgaccgagatgccggaggaagtgccttgcagcgattcctggccgtttgggccctggaagaatacctgccagtatttcagaagcaagagatcgacttggagactctgatgctgctcacagaatcggaccttaagtcacttggcttgccactggggccattccgtaaactcaccttcgccattcaggagagacgtaacgccctggccaatcccggacccctggtagacagtcgactgtag

SEQ ID NO: 30882 - protein, 516 aa, DROSOPHILA
MSSDRFHKAAKDGLLDVLAAATRKDTNAKDSDSMTPVMWAAFEGRLDALRLLCGRGGDPDKCDQFGNTALHLASAKGHLHCVDFLVKFGVNIYALDIDKHSAKDLAAINGRDEILRYLDVAFTNFEATEKKKSKALKELAEKNCEKRVREYMKRQNQQQQRQDPEYSDLSAPSGSSKTGNMLSTLKQKIWSSQGNLNKTPRDTPPPTKFSDLVGNGSSSSGGSTIASRAGTVQKRPSQLQKQHSSTCPHSKISSDTDGGFKVREVEPDGKRTITSLTGLQRDSEVLYVGTFSSNEDSVGKRGKISDVFECMEADELDHSDNRSGYSSTLARSFSQPDILGDGQLTQELSEEVTLQRPVGLFDRPTMLGSIAFRRSVTAALSQLQLHTDTSSTSTMRNAGSNPPKTRNGGGKGRLYLNLSDDTDSEGGGHDIYSDDDDDDRDAGGSALQRFLAVWALEEYLPVFQKQEIDLETLMLLTESDLKSLGLPLGPFRKLTFAIQERRNALANPGPLVDSRL

SEQ ID NO: 30883 - DNA, 3002 bp, DROSOPHILA
tgaaaacatagcgctgccgacgacggtaacaaacgaccaatgacaagcaagcagtaagggcgagcgcgagtgagagcaagcgagtgcggctgaggggaaaaaaaataagatattcgaccctgggggtgtatctttacataaagtctacgcgccatgtagagagtcaatcgaaagctctggaaaagcttgcaaaacaaagcataacttcaggtgtaacgaattttttggttgtatgagattatcgcccttcttgacgagatcatttgagttgtatatatcggaaatcaaaatagcctttccacagaagaagaacttataaaaaaggttcccgttgttgttaaaacatcaatactaaaattgattagaatcatattttatttcttttctttattccgttttacccaatttctcatttccctacgagaagcttttgcgaggaaatatacatattccagcaaaattcaatccatattaataaccaagaccagggattctccaaaagtctagaaaccattaaactggcggtgaaccaccacactgacttttagtaatagttctctcttgattactggagttcgccgaaatcggtcgactagaagtcaaaaggcgtagtgaccccggtctatcatcaactcacttgtggcagctgctggattttcgtgcctggagagtcattgtccgaatttgacagctatggaaaccagggatgactggacaagctgtccttgtttttgctgcgatgccaataaacttgagcataacttaattcgctatagagtagcgttcatagcaggcgattattaaatatatagaatatatcaaatatgttaaaacaaattacttgtgtttaccaagcaacaacaatgagctgtcttgtcatttttcattaaaatttcggacatttggtttatcagaggacgtttttaatgaaacaaaatgatttataaattagtaggcagacgacggggggacaacacaaaagtctagtcgctgtagcagctcagcccttgaccaggacctcgtagtggtcgatgcggacctcctcgccgtcgaatgggatgtagaggcaatggtgtgactggtggatcttgccgggagtgaggctgccgtggtggtgggcacggccgatgaacaggggctctccgtcggaagtgcggccgcagagaacggcattgccgggcacattgccatggctgtcgtgcacccatccgtacccgtatccggccagcagctcgtagtcgtgcttcacaacctcaccgcctccgtagggcacataggcacagcccttgttggggatcacctgtggtggataagtggatagataaagtgggatgcaacagaacagatttaaagatggaatgctccaagtgtacattttcggaacacgagctgtatatagtttaaggttctcaccttggctggcagcaaatcgccctcgtggtaggcgcgacccacatagatctgatcgccatcggcgtcgtgtccgccaaccactgttccgggaacaatgccgcgtccgctagaggctatccacgtctcgggctggaccagcacttcataggcttccagacggtgctgaaatgatataagataaaagtgatttactaagatttatcacattgcaaacactgcttgtgcgattcgtcactacgtggtcttcgaacgttattgttgaggggatgaagggaatccatcaacataacatcaaagtgagggttagacctacctcctgtccgccgtaggggatgtacaaacactggtgcgagggatggaccttgccgggggtgaggctgccctggaagtaaccacggcccacgtacaggggctcaccctcgccagtctggcccacttggatggcatggggcgggacagatccaccactggacgggatccaggagaagtgatcaccgacaaggacctcgaagtcatgcttgctgatctcctgaccgccccatggcacataggcctgctgcttgccgggcaccaccttcgctggcagcatctctccattgtggtaggcacggcccacaaagatgggatcctggtcggagtcgtggccagctaggatggctcctgggggcagggatccgtaaacgttggtgctaatccaggtgtagtctgagggcgaataaaatatatatatagagcaaggtcagaggcgataagttaacttgggccaacgagggccaactgtacaccattaatcagccacagtagaggttttttgtcttttatttgtcagggtgtagaatcgctggatctatggaaagctaccaaagctccaagggatttcggctgtcaggtgcgcggagtatcgatgacacttgcccacttgtcacgactaattgcggcactatgctttcgttttcgccagaattatcttagtcactaactttgcacttcagttctcacctcccatgttgtatttgtgtgctttttttgtatgttgatttaggtctggaacgtgatgttatatactcgctggctccgctatgtttgggctgacttcaacgactggtcgctacccgcacatcggttgcgccttaaaagctgttgtttccgcttatcagttcggcaagttagccggcagtgataagatatcttagtcacactgctctgaaccgttcgattgtgtgtgttccacaaaggtatcctcatgtcgtagagggtgttcgtcattgcgaccaactgacaggtgtgtcagaatgtatattggatgattttgtttggtaaaaacaatttaaattctgggttaaacaggaagcgcaaccaaaattactcaatcgatcttgtgcatgaatatttgtttttgtttttgcgggttttatctataagcagttggctacgaatcttatcgccggtagtcaaaaataaacttcatcaataagttcgtaaaagattatatgtatgagggtggctgtccatggatcaactataagttcaggaatgcttttctagaacaaaaataagaaccaacatgtaaacagttacctaaccttctt

SEQ ID NO: 30884 - DNA, 738 bp, DROSOPHILA
atgctgccagcgaaggtggtgcccggcaagcagcaggcctatgtgccatggggcggtcaggagatcagcaagcatgacttcgaggtccttgtcggtgatcacttctcctggatcccgtccagtggtggatctgtcccgccccatgccatccaagtgggccagactggcgagggtgagcccctgtacgtgggccgtggttacttccagggcagcctcacccccggcaaggtccatccctcgcaccagtgtttgtacatcccctacggcggacaggagcaccgtctggaagcctatgaagtgctggtccagcccgagacgtggatagcctctagcggacgcggcattgttcccggaacagtggttggcggacacgacgccgatggcgatcagatctatgtgggtcgcgcctaccacgagggcgatttgctgccagccaaggtgatccccaacaagggctgtgcctatgtgccctacggaggcggtgaggttgtgaagcacgactacgagctgctggccggatacgggtacggatgggtgcacgacagccatggcaatgtgcccggcaatgccgttctctgcggccgcacttccgacggagagcccctgttcatcggccgtgcccaccaccacggcagcctcactcccggcaagatccaccagtcacaccattgcctctacatcccattcgacggcgaggaggtccgcatcgaccactacgaggtcctggtcaagggctga

SEQ ID NO: 30885 - protein, 245 aa, DROSOPHILA
MLPAKVVPGKQQAYVPWGGQEISKHDFEVLVGDHFSWIPSSGGSVPPHAIQVGQTGEGEPLYVGRGYFQGSLTPGKVHPSHQCLYIPYGGQEHRLEAYEVLVQPETWIASSGRGIVPGTVVGGHDADGDQIYVGRAYHEGDLLPAKVIPNKGCAYVPYGGGEVVKHDYELLAGYGYGWVHDSHGNVPGNAVLCGRTSDGEPLFIGRAHHHGSLTPGKIHQSHHCLYIPFDGEEVRIDHYEVLVKG

SEQ ID NO: 30886 - DNA, 3776 bp, DROSOPHILA
cgactgatttccgttttggtgttactggtaccaaatgtagacggggttttcgtacttcttgtcttactccactttttaatgtgcttattgtgtggggctggccaattaaaataagcccgaagatgagccaaattcctaagcctaagcatattgccctttttcccagcacttgtactaacgttcacacgtttcgaattaataatccaaaaaagaaaaagaaaagtgtagccgccgcgaagaatcacaggcccacgacacacgcacacaagaaaacattacccatttactgcgcacgacggagtttggcttacataccaacgaccaactaccaagttcactcaaccttgttggctggttttcgaattgcccaaaacaaccgaaaatcgagacagtcaaccatttacttatttaccacgggtacacacactcacttattaccagttagttgtcccggttcaagacgacttttcaaatgcaggatttcaaattggattttcccactccgggcagcttgacacttttctttttagccaaacgaaccgaaagttttcatctgcgatcggtagaatatgcacgttccgaaagccgttacccggaagcactttctaccgctccgactgcatgttgttgaatgaaattgttagctttgctcaaactcggcgctcacattacgcacagtggtcgagaaaatgatagatgctgcttagacggcaactaaatattttaatgggaaaaattatgtatgctaatgttttgttttaaatttcttaaccaataaagtaatataaagaatataaattaataaaaacattgtattgaacgtattggttcaataatcgtatttgaatatagaataatttgtacgaaaatatttaaggtgtgaactactgtgcggaatcaacttgtatgtcctactgtgactctcttcgacgatagggtgttgccagactgaagttgctacgactatcgcatcaactaacgtagagcactgcagccctggttgactagtgccgccctggtccgattgccagaaaaaaacaagacaagtgaaaaagcgagataaatcaaattaaaaatattgtaaaaaattgtagttaaacacgcgctggagcacggtgaactgaaaatgtgaatgaaaaccatcaatagagagagacgagcgcgatttggtggcaccaaatgctgcagttgcaacctgcacatgtatgtgtatacgcgtgagtgtgcgtttgcgtaggaggcaccaaaataacaacagcaatcgcagtgacaacaaagaatcggaatcggaatcgtacttgtttgtactcgcacaggacgtacttggaatcggaatcggaatagccactaccatatgccagaggagggaatcgcagtgccaatgcatagttaataaatttcccagaagctatacgaccagcagacctcaattgcaattgcacgccccttgacaaatcacagtgtctcagccaaaacgaaactggaagccatcgagtgctcccgttaagcaagcaactgcaggcggagcacgggggaggagtaggacctggtggtgcaccaagcacgcccgcactatgggcaattgcctgaaatgcttccagtctgccgccgaacaatcgatgccaacgaacgcctcgtcccccaattcacacaattccaattccaacgcctgccagacggccaccagccttgcaaattgctacgaatcggtgggcattaatcccaatgccaacgagcgctgcgccttaggtgggtattctatagttaataaccgcattgtgatccaaagtctaagaaacctctcttattccggcttatgcactctagaaaccgatgaactgctctctagccgaactccactcaagccagcaaaagcaaacaattgtgatactaagcgtaatagttttaagtctttaggtttgcttaatggcagtgcgcccaccatgagcgatatcataacaactggtgagtcagcgttcattcgactgccttggcggcatactcattcgattttctatattctaatagctgtccaggaatcgatggaggtatcgcaccaaacgctgagcaaactattcgatgtgtacaaagatcccgacgacgaggagatgatactcacggacggcatcgagcgactatgcaatgacctcaactatcagcccgatgagttcgcaattctcgtcttggcctggtgcctggatgcctcgcagatgtgccgcttcaccaaggtggagttcattgagggtctgcataagatgagggcggacacaatagacagtatccgggtgcggctggagcagacaatcgagatgctcaaggcggacgccgagatgttcaagcagttataccgctttacattccggtatgccgttcttactgcttggaagatcagtacctaattagcgtctcaaatttcagatttggtctggagcccgatcagcgcgtcctctctctggagatggctattgacctgtggaaacttgtgttcactgtacaaacacctgatctcttctccaactggatacacttcctcgaaaagcacccgaatattcgccgcataccgaaggatacatggaacatgtacctcaattttacggaacaatgtgatatacaaaattacgatgataccgaagcgtggcccagcctcttcgacgactttgtcgactacgagaaaagccgggcgctggtttcctcgggcatccacgacgatgacaacaacaacgacgatcccctacagagccacgtgaaggccgaggatccgggtcttgtgtcatagtagccagtctccagtctcttcagggccaagcaacattcaactcgccaatagaaattaaagaatgtacattttcatctatactgaccactcgctctctctagctgctgcttaagatcccctgtgaaagtagaaaactttaaacacccgtggccactgaaaacgaacgatgcggtgctggcgctgcttgaggacggactctccaactgccatcattagccagctcttattatggctggccaacattctggccggagcaacaacggacgcatttgtttatgtaattaaagacttatcgacaagaattttggaaaagctcaatcatcggaaaccacatgtgtatataactaattgacttgaaggcggagcagaaggtagaccgtataatatttagcaattaattgatgtattattttaaacaaaattgcaacattttatggcacttaactatttaaatgcatacaattacatacttaactgtaagtagtggatgtgaattaaataaaaccaactaaaagattaaactgcttaattggatttgttaattatggcatggcgtatttagtttgatataccagtaaattaacttaacataatagttgctttaaaatggggggatgtattcaaatcaaccgccaattgcatggcctatcgatattcatatctgcagattggaccgataggaatgcctccatgcaaccgtgagactagtacattaaattgctattttggttggcctgataaaattataaaaatcatcgcaaacgcagtcagctgggtatgattaagtgttgagtgcacctccgcgctcttgaacaaatccccaccaggtggaaatgatagccgtgtgcagggcattctttatccagtgattcacggcgttgacattgaaaaacaaacgcaatgccagcacagtgggcgtgagcaggcggaaggggtgtaatcgccaggaagggcaaggattcagtgcaaggacacggtcgataggagcagctggccagtg

SEQ ID NO: 30887 - DNA, 1441 bp, DROSOPHILA
ttgactagtgccgccctggtccgattgccagaaaaaaacaagacaagtgaaaaagcgagataaatcaaattaaaaatattgtaaaaaattgtagttaaacacgcgctggagcacggtgaactgaaaatgtgaatgaaaaccatcaatagagagagacgagcgcgatttggtggcaccaaatgctgcagttgcaacctgcacatgtatgtgtatacgcgtgagtgtgcgtttgcgtaggaggcaccaaaataacaacagcaatcgcagtgacaacaaagaatcggaatcggaatcgtacttgtttgtactcgcacaggacgtacttggaatcggaatcggaatagccactaccatatgccagaggagggaatcgcagtgccaatgcatagttaataaatttcccagaagctatacgaccagcagacctcaattgcaattgcacgccccttgacaaatcacagtgtctcagccaaaacgaaactggaagccatcgagtgctcccgttaagcaagcaactgcaggcggagcacgggggaggagtaggacctggtggtgcaccaagcacgcccgcactatgggcaattgcctgaaatgcttccagtctgccgccgaacaatcgatgccaacgaacgcctcgtcccccaattcacacaattccaattccaacgcctgccagacggccaccagccttgcaaattgctacgaatcggtgggcattaatcccaatgccaacgagcgctgcgccttagctgtccaggaatcgatggaggtatcgcaccaaacgctgagcaaactattcgatgtgtacaaagatcccgacgacgaggagatgatactcacggacggcatcgagcgactatgcaatgacctcaactatcagcccgatgagttcgcaattctcgtcttggcctggtgcctggatgcctcgcagatgtgccgcttcaccaaggtggagttcattgagggtctgcataagatgagggcggacacaatagacagtatccgggtgcggctggagcagacaatcgagatgctcaaggcggacgccgagatgttcaagcagttataccgctttacattccgatttggtctggagcccgatcagcgcgtcctctctctggagatggctattgacctgtggaaacttgtgttcactgtacaaacacctgatctcttctccaactggatacacttcctcgaaaagcacccgaatattcgccgcataccgaaggatacatggaacatgtacctcaattttacggaacaatgtgatatacaaaattacgatgataccgaagcgtggcccagcctcttcgacgactttgtcgactacgagaaaagccgggcgctggtttcctcgggcatccacgacgatgacaacaacaacgacgatcccctacagagccacgtgaaggccgaggatccgggtcttgtgtcatag

SEQ ID NO: 30888 - protein, 288 aa, DROSOPHILA
MGNCLKCFQSAAEQSMPTNASSPNSHNSNSNACQTATSLANCYESVGINPNANERCALAVQESMEVSHQTLSKLFDVYKDPDDEEMILTDGIERLCNDLNYQPDEFAILVLAWCLDASQMCRFTKVEFIEGLHKMRADTIDSIRVRLEQTIEMLKADAEMFKQLYRFTFRFGLEPDQRVLSLEMAIDLWKLVFTVQTPDLFSNWIHFLEKHPNIRRIPKDTWNMYLNFTEQCDIQNYDDTEAWPSLFDDFVDYEKSRALVSSGIHDDDNNNDDPLQSHVKAEDPGLVS

SEQ ID NO: 30889 - DNA, 2339 bp, DROSOPHILA
agctgcgagttccagttcaaacaatgctaatgacagcaggcagcttaagttggattacattagggatgattaaaagttcgctattcgacacttttgtgggcaaaaggcgatgcgtcgtgaggaatgtccgacgtaatcatggcttaaatcgacagacacttgtcttggccatgttataatttcaatgaattctccatcagccaagccttatgttgctcgtataactcacaatttaattacttagccataatttaattgcttatgcattcacattcctctctagttgattaatcaatatacaaaactattgacagcttcagaaagtttggttcgttgccaatttgcatatattggcttacattagattatggattatttatagagcaaagcatttcgattttgtttgccaaactaatgagtgaaaatttgtcagtgcaagccacttgatgagagtttcgaggaaaatcaatttctgactaataactgaatgtatcgcattcgattgttttttctatggaaaactttgattagatggccctcggtaactttagaagtccgagtgctaccaatcaagacccagtatctataagttgaaatctgcagctgagatttctttccgatcttcaattcctgtatggagggcttagcgttcggtgataagcccgccaaatcttttcctagaaggctggccaaaaactttagaagccaccttgttttgcacaaccgctggcgtgagtcaggtaatcttatcgcggccacttgattgccggggggtttcgtataccttactttcgtttcgcgctattgggccttttttgccagactctcgcccccatgccccacctcatgggctgcgataagtccgccctgtaacagaagttaattaaaagcgaagcgcttttgtaaacattgccttagtcatgcgaagcgatataaaagcttggccattcgcagcagttactatcaaacgatacaagaacgtcgaaacgaaacattcaacatgcgtcttctgctcatcctctcagttgtcctggccgtgatccttggctgccacgcctacggcgccacctgggggcgtcgcaataacaacgactacctgctgtcccgcaccacggaagtccgcaatccgatcaagaacaactactggaacgtgaacgtgaactatcccgccggattctacaacatctccgccgtgatcgtctacgacaactttaagaacaactccggcgcatctcctagcctctattccggcggtccgggctatcgcttcgccaccgtgaatcttcgtggtcaggtgaaccgcggaatcaactccaccgtcgagatctggggtcgttaagtgatcaaacgaatctgttataaccgactgaaagtcgctgggatatcaactgaaacatgtttcttacgcaactcaaagctaaatcctcaatcttaacaaataaaagaatacagtaaaatacatacatatatatggcagtattaaacaaggcgcttttttcattaattgcaaaaaccttaaaccaacagcttttaataccaataagactgtgtttctgaagtaaacaaaataatttccggcttacccacgtgtatctaatcagttaaaaaagcaagttcacttttttattaacaaatggcttataagtaaatataaaaggcggaattgatatgtaaaaaaaaggcaattatcaagataaagtagacatgatagtaaatatttaataacaaaaaagtttgcccttaacagttcagtgcacaaagtgaaaatcgccaagagtctatcatattcaaacataaatcggtggttatctttatcagtgtgtgctgtcaatgggaatagcatattgatgtatctatatctgccggactttgcataatcgcatattagccttgggccaatccccaaaaactccgtgcaagtttagaattttcccttggattctgcccggcacaaaggatgaaagtggagcgcccgaggaaacttttcctttttgcccgccagaggcatagtcatctagcaaaggaaaacattcaatatttaataaacatcagtgagtgtgtgtaggtgtgtgtgttggcaagagtaaatcgaaattaaggctgggtataggactactggccacaaatcctgtgaggcccagacagactgttaaaagggctagagggcttagccagcacaaaaagaaaaaaaaaaaagatgccaaagaaaaagagggaaactggagcccagcgaaggggcgacagacttattggccttggctcatttgattcccggggatggtgtaaaatttgtatttcgaattgccaaaagcagccccaaaaaaaaaaccgaagggggg

SEQ ID NO: 30890 - DNA, 339 bp, DROSOPHILA
atgcgtcttctgctcatcctctcagttgtcctggccgtgatccttggctgccacgcctacggcgccacctgggggcgtcgcaataacaacgactacctgctgtcccgcaccacggaagtccgcaatccgatcaagaacaactactggaacgtgaacgtgaactatcccgccggattctacaacatctccgccgtgatcgtctacgacaactttaagaacaactccggcgcatctcctagcctctattccggcggtccgggctatcgcttcgccaccgtgaatcttcgtggtcaggtgaaccgcggaatcaactccaccgtcgagatctggggtcgttaa

SEQ ID NO: 30891 - protein, 112 aa, DROSOPHILA
MRLLLILSVVLAVILGCHAYGATWGRRNNNDYLLSRTTEVRNPIKNNYWNVNVNYPAGFYNISAVIVYDNFKNNSGASPSLYSGGPGYRFATVNLRGQVNRGINSTVEIWGR

SEQ ID NO: 30892 - DNA, 2477 bp, DROSOPHILA
tttgactttgttctttcgtccaacgagaaagttttattaggggtacgtgtcagggttgccatgtgtgcggatgtcgggtggatgtttagggttaccctgggctttcggtgggggtacgacgaatgaactgaaactgtcaaaagtgcacattccgctcttgacattttaccaaagcgcagcttgaactctggtcttcaagggggacggaggaggggattggcgagagaaaatggaaaagtgggaaagtgtcgtgccagctatcgacattgaaagcgcaaatgaaagggaagtcctcttttgaatggcactggcagcttgcgatggaatcccagacatatcccaatcccatagggtgaaacccgccatcgctggaaagtaccgacggcacgcgttcgtccgcccccctgggggtggaacgccccccgcctccagccccctgcacgcccctgacaagcagttaaaaaaggctaaacgaggacggggcataaacccaaaaatttgctctctgtacgtttattgcttttaaatttgccaattgtcgaatctgacgatggtaagtgcatgtgtgtgcactgaaaacaaatagtgtacaatcgcctttattatctaacatcctgtttttaaggaatccaaaatggtcttaaagtgggcttagagtaacgaaagtgtttcgactgtcagaatgacgaaagcataaaagtgttaaagaaacaccaaacactttctagataaagctgctatttatgtttttgttagtcattcaagaggggatcatcatttcttatcagcattttgacgaaacacctaataaccgtgatatttagagaatacaaaaatatgaactgtttttgccagactcttgttccatttcccacttttttctgcgagataagagcgcgttgtaaaaaatttaattaaaagtgtcttgtcttataaaagctcgccgattttaagcagctgccaacaaacgatccaagaacgttcaactaacctattcaacatgcgtcttctgctcatcctctcagttgtcctggccgtgatcctcggctgccacgcctacagcgccacctgggggcgcagggtcaacaacgatttcctcctctcacgcaccagggaagttcgcaatccgatcaagaacaactactggaacgtgaacgtgaactaccccaatggattctacaacatctccgccgtgatcgtgtacgacaacttcaagaacaactctggagcatctcctagcctctattccggcggtccgggctaccgctttgccaccgtgaatcttcgtggtcaggtgaaccgcggaatcgactccaccgtcgagatctggggtcgttaagtgatctttgggagcatgttgtaaacgaattgaagtcgaatatgaaatggcaaacatgattaattttattatacttgagaagaaattgagaaagcaaaactatggaatcaatcaataaagaaagagttctaagcaatattattttatttaattaaaggaatggttaacacagggtatcaaagtataagcaaaataagtataaacaaagatcaaaagatctttttagataaaaccctgcgcttgttgtttttttttctggttaggttcttatcgttatgttactgcttaccagacttgctagaattgcacgtatatagaaaatttacaaacatttgcacctttaattcgaaacctaattctgttagatacaactttttcttgtagtgtatgtctttcatgttcgggtgagtccacaacaaattgcttatcaagcgagcgcatgtagcagccaaactgaaatgggggggcccagcaaggccaaaagcagcccttaatttggccaatttaaaaatggaaatcgattcccccgagagtcggcgatgtgtcaataaaatgtgattaacaagttgctgcacaaaatgccagcacagactgcaatcggataatggcaatggcagtgggtacaaaatgcttcgccgacattccctcaggcatttctggctgctttgtatctttcagttgtcattgtggggttccttttcggttttttgttcttttttttagggggtggtgggtggaggggtggggggtagcaaacatcctgggagcgtggcgaattatccctttcataagtgacaaatacgtccaccctcatcagccacggctgctgcaagtaatgagattttattccaaaccaagtgactgctagccgtggtaattcgcaataaatatgcagccaggatgagaccagcagctcgatttgtgtgtcaggcgataaggatgccaccccccaaggatcgcggtggagctgtgattccacgaatgcattccgtagcagattaaccaactccacgaacgcaatgccaccggcatgaatggaataatctctggacttaattaaagtagctgcgagttccagttcaaacaatgctaatgacagcaggcagcttaagttggattacattagggatgattaaaa

SEQ ID NO: 30893 - DNA, 477 bp, DROSOPHILA
atgcgtcttctgctcatcctctcagttgtcctggccgtgatcctcggctgccacgcctacagcgccacctgggggcgcagggtcaacaacgatttcctcctctcacgcaccagggaagttcgcaatccgatcaagaacaactactggaacgtgaacgtgaactaccccaatggattctacaacatctccgccgtgatcgtgtacgacaacttcaagaacaactctggagcatctcctagcctctattccggcggtccgggctaccgctttgccaccgtgaatcttcgtggtcaggtgaaccgcggaatcgactccaccgtcgagatctggggtcgttaagtgatctttgggagcatgttgtaaacgaattgaagtcgaatatgaaatggcaaacatgattaattttattatacttgagaagaaattgagaaagcaaaactatggaatcaatcaataaagaaagagttctaagcaata

SEQ ID NO: 30894 - protein, 112 aa, DROSOPHILA
MRLLLILSVVLAVILGCHAYSATWGRRVNNDFLLSRTREVRNPIKNNYWNVNVNYPNGFYNISAVIVYDNFKNNSGASPSLYSGGPGYRFATVNLRGQVNRGIDSTVEIWGR

SEQ ID NO: 30895 - DNA, 2850 bp, DROSOPHILA
ctaaatgcaggcggtttcgtcctgcgccaatcatcccctcgctcagtccgccggaagcggaattgctacattcaacatccggcggatcggagcaccaggcagcagcagctcgaacttgaagctggtaaacacccggcattccactccttcccactctggtgaatagcgaacttagcctgatcccgtggagtaaataatacgcccctccccccaaaaggggggcgtcgaatagaaataggaagagcaacaataaaagcgaatgaagaaatttaatttcacgtcgttttaactcaagcagctcgtctttcaatgccagcgggtgggcaattcgaatggagagtggaaaagatcaggacacgccaggactcctgagcccgccaatgctactccgtcctatgatgaagcagtcgcagttgacaccttttaatatcgccaacccgaacagcttcccccaggacgcctgtcgctcctcatttcgtcctgaagaagaactcgagaaactccttgctacctcgcctgctggtgacggattcgatttcgattattattgtgtcttgggctttgtttacccaccagcattgtcacctagtgttgcccccctttttaaccatccctgtccactgagaaaatcaatttccgcttaatggtagatagaaacgcttgaggggagtgtaaacagcaaatgcacaaggtttgctcagcggaaagaatctccggctcaaatggagtgggtgtgcccagcaaattgcggggaaactttcgctttacgtctgcagtgcatccgcatccgcaactttctctacgtcctgttggttcttttatccccgcaggactcgaggcggacctgttctatgtgcacgagggagccatcaacacatacgcaatgcacttcaccgtcccagtgcccgcggatgtccatgagctggagttttcctggcagagtctgattgcctacccagtgagtaaccaggagcagtcatctagaacctgcgataattaaccattccactcttgcccagctgccatacgccattagtattgagtataacaacgaccaggaggcactgggcacgcccacgttgagcattccgcacaagggtctggtgccacaggagatcgagtccttcctggtttacctgccctgcaccggaaatgcgagcctacagatgcccgtcaatgtcaacatggtagtacgggctcctcctcgattcaacgacacccggctccactttaagcgcaataagatctgcgccaaaggtaagtacacccagaactccatcacccacgcccacttatccatcactcatcggacatccgtttcgtaggcatctcacctgagcccaatcaatcgccggcgccagcccacgcaccctcccaaggacccgccctcctcagtgccgccgcctgtgctctgggtttggttttggccgtgggactagtggccagcatgatgtatgtgagggcgcgcaaacagcttcgccaggactcgctacagtgggttattcgccacccccaatcgccatgccactccattaacactcatccccttttttagcaccagtttcaccaccgcagcttatggcagccaccaaaacgtgttcatccgactggatcccctgggaagaccgccgagtgccacgggatcctatgcgaccattgccagcctcaacaaataccctgcggacagcaaaaagtcgtgcagcatattcgaccgtaagttcattacccactcgtccactcgggtgacccctaaccaactcctcctggcactccctcgaccaatccacaggtttccggagctcacccacccccacgccgtatgccaccgccctgctgcccatgaaccttgaacagaccgcagagacgatttactcgaagccagagtcgatctgtccctcgaggatttcctactacgcctcctcgcaactgacccaggtgagtgccgtggatccactatctaacccactatcgaccatcccaggggcttgattggatttgaaatggggatttcgactggggtccactgcgaaatcaaagcctttgatatattacgacacgtggcaggcgcaaatggaaatggagatacccttgaagctgatttcgcttccctgttgccaggactaccctctaatttgtgccaaggaccactcgattgctccccaggcggaggacccgctcccaacccacctttagctacctttcctcgacgataaaaattaaattctaatttatatttacgagctgataaagctcccgtagtgcgttaaactcgaaacaagagccattcataaacatgcggcttttcccaccccgctcccctcgaggatgtctggatgtctgggtctgatttcgaagggggaaactttcgtgcggcactcacgtacttcatgtggcaggtgggaagtggaagtggaagctgggcgaaggtgaaggcgacacacaaacccagtgcctcgaaaggcggagcatgtgagtctctcgaggaaggaggtggaatgtccgcctagataagcgaatagtgctccattcagggagacgcagacagtctggccctgtttatctcggttttcgcttccaatccagtgaattttaggcaatgaataccccttgggcgaaaattagtaaacttaatacaaactaaccactgaatgaaccaaaccattagggttccatccaaagcactgggattatattccatcaacttgggagttgaagtctttcgctccctctttaaaagcacttctccctctagggagaacattagcatttctttcgagccaagttaactttcttggtgtctaggaaatctcagccaaattggaataaattatttagcagcctctttcaatt

SEQ ID NO: 30896 - DNA, 777 bp, DROSOPHILA
atgcacttcaccgtcccagtgcccgcggatgtccatgagctggagttttcctggcagagtctgattgcctacccactgccatacgccattagtattgagtataacaacgaccaggaggcactgggcacgcccacgttgagcattccgcacaagggtctggtgccacaggagatcgagtccttcctggtttacctgccctgcaccggaaatgcgagcctacagatgcccgtcaatgtcaacatggtagtacgggctcctcctcgattcaacgacacccggctccactttaagcgcaataagatctgcgccaaaggcatctcacctgagcccaatcaatcgccggcgccagcccacgcaccctcccaaggacccgccctcctcagtgccgccgcctgtgctctgggtttggttttggccgtgggactagtggccagcatgatgtatgtgagggcgcgcaaacagcttcgccaggactcgctacacaccagtttcaccaccgcagcttatggcagccaccaaaacgtgttcatccgactggatcccctgggaagaccgccgagtgccacgggatcctatgcgaccattgccagcctcaacaaataccctgcggacagcaaaaagtcgtgcagcatattcgaccgtaagttcattacccactcgtccactcgggtgacccctaaccaactcctcctggcactccctcgaccaatccacaggtttccggagctcacccacccccacgccgtatgccaccgccctgctgcccatgaaccttga

SEQ ID NO: 30897 - protein, 258 aa, DROSOPHILA
MHFTVPVPADVHELEFSWQSLIAYPLPYAISIEYNNDQEALGTPTLSIPHKGLVPQEIESFLVYLPCTGNASLQMPVNVNMVVRAPPRFNDTRLHFKRNKICAKGISPEPNQSPAPAHAPSQGPALLSAAACALGLVLAVGLVASMMYVRARKQLRQDSLHTSFTTAAYGSHQNVFIRLDPLGRPPSATGSYATIASLNKYPADSKKSCSIFDRKFITHSSTRVTPNQLLLALPRPIHRFPELTHPHAVCHRPAAHEP

SEQ ID NO: 30898 - DNA, 4556 bp, DROSOPHILA
taaatgaccgaggggagaatggcatggaaggaagttggatagggttcaggttcagccagctggccatccatcatggctctcagtgggtggcgaagtaaggggggtggatagctttatgtggccttcgtgtatttggcgtttatttttgcggctttcatgtcgtaaatcttcatcagacggcaaattacgtggtttccatcgcgccactcacccgctccctcgtcggcatcctttggtgttccgggggcacttttcgaaatgtggcggaacgtatccggcaaacaataaagtgaccgcatcgcgaggccccaagcccccccataaccttggtcaggcaaaacaaaaaacaataaacggtgacaaaaaggcaacaggatgcgcataaaaacaggaccaacaaaggcatagacaacaacaaaaataaccattaaaggacatcggtaggcgatgaatgcggcccagccatcccagccattgacaacagtttcatttatgaaaaataatagcaacggcaatatgcaaaatttattattatatttgcgttgagccgcaaaaatgcgacggatttcgaacctcgaccccaaaaagttgatgtgactgttcgagaaagccaacacgaatctgaaataccctttcagaaatagtttgactttcttatatgaaattaaatgtaagaaatccatggcagtcaaatattttagtcaatccatatttaataaaaaaagaataacagaaagtctaataatttcctgtcggccactcaatgcgattaaacaagtcgagtatgtacacgtttcaagtgacgaccacaaagtgataatatacttgattaaaaatggattcattaagttgaagattactccgaatttaaaaggcacttgtgatttgaagctttcttgggtgcattcaaatgaaatgtgttatctgtgagcagttacgattaaaaatattttctttaataatacatttttttacatgaactaccttagttattattgaactaatctacagttgaagttgtaggttccagcagattttctgggtccctaggctccttatcatcaatatgagatgtctgtttttcggtaggagagatctttccctttggccttaggaaaatgtcaagtccgccaattggtgcctcaatgagcagatgcattgcataggaaaacagcaaggtgaaccctagggtcgaccagaagttaagcatctgaaaatttgatatttgagatacagcaaaagcattattatttaataatcctaccattccgtaatccgagaagtatgtgctagtcctggtactccgtgcgttcatctccatgaagaacatgtgccatataaaaacagaatacgaaagcctggagagtggttgccatagcggagaggcgaggaaactattggccagtcctccgtatccctgaacgcaggcaaagatcacccagcaaagggccaaagcccagcccactctggttaaagtgtagtaaaaagactccgccaaggtggacgcgtcaggatcagaccacttggacggcggatacagggcaaagatcgatgtaaagatcatggccaggcagaggatccatcctgaccacacggacacccagctaagctggaacttcttccctctgttcagatgcaggaagtatccgaagaggaatcctataagccagggtgtagcatgtgtatgggttgcatagtacccatctcgcatggcttctggagaggcagccctggataggaaaggggttatgcacgaacttgatcttaataccaaacagtatgacctacgtgatcatcattgaatatccgttcaccatcatggtggcaaatagacaggcggaaagtaaaattatgagaatgaagataccagcagctgctttcttgccccatttgtagagggagatcaacaggatcggcgagatgatgtacagctgcatgtccagcgacagataccaggattgagctaggcactagatttggaattttaacatatgttattttcttcggatgcagtatgcagtatactctgcactcaccttggcatctgtgtagttattcacgaagagcaaagtccaataccaaccagccttgcaagccgaattacctatataaccacctacaaagagtggcccacttgatatcaagggcatcagcttcatgtggaccactatggccattgccagaagtggagcgatgcgtattaagcgatgtaaatacatcattggcacattaagtttgcctttggtcctgcggataattgcactcagtataggcctaattttgtcactcatttttgacttacttatccattaatcgcaatggaatcagtgccactaacaagccgccaatcactagaaacgagtccacggatatgaagccatgcagaataaaactggcaaatggtttttccacccactgcaaagcgattaagtctttttaattgattttcaaataagtagaatatcacttaccgttgcggcacggaacaaattgatgtgtggcgaaataagagtgactgagtactgatggcatgtaatcacccaaatcagggacatgcagcgaattccatgaaggcagtcgattacattcggattcgaatggctttctacaacgcgaaatagggctcgagaattggaccgggctgaacagatcttcacaatggccggaagctgatctgaaggtcgattaaaagtataaaatatccataaggactcttattatcggttaacttaccctgatctttgactagaaagtagtcccacagagtagataatgccactatgaaactcattaaggataaaataactctggaaacaaaagagttagcccaaagtggaatgaagcttcgaaggacttacatcataaaaatggtgagggcatcccagggctcactatcactggtctgacagctgccttcactgattctcatggctgaacttggaacactgacattgagtaacttcatcatcaattgatccacaaacgcattcatgttgatcgccgagcaggatgcaggaaagcaagtggcagttctgaagctacctatgcttgtttcgatccccaggattttggcaggggataccgagaggaagcagtactttccttgaatagttctctcctggccgatctcctttctgatgttcagacactcgtcaaagttgcccaggtcatacgaattaccggcgagtagtcccgatggaatggacccccaggcatcgatcactggaattttttaaaaactatagacaaatccaactctcttttttttatacaaacttcacatacttttcaacgcccagtactcagcacttccaagtcctgtcatcagcgccttcatatcgttgaggcacagcagatcatcttcactcgaaaactgggactccaagccgcctaaatcttgcgtggaaatatttcgaaagtattcggtaaattcgatgcccaaggacctaagttgcctgacattccgaaactgcggtaacacatcgtcactatttggattcccggcactgatgatcacaaaaccgcacagtagaaatactatcacttggttcgtcatgctggttaaagtgttattgagggtttgtcagcgaacgaggaacccctttatatgcgaattagccagtgataagaaccgccaacgacaatcagtcttgatattagtcactagataggtaaaataacattgaaaatgcctgattgaataatctcttgagttgtcactggcaattgttataatcagtacttcagcagcgatacttaataaaatcggacaggtgtaccaaaataatttggcttctaatctaactaggtgtttgaagcggtctgctttggctatgattattatttaattttaaataagttaagtgttttggaattgacaaaaaaacaaaaacaaaaagacataacttcccatggaaaattgcatgatattcaataaaacacataatctaaaatgtatttaatcttaggaaaatgttgcaaaagcatcgaaatagtaagcataccccacaggattctcagggtatatgtcacagaaattcccgctgatgttattgctttgcccgctttattcattcattattatgtattgccactttggcattggcacagtgtttcgccatgtttctggttgtttgttgttcgcttgtttgcttttatttgccatcattctgtgcactcgttagcggttgttgttgttgctgctttgtcgcgccaagtccacaaagaaatttcaattaaaatgcaacaatgccgcactccatcattggggcgacgcgccaagctgacaaaccgcgacacattcccccgccagggatcctcttgctgctcctcctggtgcttctccctggcggaagtccccaagaatttggcagccacgagagtcgcacgtctcgccaatggctggcaaatgacttttcatggcgcaaagtttttggccaggcggcagaagggggttttggccagtgctcgggaaactgcaataatgagttgaggaaaataaattaagtttacgtaaagtttgctaaagaaagatattcaaagtccaacttagagct

SEQ ID NO: 30899 - DNA, 2094 bp, DROSOPHILA
atgacgaaccaagtgatagtatttctactgtgcggttttgtgatcatcagtgccgggaatccaaatagtgacgatgtgttaccgcagtttcggaatgtcaggcaacttaggtccttgggcatcgaatttaccgaatactttcgaaatatttccacgcaagatttaggcggcttggagtcccagttttcgagtgaagatgatctgctgtgcctcaacgatatgaaggcgctgatgacaggacttggaagtgctgagtactgggcgttgaaaatgatcgatgcctgggggtccattccatcgggactactcgccggtaattcgtatgacctgggcaactttgacgagtgtctgaacatcagaaaggagatcggccaggagagaactattcaaggaaagtactgcttcctctcggtatcccctgccaaaatcctggggatcgaaacaagcataggtagcttcagaactgccacttgctttcctgcatcctgctcggcgatcaacatgaatgcgtttgtggatcaattgatgatgaagttactcaatgtcagtgttccaagttcagccatgagaatcagtgaaggcagctgtcagaccagtgatagtgagccctgggatgccctcaccatttttatgatagttattttatccttaatgagtttcatagtggcattatctactctgtgggactactttctagtcaaagatcaggatcagcttccggccattgtgaagatctgttcagcccggtccaattctcgagccctatttcgcgttgtagaaagccattcgaatccgaatgtaatcgactgccttcatggaattcgctgcatgtccctgatttgggtgattacatgccatcagtactcagtcactcttatttcgccacacatcaatttgttccgtgccgcaacgtgggtggaaaaaccatttgccagttttattctgcatggcttcatatccgtggactcgtttctagtgattggcggcttgttagtggcactgattccattgcgattaatggataagaccaaaggcaaacttaatgtgccaatgatgtatttacatcgcttaatacgcatcgctccacttctggcaatggccatagtggtccacatgaagctgatgcccttgatatcaagtgggccactctttgtaggtggttatataggtaattcggcttgcaaggctggttggtattggactttgctcttcgtgaataactacacagatgccaagtgcctagctcaatcctggtatctgtcgctggacatgcagctgtacatcatctcgccgatcctgttgatctccctctacaaatggggcaagaaagcagctgctggtatcttcattctcataattttactttccgcctgtctatttgccaccatgatggtgaacggatattcaatgatgatcacggctgcctctccagaagccatgcgagatgggtactatgcaacccatacacatgctacaccctggcttataggattcctcttcggatacttcctgcatctgaacagagggaagaagttccagcttagctgggtgtccgtgtggtcaggatggatcctctgcctggccatgatctttacatcgatctttgccctgtatccgccgtccaagtggtctgatcctgacgcgtccaccttggcggagtctttttactacactttaaccagagtgggctgggctttggccctttgctgggtgatctttgcctgcgttcagggatacggaggactggccaatagtttcctcgcctctccgctatggcaaccactctccaggctttcgtattctgtttttatatggcacatgttcttcatggagatgaacgcacggagtaccaggactagcacatacttctcggattacggaatgatgcttaacttctggtcgaccctagggttcaccttgctgttttcctatgcaatgcatctgctcattgaggcaccaattggcggacttgacattttcctaaggccaaagggaaagatctctcctaccgaaaaacagacatctcatattgatgataaggagcctagggacccagaaaatctgctggaacctacaacttcaactgtagattag

SEQ ID NO: 30900 - protein, 697 aa, DROSOPHILA
MTNQVIVFLLCGFVIISAGNPNSDDVLPQFRNVRQLRSLGIEFTEYFRNISTQDLGGLESQFSSEDDLLCLNDMKALMTGLGSAEYWALKMIDAWGSIPSGLLAGNSYDLGNFDECLNIRKEIGQERTIQGKYCFLSVSPAKILGIETSIGSFRTATCFPASCSAINMNAFVDQLMMKLLNVSVPSSAMRISEGSCQTSDSEPWDALTIFMIVILSLMSFIVALSTLWDYFLVKDQDQLPAIVKICSARSNSRALFRVVESHSNPNVIDCLHGIRCMSLIWVITCHQYSVTLISPHINLFRAATWVEKPFASFILHGFISVDSFLVIGGLLVALIPLRLMDKTKGKLNVPMMYLHRLIRIAPLLAMAIVVHMKLMPLISSGPLFVGGYIGNSACKAGWYWTLLFVNNYTDAKCLAQSWYLSLDMQLYIISPILLISLYKWGKKAAAGIFILIILLSACLFATMMVNGYSMMITAASPEAMRDGYYATHTHATPWLIGFLFGYFLHLNRGKKFQLSWVSVWSGWILCLAMIFTSIFALYPPSKWSDPDASTLAESFYYTLTRVGWALALCWVIFACVQGYGGLANSFLASPLWQPLSRLSYSVFIWHMFFMEMNARSTRTSTYFSDYGMMLNFWSTLGFTLLFSYAMHLLIEAPIGGLDIFLRPKGKISPTEKQTSHIDDKEPRDPENLLEPTTSTVD

SEQ ID NO: 30901 - DNA, 4854 bp, DROSOPHILA
aggtggtggccacgctctgatcctcgttttccttctcaccatcctttttcgtctttttggtggccgccagacgcttttttcctcccgctgccttggttttgggtttttccgtctcgcccgccttcgcctttggtttggccattccgaatagtttattccgttttttgtggtccgcagccaatactagatttccgtattttacggtttaatcttaaaaactgttttcaaattgcatcgaacgatggcgaaacaaacaagcgtcgcgttattgctatttcctcattccacccccgttcgcttgttaaattcaaatgatgcgtatgtattttttagtgtgtttctagtgttaagatcgataaatgtgaatgaatgttgcctatcgattgctgtgctccattttaaatttaacggaattatgtatacatacacattttcgtttcaacaaacattccgatatttaaatgacgtataaagatcatcatttgctgcgttaaacctttttgtaaagactgtgaaatatcatagcatctgaagccatatttaatatcatgtatacgattttttgcactactcatcattttctagaagcggcagttgggattttacgaagggtgggttttcaagaacataagggggatattacaaaacagagatttatctttcaaaatacccgttgttcaataggaaatacagctggcagataagaaattgcccagagagagttaatgttaatgtacgttcatggtaaatttcagacacgttttacgttttgatgctcaaatacggattacgtataagtaaataaagatttccacattttcggaacttctttttccgaattccgaaaactgatgtaccattagagtttacacaattattaaccagtcaatcatatatattgttgcatactttcaggcgcttaaatgaagaaggcgcaaatttaaaatcaaaacaaaagcctaatgtaataccaaaatcatatagttaaaataaaagctagctagagagaaattgtcatttgataaatgtttattttcatatataaaatatacaaatagatactgtcgcgaaatctcttcaaacatgtcgcgaatttcgaagcgcgtctatgaggcgaagtccacttacccggatcgcaccaagtccgaggagaaatccttcacggaagtgagtgtgccgatcaagaagctggatacggcgctgctcctcctgagttcaaaggaggagtgtgtcctgctgaccattttcagccacataacggactttgcccgccgccaggatgtgaatgtgctggaactgaaggcccatcgcttgttggagctgttgctggagaaggatttgttcatcgcgtcggagaacacgatgatccgccgctttgctctgtacttgctcactgctctgctggacaacacggacatgtccacctatgagccagaacaagcggatcagatcctggagctggcgtgcagattctacatgaaagaggtggacgacttctgcatcgagtacttgacgtatatactcaatgtgtgcctgaaggatccccagatggcacatggcattgtcgaggccaccgaattcctggagaaatttaagttggtgttcataagttcggagaatccggacaccgtgttcaactcgattgaggcactgcataggatgctactggtccagagtgcagatcaaatgctggatttcacaacacagccggattttccggtagatcgtattatctgtgaggttaccaacgagttccaggagatccgcaaggcggcccttaaaacattgaagactctgctggcggacactggcgacgatagcgtcttcgaggcactgcatcgttgctacttcgtgctggagcagttggtcaaggtgttttgcgagagtccacaagggccggaggctgccgatgtcatcgaggttctggccacagctctgcgatccgagaagatgaccaagctgttcttcgagcagaacctcttcgaccaggttgtcgagcaggtgcgcaatcacatggacctcatgccgctggagatgcgctgcaccatcatatcgattttcgctgagacggctcagtacgagcagttcctaccaaggatgcacaaggccgaaatcgcagacatgttcctcacctgtttaatgcagaacaagccggctccggctgcctacgtcatccagggacttcatcgcatgtcacaccatccggaagcgctgcggcgaattgtggccgcctatcaggagggcgcaattcgcaaactggtggccatcctcatgtcgccggacgtggccatcaaggctcgggagcaggcgggagagtttctgtcccgtctccttgtggccgccttccgcgagacagctgcccagttgcaagagcaggacatcgctgttgttctcaccgcggtcattgcgcagggacagcccactctgtccattgatctcatcctattgctgctgacgatcatcgagagcctggcccagaaagaggaataccgcacaatcctcggcgagtatagttcacttaccgagcagcttgcccagcttctaatggtgattagtctaagattattgtgtatctcccaaccttaccttgaagtgattgcagcgttcctttgcccactccatcctggtgaacaacatcttccggtgcctgtgcactctaatcgacgaggctccagtgcgtgagactttgctggccaactacatagtctcatccatgaagcgggccctcaagtccctgtccaatctggtgaagacctcggtgaccaacttcattctacagaccacgcgctttaacgagttcatagatgcctacatcgaccgtgggatcatggaagtgtaagatataatatctgcacgtcactaaagtgtacttgaacccttcgtctatcccagtttgttggatttccagaagcacgccttctgcatttccacctggggcccggccatcgagagcatcctttccaagtgtcccactatgaagttcgccattcgcaactgcctcaccttcacggacatcacggccggcaaggacttttatgtgtcgcgcaggaagtttgaggacttccgcaaatttcaggacattctgcgcaacgattgctcgcctttggatgccgtcctggtaatgaactttgatcgtcccaagccgaatcagaacgatgtgatcgccgtgccgctgcgctgcttgagcacgatcacggacttgcctggagatcagggttggggctactgtaagcgacctggagataacaacttgccgcagtatttggaggcactcaatcagacactagcggtgggttgacctcttcccgtcggaactatatataatttatggtaacttttcccagatgcacggcttggtggagaatcccgagcgcgtgcgtcgcacaattgactttgagaacgtggccaagcggagcaagctgatcgcccaggcggtgaacgccgtgatgagcgagaatcttaagattctggacctgaactcaacggaggagtgctgccggaacacggtccgctgtcacctgcaagaactgcgccacgtgctgcacaccaacttcattccactgggcatggtgcgcagtggatgccagttcgagcgggcgattctcttcaagggcttggccgaccagatcggtcttccatgcaccttgcaacgcagtgtggacggtcgcatgctgtacaacgaattgccactgcccctggagccggagaaggatgtgcactgcgacaagaagacgctaaagtacatgccctggcggatgctgcgacccacacacgtggtggacctcctctacaacgtgggcgagctgtatcccatgcagagtcgccaggcgctgcagtacctgcgcctctactagttcccatgatctctaatgcgctcaccaaattatcctgtccaattgcttctcatatgctatatgcatgcttattaaaattgttttatcgggtattcctgctgttcgtcaagtcgtttattttgttataaatacacaatttaagtttaaatgtaataaaacaactgatatggcgggacctagcaagatctctggtgagatgtgatgggatctgttgggttgcctgcggtctctgggatctttatccggtgttttcattagaattttagggaatgcaatttaccagcaatacaactactttttaaagtagattaaaaaaagaaaacatcgtattcataattaaatacatattagttgttcacttacgtcaaatggtaaaaaagccgtttttaatcattttcgattgaccgtcggaaaattacatacaaatattaataatagcggtatcttatcgatagggaaaggtaataatgctgaaaatcctggtttgcatcccgactactcacggaagccactgcgcatgtccttcccctgttgcactgcgtctgacattcgtggtccaagtgtcagatggagagcagtggggttcacggaatgaggagcacgtaaacaagagaacctcgggccactttagattagccaagggattgggtggccagcagcaggatgatccggcccttcgtcacgttgctctacttcctgctgaccagttcgtccatcgtgttcacagcctgtgtgaataatggtgagtcctgcgacagggcgaccttggcgtagaaaaatcaataacatctcccatgtcatcttcgatgtccagtgacaggcaccagttcacccggacccggacccagtacctcgctgaccagcgggcacattcaccgcacggcggcagccatcgaaagggtgaacaaactgtggtgctttgcctgccacacgatggatgatggggaggcctgcgtggatgtggcggtccggaacgattccgcactgatgaaaaagtgcc

SEQ ID NO: 30902 - DNA, 2687 bp, DROSOPHILA
ctagagagaaattgtcatttgataaatgtttattttcatatataaaatatacaaatagatactgtcgcgaaatctcttcaaacatgtcgcgaatttcgaagcgcgtctatgaggcgaagtccacttacccggatcgcaccaagtccgaggagaaatccttcacggaagtgagtgtgccgatcaagaagctggatacggcgctgctcctcctgagttcaaaggaggagtgtgtcctgctgaccattttcagccacataacggactttgcccgccgccaggatgtgaatgtgctggaactgaaggcccatcgcttgttggagctgttgctggagaaggatttgttcatcgcgtcggagaacacgatgatccgccgctttgctctgtacttgctcactgctctgctggacaacacggacatgtccacctatgagccagaacaagcggatcagatcctggagctggcgtgcagattctacatgaaagaggtggacgacttctgcatcgagtacttgacgtatatactcaatgtgtgcctgaaggatccccagatggcacatggcattgtcgaggccaccgaattcctggagaaatttaagttggtgttcataagttcggagaatccggacaccgtgttcaactcgattgaggcactgcataggatgctactggtccagagtgcagatcaaatgctggatttcacaacacagccggattttccggtagatcgtattatctgtgaggttaccaacgagttccaggagatccgcaaggcggcccttaaaacattgaagactctgctggcggacactggcgacgatagcgtcttcgaggcactgcatcgttgctacttcgtgctggagcagttggtcaaggtgttttgcgagagtccacaagggccggaggctgccgatgtcatcgaggttctggccacagctctgcgatccgagaagatgaccaagctgttcttcgagcagaacctcttcgaccaggttgtcgagcaggtgcgcaatcacatggacctcatgccgctggagatgcgctgcaccatcatatcgattttcgctgagacggctcagtacgagcagttcctaccaaggatgcacaaggccgaaatcgcagacatgttcctcacctgtttaatgcagaacaagccggctccggctgcctacgtcatccagggacttcatcgcatgtcacaccatccggaagcgctgcggcgaattgtggccgcctatcaggagggcgcaattcgcaaactggtggccatcctcatgtcgccggacgtggccatcaaggctcgggagcaggcgggagagtttctgtcccgtctccttgtggccgccttccgcgagacagctgcccagttgcaagagcaggacatcgctgttgttctcaccgcggtcattgcgcagggacagcccactctgtccattgatctcatcctattgctgctgacgatcatcgagagcctggcccagaaagaggaataccgcacaatcctcggcgagtatagttcacttaccgagcagcttgcccagcttctaatgcgttcctttgcccactccatcctggtgaacaacatcttccggtgcctgtgcactctaatcgacgaggctccagtgcgtgagactttgctggccaactacatagtctcatccatgaagcgggccctcaagtccctgtccaatctggtgaagacctcggtgaccaacttcattctacagaccacgcgctttaacgagttcatagatgcctacatcgaccgtgggatcatggaagttttgttggatttccagaagcacgccttctgcatttccacctggggcccggccatcgagagcatcctttccaagtgtcccactatgaagttcgccattcgcaactgcctcaccttcacggacatcacggccggcaaggacttttatgtgtcgcgcaggaagtttgaggacttccgcaaatttcaggacattctgcgcaacgattgctcgcctttggatgccgtcctggtaatgaactttgatcgtcccaagccgaatcagaacgatgtgatcgccgtgccgctgcgctgcttgagcacgatcacggacttgcctggagatcagggttggggctactgtaagcgacctggagataacaacttgccgcagtatttggaggcactcaatcagacactagcgatgcacggcttggtggagaatcccgagcgcgtgcgtcgcacaattgactttgagaacgtggccaagcggagcaagctgatcgcccaggcggtgaacgccgtgatgagcgagaatcttaagattctggacctgaactcaacggaggagtgctgccggaacacggtccgctgtcacctgcaagaactgcgccacgtgctgcacaccaacttcattccactgggcatggtgcgcagtggatgccagttcgagcgggcgattctcttcaagggcttggccgaccagatcggtcttccatgcaccttgcaacgcagtgtggacggtcgcatgctgtacaacgaattgccactgcccctggagccggagaaggatgtgcactgcgacaagaagacgctaaagtacatgccctggcggatgctgcgacccacacacgtggtggacctcctctacaacgtgggcgagctgtatcccatgcagagtcgccaggcgctgcagtacctgcgcctctactag

SEQ ID NO: 30903 - protein, 867 aa, DROSOPHILA
MSRISKRVYEAKSTYPDRTKSEEKSFTEVSVPIKKLDTALLLLSSKEECVLLTIFSHITDFARRQDVNVLELKAHRLLELLLEKDLFIASENTMIRRFALYLLTALLDNTDMSTYEPEQADQILELACRFYMKEVDDFCIEYLTYILNVCLKDPQMAHGIVEATEFLEKFKLVFISSENPDTVFNSIEALHRMLLVQSADQMLDFTTQPDFPVDRIICEVTNEFQEIRKAALKTLKTLLADTGDDSVFEALHRCYFVLEQLVKVFCESPQGPEAADVIEVLATALRSEKMTKLFFEQNLFDQVVEQVRNHMDLMPLEMRCTIISIFAETAQYEQFLPRMHKAEIADMFLTCLMQNKPAPAAYVIQGLHRMSHHPEALRRIVAAYQEGAIRKLVAILMSPDVAIKAREQAGEFLSRLLVAAFRETAAQLQEQDIAVVLTAVIAQGQPTLSIDLILLLLTIIESLAQKEEYRTILGEYSSLTEQLAQLLMRSFAHSILVNNIFRCLCTLIDEAPVRETLLANYIVSSMKRALKSLSNLVKTSVTNFILQTTRFNEFIDAYIDRGIMEVLLDFQKHAFCISTWGPAIESILSKCPTMKFAIRNCLTFTDITAGKDFYVSRRKFEDFRKFQDILRNDCSPLDAVLVMNFDRPKPNQNDVIAVPLRCLSTITDLPGDQGWGYCKRPGDNNLPQYLEALNQTLAMHGLVENPERVRRTIDFENVAKRSKLIAQAVNAVMSENLKILDLNSTEECCRNTVRCHLQELRHVLHTNFIPLGMVRSGCQFERAILFKGLADQIGLPCTLQRSVDGRMLYNELPLPLEPEKDVHCDKKTLKYMPWRMLRPTHVVDLLYNVGELYPMQSRQALQYLRLY

SEQ ID NO: 30904 - DNA, 3485 bp, DROSOPHILA
ggaagaccagtggtggctggaagtgcttgtgcgggtactgagtgtcccagcgctggcagggaatgcccgacttggacacgttcattgtgcccatgtagaagcgtccgtttccattgcggcaatcgtctgtgaagaaaagggattctagcatcagaaagaccttcttgagggtttgtgataatgaagacttacagctcacttcggactccttgagttcggtgagaccgatgtaggagcagttgggtcgccgcatggaagcgttgtagtgcggcaaggaggagcagttgggtagccggaagtggccgcggctcttgatgaacatatttcgctccttcttctcctcgatgagcacccagtcgttgtagcagaactggagatgcgtggcctggcaatcctcgaagcagagaggagccttcaccgctcgaccgccctccatgtggcagttgggaaacgcataggcgcagagcattttctgtagcgaaaagagattaatgggatgagatgggatctctagatgtatcaatcgaaactcacctcggctgcttcgcgacacagacccgtaagatcggagataagctcgtcccagagcgccgtggtcacctgctcgttcttccacccgccagtgggatcctccagactgtaccacacctggccggtgaggtattccttgcacaccttgccgctgtacggggcgcagtagccgttctcctcccgctcgcgctcgtgatgccgctggtggtgtcgccgggtgacgggctcctcgatggcgttcagggagttcgcgtgcgtggcgctggcaaagagaaacacgcacagccccaggacagccaaattggccccccatttcagcaccattccccggagcacccgctcaaccacccccacccattgcccggcagccatggctgtgttttatgtatatgccttgtttagcgaaccgtttccaagcaaaatccttgcgagcactcataaactaaggcattttaccgccttacaccacaatattcaatctacccgaattttaaaatagattttaagaagtaagctcgaagtaagtcggcagaatatttgtttatttccgcgcacacagctcgacgacgccttttcaccgaataccacacaaagctgacgacgggatgtttcgccacccgtacttctcccttaggggtggtttcctgtcacgagcacagggttgctaaatgcgcggcaaaggcggccgaaagtcctgtgctcggcttgagagctccactggcgaaatgtttgtttttattgatattaatttttcttctgcttctcctcctccttcagctgtttctccctgagcttttcctccttcttcagctgtttctcccttagcttccgctctttctcccgcttcttcacgattgcgggatcatcgctgtcctcattggggtccttctcctccttcttcacctcttcatcgggaatttgttcaagaccctatagagaaagaagctttacacctgaggcagcaaaaaaaaatctgtaaggaactacaggaaaaaccaaaaacgaccatttcaactatcacttccgaactgcacgtttcgtttattcacttttgcacttaagcttaaacggaaaactttacttaattaaaattagttcgttttctcatccggtatggcatccagaccctgcaagaagattggttcggttttttgtaaatgatttaagcttataactcttcgaataagcgtaaaaaaatggatggtatgaattcgtaggaaataaagtaacattaactaccgccaccaatgatcaataaacaataaaaacgaaattaaccaagaaaactaagattttaaatgcaattaccttataatatagaaaactttaaaactaatattttattagtgaagaaagctagttcataacaccaaaaacaatctatttaacatacttcagagaaaaacataaacaacgaaaccaaaatgagcgtgcataataatgaagtgcgtgctgtgagataacaaaactgctgccaaaaatagggtaaaaacgtgatggttggcctgccgcacaaaaatcagttgtaggcaggccagactatagcacaacacttacgttcatcttgtagggattgtcggtcagtcggaaatcgcgctggtacataactcggctgaaacgctcgtccatgttgcgccggaaagcctgttgagcaaacgattagcaaacaattagtaactccgtagtgttccgtcgaactcgttgcgaaaagcaggcggttaaataatgtttaacagattccgattggtgcacaaacagctgcggttatataagaatttcgggctgctgggccagaaggccagcgtgggactcacattgccgatcatcagcttgtccaggccgtacatggcgtatatgggcaccgagaggagcgtggtgatgatcaccgcaccaggtaggatttcgaaccacatattgtcaatggaaatagattgttatgatatttactgcaagacgacacccagtgtgaccgtggatagtccgttccaatatacaggtagccttacaaaatataccaaaaacttgaatgttgaactagaggtgggccagtaacgataagaaagtaacggtgactgaattctattctgctactgcgtttagaaaaacgtcaatgttgatttgaaaatagtttttgaccaatagttggcttaaataatttgtaaatagatctgatatatctagtagagctgataaatgtacgcaatgtttataatcaatttcaaagctcgaaagtatatagaaaacaaattccagtgtaaagctgcgtgaccgttttacgctctattcgggttggtatttttcccaatgcacttttcgtacatccagctggaccatttttttgcactcagatctcggtcttaccaatccgattcttcattgaacagctacgaaggaattcgcagagagttctgagcgcagcaatagcagcaagaagactaccaacaaagagcagagcgacaaatcagcggagagcaggatggccaccagcggtattgtcgagtcatttcccacgggcgcactggtgcccaaggcggagacgggagtcctgaactttctgcagaagtacccggagtacgatggacgcgacgtcaccatagccatcttcgattccggcgtcgatccccgggcaacgggactggaggtgagttggcactttttcgcactctctataccggttacaaagaacttgtacagttattcttccaatatttacaatatttcgtcttacctattctattacgatttaatccttctactgtgtcacgactgcttcttactcccgtttctcattataaccgatccaatttcaatctgctcctacgcaacagacgctgtgcgatggaaagaccgttaaagtaatagagcggtacgactgttccggatgcggcgacgtggacatgaagaagaaggtgacgccggacgagaacggcaacattaagggcctgtccggaaac

SEQ ID NO: 30905 - DNA, 688 bp, DROSOPHILA
tcttgcagtaaatatcataacaatctatttccattgacaatatgtggttcgaaatcctacctggtgcggtgatcatcaccacgctcctctcggtgcccatatacgccatgtacggcctggacaagctgatgatcggcaatgctttccggcgcaacatggacgagcgtttcagccgagttatgtaccagcgcgatttccgactgaccgacaatccctacaagatgaacggtcttgaacaaattcccgatgaagaggtgaagaaggaggagaaggaccccaatgaggacagcgatgatcccgcaatcgtgaagaagcgggagaaagagcggaagctaagggagaaacagctgaagaaggaggaaaagctcagggagaaacagctgaaggaggaggagaagcagaagaaaaattaatatcaataaaaacaaacatttcgccagtggagctctcaagccgagcacaggactttcggccgcctttgccgcgcatttagcaaccctgtgctcgtgacaggaaaccacccctaagggagaagtacgggtggcgaaacatcccgtcgtcagctttgtgtggtattcggtgaaaaggcgtcgtcgagctgtgtgcgcggaaataaacaaatattctgccgacttacttcgagcttacttcttaaaatctattttaaaattcgggtagattgaatatt

SEQ ID NO: 30906 - protein, 101 aa, DROSOPHILA
MYGLDKLMIGNAFRRNMDERFSRVMYQRDFRLTDNPYKMNGLEQIPDEEVKKEEKDPNEDSDDPAIVKKREKERKLREKQLKKEEKLREKQLKEEEKQKKN

SEQ ID NO: 30907 - DNA, 2372 bp, DROSOPHILA
attatcttgtaggtccttggacactggtacgaggtagagcgctctttttaccttccggaaatcgcctccggatgcaccacctttcagtttgagccgtacaacaagggcgaacaatcgaagttttccaatttcaagctggctgtggccattaaaaacattaatcgcatgtatgattaaataatctaataatatatattgtgtgttagaagtgtttgtcctttttagaactggtaatccgaatgtgaacattggctatgcaacaccagaaaacagccgatcctccatcatggattttaaggtatctacaataaataatattaacaacacacaatatacacaattcctttttcctagtttaccacccgatttccggacgtgattgcccgactactgccaggttccggaaagtaccaggtgctatacacagactacgagaacttcgccatcttgtggtcctgcggcagcattggctcactgggtcactccgatcagatctggattcttggacgtgatcgggacttcgaggtggatatccgatccaaagtgtacgacgtgttgaagcggctctctctggatccggaaaggctcatcatcagcaaaaacaaacaatgccccgaggcgctgtaggaagctcctccagcgtctcatcccccatctatatgtttaagttcattcggttaaggaacaaattacatttgatgcctaatcaattaggctgctgtgatatcgaggagtgtgaatcggcggagagaggcgaagcaacgcaaatacagaaacaaaaaacaagagtaactcgatcgaggttttcaatatatgaactcatgcccgcattgccaattaacgcgggtgtcctaattaatttgcaataaatagaatttcccagtcatcggaacttagtcgtgatttaccaacggattgaaaaggttctggccggataagatgtcccgactgtggattttgttttgtctgattttccttgtggcccaggcacatatgtccgatgcgagaggaggtggaggcggaggaggacacggaggaggcggtcatgctggaggtttcggaggtggcggccgcggaggcggattcggaggaggaagaggtggttttggaagaggcggctttggaggacgtggtccaggattcggtcgtggcggtttcggtggaccaggccgcggaggctttagaggaggcggctttcgaggctatggaggatatggcggatatggcggatatgcccgatatggcggctacgctggatacgcgggagttcttccggttcctcttcccgtaccctatcccgcaacctataatcgctgctactacgataattactattataattactactactgctgatatgatacggttatagatggtttatttatacaaattacaatcaacacgttgctttagttacaaagattatgtaaagttacccagaaattcgggctgtagacagttctctaaatattccatatctcatttaacttattgttttgatggtctccggtgtctggttcctgtttgtccacccagtgatcagcgatcagtgatcagcgatctttgtggagtgcgactgcgatggcagtgcttaagcctagtcaaaaatattcccattaaaatgcaatctacatatgcgcatatatatataaacttaatctacagactagatatggatacgagacgttgatgatgcgttcgttgtggcagactattcgatcgagatcgagagatcagagggtataagtgtatcaaaatagtttctgtatcgattaaagaaagttatgtgaggaagcatcgaatgaaagacttggtaacggagctatctcttaaagatatggagttgtcatttatactaacttaatcacaaaccagatgcccctctgatctcaccttgtgcaaaattgaattcaatatgcataagagctggggagactcaaaaaagatagtcaaggaatgccacctttatgcaattcagaactattttatatgacctaaaccaaaagcggcaatgctgagatacacaactaaagatccaaaagcttattatcaagtgttaagatgatggcattcccttctattgtttttccacccaacctggcgtattcatgcgcttctattgcttgcccccaaggacaacggacgatcgttctgttcgacaaggattatttcattcacttctccggcaatcccctagagcattgccttgcactcgctctcggcgatgctgtgctggatgcagtggttgatctcggcgaagccaggtcgctcactgggcttgcggttccagcagcgacgcatcagcgcgtagacggagagcggcgtgttgtccggacagccgagtacgttgccctccttgatgtatttgatca

SEQ ID NO: 30908 - DNA, 372 bp, DROSOPHILA
atgcgagaggaggtggaggcggaggaggacacggaggaggcggtcatgctggaggtttcggaggtggcggccgcggaggcggattcggaggaggaagaggtggttttggaagaggcggctttggaggacgtggtccaggattcggtcgtggcggtttcggtggaccaggccgcggaggctttagaggaggcggctttcgaggctatggaggatatggcggatatggcggatatgcccgatatggcggctacgctggatacgcgggagttcttccggttcctcttcccgtaccctatcccgcaacctataatcgctgctactacgataattactattataattactactactgctgatatgatacggttatag

SEQ ID NO: 30909 - protein, 123 aa, DROSOPHILA
MREEVEAEEDTEEAVMLEVSEVAAAEADSEEEEVVLEEAALEDVVQDSVVAVSVDQAAEALEEAAFEAMEDMADMADMPDMAATLDTREFFRFLFPYPIPQPIIAATTIITIIITTTADMIRL

SEQ ID NO: 30910 - DNA, 2677 bp, DROSOPHILA
tcttggcgaatccctcctcaacgttcgccggtcgctcgatgagaatggtggccacactcccggaaatggcaatcgagccctgtccaacatccaggtcggcgtacagcggtcgacgacccacgcgcacagcatagttaagcaggatgcggcacagagtgctcttgcccacgtccatgggaccgacgaccatggccactggtccgtagcgatccttctcctcggcctccatgcggaactgctccagtgccgcatgacagttgacgtactgcaccattggcgtctccttggagatgtagcacacgtccattttgccggagacgtggagtacacagccctggtacgtgaagatggccaccttggcgcccacgccgaactcgtactgctttttcttcaccagctccgtgccgaacagctccgcaaatccactgaccagctgaaatcaacaatttgattataaataacgaatttattgtaatccaaaaaggtttttgcactacttacggacaccagcactttggcatccttctgctcgatttcaaagcgcagctcggagtcggactccagtgtgtagtctttgccttggtcctccgacatggctgtatcttcagtgctctgctaatgagttttaatggcgaaatagggtaattatccaaaaatttaggaggtaaacaatttcacatcagctgtgcactaacgatgggaattgatcgatacctgtatagtagtaattaatcgatttctaggggtataaatgatcactgcaaaataagttaaagtactggacgtctttaaacaattaccatgtattcccattaatattaattgtcacataaataaacatattttaattctcaactgctagaaatatatttagttagtcagtgcccattcaaatcggtatcggtactgggcattatttgctttgctttatacggtcacactgttccaaaaaagcgggaattctttaaaaatattttaagcaaataccgaaaatttgaaaatgccacgacacagcagagccaagcgcgcacccaggccgtcggcgaacaactcaaagtcgccgaacgacgacgacacggccttccgctcgccggagccagaagacggcaccgactcggcctcgaattcaccaccagccaactgacgcttcaggacaacaatcggcgttcctcgacgttgcgcagggacgccggacggaggcagccggcagcgagagacagctccaccagtggcgaggaggaggaccaggagaatcgctatcccacaaccagatcgccgcagacgcgtcgaatgaccgtgcagcaggaaagcaaaacgcgagcagcagggccagttgctgcgcaaaaccagaccaggcggcgcaaagcggccaatcccatgagcagagccaagagaatggatcgtgagatccggcgactgcagcaccatcccggcacactgatacccaagctgccgttctcgcgtctagtgcgcgagttcatcgtgaagtacagcgacgacgagccgctaagggtcaccgaaggcgccctattggccatgcaggagtcgtgcgagatgtacttgacgcagcggctcgccgactcctacatgctaaccaagcatcgcaatcgcgtcacactggaggtgcgcgacatggcattgatggcctacatctgcgaccggggtcggcaattttagtccaaaagagaagtttaggcttagtttagttatttgtttgaatagttgtgtatatccattgtagtgtttacgtaatgaaaagttcaaagagtttgttacatccccctttttgtaccaattagaattagctttaaataaatatttttgctcgacaagattgttaatttcactcaaatggttcaaagtaatcaattcactcaaataactcgtgatttttataagaatcgggatgaacttcaccaaataaataacatgtcattgagatacgtatagcatttcgttttatttctagttcttgctgcttgcttcgtctccattttcatgtacaacataaaacataatccataatagtttaactataaagttgccggccagcgccgtgcgagctacaaacatagggtttcagctaggattaggatgcataagatgtagtcacgcgaaacgcacttaaattatgggcctagtccaaggtaggtagtgcgctttttgaaatgagtcaccatttagaatgtcgcggcccatcggacgacctcgatgtatagagaactaagcacttaaacgagtaacatgaatagatagatagtttagatactggcctcaactgaatgtggcaactgcgctcgcacttgatctgctgtctttcgtgggatggatcgattgccaatgggtggttacaggacttaaacgtaagttgagctttcgtcaagctattttctggctggcggctctgctttctttttggcatttgcacatgtgttaattgggcgcagtaaaagtactgctgtctagatatattacaacttacacaatcatacaaaatataggtatttattttctttaaatatttagccatataattgatatccggagactgcaacagttctgtctcccagcagccttagccactttgccttctttgctacaacgacgcgttgtaaactatatcctaaaatgtaggagccacatcttgcttcgccctttcgctaacttcactatctgc

SEQ ID NO: 30911 - DNA, 677 bp, DROSOPHILA
atgccacgacacagcagagccaagcgcgcacccaggccgtcggcgaacaactcaaagtcgccgaacgacgacgacacggccttccgctcgccggagccagaagacggcaccgactcggcctcgaattcaccaccagccaactgacgcttcaggacaacaatcggcgttcctcgacgttgcgcagggacgccggacggaggcagccggcagcgagagacagctccaccagtggcgaggaggaggaccaggagaatcgctatcccacaaccagatcgccgcagacgcgtcgaatgaccgtgcagcaggaaagcaaaacgcgagcagcagggccagttgctgcgcaaaaccagaccaggcggcgcaaagcggccaatcccatgagcagagccaagagaatggatcgtgagatccggcgactgcagcaccatcccggcacactgatacccaagctgccgttctcgcgtctagtgcgcgagttcatcgtgaagtacagcgacgacgagccgctaagggtcaccgaaggcgccctattggccatgcaggagtcgtgcgagatgtacttgacgcagcggctcgccgactcctacatgctaaccaagcatcgcaatcgcgtcacactggaggtgcgcgacatggcattgatggcctacatctgcgaccggggtcggcaattttag

SEQ ID NO: 30912 - protein, 47 aa, DROSOPHILA
MPRHSRAKRAPRPSANNSKSPNDDDTAFRSPEPEDGTDSASNSPPAN

SEQ ID NO: 30913 - DNA, 4125 bp, DROSOPHILA
atagaacaacgatgataatcagcaagtatttcagctattcgtatatacagtttgtcaatataacctcattgtatacctgcgattaactacattttgtcggctttctttaaactttttcgaccattacagagctatagtttactttacactactttcgattagaattgctgggactatatgcgttcaaaataatgattttcattgcccaaatgaagaggagcattagttttaaagaggattttacgtggtgatcacaacgcttaaggacacttgcagccattcaagtgccttgcggcaatatccttacgatccaatacgatctggttaagtgacgaaataatgtcggtaatatttatgggctaagatccgaaactttgggtgggaagaattgaagttataatcagtgggtactagtctaaattttgtagaacacccaatttagcgactttattcctcactagataattgcaaactaaaatacaacttaagacttctattcaaaattgtgaacgcttatagaccctgtatatatttttagattctatggaatggtgtttatattccacgtaccatttggcaccaaaagcctatcaaatattccctttttttgtcagataacttgtgtgtgtgctaatgtgggcaacaattttacaagattcaatgattatatatatatatactttatttaactttaacaacttgaaatatgaaattgatttacttaaggaaggtgggcttccgttgtggagtagtgcccattaattccgtccaatttctacgccgtattgccaaaaagttttaatggatttcagtagcgagaatcatatagacagaaccgaaaaccaaagttacctgggttttcggttctagacctatgaaaaaaaaatttatttatttggactcatttgaatatattctaaaaaataaaatccaatttatatgattggcacgctaatttcgaactcgcataccttggaaaactcaaaattatcagccccaaatgaatcgtatatcgagtgagttgctgttccaggttcaaagcactgtcaaaactaattcccagggccttcttttgtcccagatccttcgcgtcgccaggcgagtgacgtcttcattggtgaccccttcaaaattcactcatacaactttcgctatgccgacaagccattttatccggtccagaactatcaaagacctccggcggcaccgactccgccggcactggtgaagaaggcctccttccagaccttctaccacaatcccagattcagccaggatcccgagtacattccggcaaaaaagagtccacaaactagctcctataggcgtcgccttttgctggaatctatggatatgcccttgggatctacggtgacaacgccggagagacagagtgtaccggtggctccgcagacgaagcgttctcccacagccacggattcgccgctcctcaggacatgctgtcaaagtgtgcgctacgaggctatgagacggggtccaagcaacacgactttgtgccagagtaccacgaatctcatacgatcagctggcggcggtgtgccttctacttcaaccaccaccttctccatggactccaacgcccatctgcagaacagaagaagcggctgcggtatcagcatcgacatctgcagtgtgggttcgcaatctgaggtggacaacaatgtgagcatccagatcgcaacggatgcctatctgctgaacaatacggacaaggtgaggaccaagtccaaaccggtgcgctgtacgcccagatccagcggcacctttggcatcgacaagcgactgtccaagttcaatgtgagcgagacgaaacctcggacgagtccggaatgggagctccggcagagagagaaggcacgagaagcggagcgccaacaaaaacgggagcgggatcgacagttgttggaggaccgacgcttggagcaggagagggaacttcaggaggagcgagagcgtgcccgccagcgggagcgagatcgtgagcagctccgccagttggagcgcatgcgagatgaggagcgactcctagagttggaagtggagcgcgagaggcagcgattgcgggaactagagcgggaaaaccagcggcacagagaatacgagcggctgtgtgccctccaggagcaggcgcgtcgggagcaaatggatctactgtgccaagagaacatacctccccgaccgtcagttccaatgacctcgcacttgtacacaaccacctctgatgatcgtttgcccggaatggccttttgtgatctatcgtcccgaaggtcacgtcgattggagaatccgaccagaccgaaagaaagacggaagactagagtatgtcaggatcctagaagtgtctcgtccgctacccgttcacttactcccccgccgatccttacccggaatagcagctccccatcaccctcttcagaagcgccgtcttctacacccacctcccgttcctcatctccaaatcgcaggtcaaaccgctgcttcagttcaacacctaatcccgattcccaacgattccctcctacaattccaagagatctagttcgcagtagttcgggaacttcgaatggcaatgtccatgtcacagtgaccaccaccgggcgacggagcaactgcagcatgaggcgttcatccaatgaccgggctagtgagcaaaagcagctaaatggaaaccaaacctgcgtcgcctgtctgaataatatgcccattaggataaccacatctcggtccagggatacggatctagccttcagtctgaaccatgtgaggatgaggggatcatcaccagcgcccacggaaaggagcagcagtcaggaaagccaagattcctgtcaggttaacatcagcgtgtatgcggataaactgcgtttgatgcgtttataataatataagggaaaagtgggggattatatgtgtgatttttggaacagatcatctctagaatatagagctaagctgttccagaagacgctcatatactcccctaacttttctatattagaatagcgccaaaattagttgtatcattgctgtttttttgacttttaaatgttcttaactaagctaaatccgaaaattatattccaaactatagtttctatatgttcctcgcttcttgggattcctccattaaatcattgcaattgcgggcgtctgcttgttggatcggcaattaatccttccctgctgggagtagagtcttccaaagaaggactctcacaagctcattaagctcttcgtacagtcacatcatgctatatctgtacttaaaaaaaaaatacattttgagatagtttccaaaccttttggccactaaattgcctccaatatgtagtagggttcttaggatccttacttatttttatttctttctacccgtctcatcgaacttctggctcatcacagagccctgctttcactcaactttctctttctttatcttcacaaatttgtgtgctctactttaacatgtgcaaagtttttgggggaggttacttcttgatatggtataatactatagtgcaacttgggtaaaacattgaacaagaataacgatttggattggattttcatatgatattactgatattgttggttgtggttacggttactctctgatcttttcttttttttcttgattttattacccgttttttttttttttgatttttggttgcacttttggcaacattgcgttgtagttaaatcgtttgcttattcgtcttcctcgtagttttgataggttacataacgtacctgagcccgatcgcgtccatagatcaaagactgcaatcacagaaatgaaatggaaaagggtatgggttagtctaatgcatttcctagaatgattttgtatcgtgcaaaatgaaactcaggcagcgctttaaataaaaattaatagttttattacaaacaaattaagctgaacttagggctaaaaacaatgataatgactaagtatacgaaaaataataataaattaaaattaagcaatgtatcgagactcaaagcctctcgctctcgtacgcctcgttcgtcctgcccgcctcggcatccgaatcgggaacagatgcaccatgcatgatggccgggcaggatgcggtcatc

SEQ ID NO: 30914 - DNA, 2060 bp, DROSOPHILA
atgaatcgtatatcgaatccttcgcgtcgccaggcgagtgacgtcttcattggtgaccccttcaaaattcactcatacaactttcgctatgccgacaagccattttatccggtccagaactatcaaagacctccggcggcaccgactccgccggcactggtgaagaaggcctccttccagaccttctaccacaatcccagattcagccaggatcccgagtacattccggcaaaaaagagtccacaaactagctcctataggcgtcgccttttgctggaatctatggatatgcccttgggatctacggtgacaacgccggagagacagagtgtaccggtggctccgcagacgaagcgttctcccacagccacggattcgccgctcctcaggacatgctgtcaaagtgtgcgctacgaggctatgagacggggtccaagcaacacgactttgtgccagagtaccacgaatctcatacgatcagctggcggcggtgtgccttctacttcaaccaccaccttctccatggactccaacgcccatctgcagaacagaagaagcggctgcggtatcagcatcgacatctgcagtgtgggttcgcaatctgaggtggacaacaatgtgagcatccagatcgcaacggatgcctatctgctgaacaatacggacaaggtgaggaccaagtccaaaccggtgcgctgtacgcccagatccagcggcacctttggcatcgacaagcgactgtccaagttcaatgtgagcgagacgaaacctcggacgagtccggaatgggagctccggcagagagagaaggcacgagaagcggagcgccaacaaaaacgggagcgggatcgacagttgttggaggaccgacgcttggagcaggagagggaacttcaggaggagcgagagcgtgcccgccagcgggagcgagatcgtgagcagctccgccagttggagcgcatgcgagatgaggagcgactcctagagttggaagtggagcgcgagaggcagcgattgcgggaactagagcgggaaaaccagcggcacagagaatacgagcggctgtgtgccctccaggagcaggcgcgtcgggagcaaatggatctactgtgccaagagaacatacctccccgaccgtcagttccaatgacctcgcacttgtacacaaccacctctgatgatcgtttgcccggaatggccttttgtgatctatcgtcccgaaggtcacgtcgattggagaatccgaccagaccgaaagaaagacggaagactagagtatgtcaggatcctagaagtgtctcgtccgctacccgttcacttactcccccgccgatccttacccggaatagcagctccccatcaccctcttcagaagcgccgtcttctacacccacctcccgttcctcatctccaaatcgcaggtcaaaccgctgcttcagttcaacacctaatcccgattcccaacgattccctcctacaattccaagagatctagttcgcagtagttcgggaacttcgaatggcaatgtccatgtcacagtgaccaccaccgggcgacggagcaactgcagcatgaggcgttcatccaatgaccgggctagtgagcaaaagcagctaaatggaaaccaaacctgcgtcgcctgtctgaataatatgcccattaggataaccacatctcggtccagggatacggatctagccttcagtctgaaccatgtgaggatgaggggatcatcaccagcgcccacggaaaggagcagcagtcaggaaagccaagattcctgtcaggttaacatcagcgtgtatgcggataaactgcgtttgatgcgtttataataatataagggaaaagtgggggattatatgtgtgatttttggaacagatcatctctagaatatagagctaagctgttccagaagacgctcatatactcccctaacttttctatattagaatagcgccaaaattagttgtatcattgctgtttttttgacttttaaatgttcttaactaagctaaatccgaaaattatattccaaactatagtttctatatgttc

SEQ ID NO: 30915 - protein, 611 aa, DROSOPHILA
MNRISNPSRRQASDVFIGDPFKIHSYNFRYADKPFYPVQNYQRPPAAPTPPALVKKASFQTFYHNPRFSQDPEYIPAKKSPQTSSYRRRLLLESMDMPLGSTVTTPERQSVPVAPQTKRSPTATDSPLLRTCCQSVRYEAMRRGPSNTTLCQSTTNLIRSAGGGVPSTSTTTFSMDSNAHLQNRRSGCGISIDICSVGSQSEVDNNVSIQIATDAYLLNNTDKVRTKSKPVRCTPRSSGTFGIDKRLSKFNVSETKPRTSPEWELRQREKAREAERQQKRERDRQLLEDRRLEQERELQEERERARQRERDREQLRQLERMRDEERLLELEVERERQRLRELERENQRHREYERLCALQEQARREQMDLLCQENIPPRPSVPMTSHLYTTTSDDRLPGMAFCDLSSRRSRRLENPTRPKERRKTRVCQDPRSVSSATRSLTPPPILTRNSSSPSPSSEAPSSTPTSRSSSPNRRSNRCFSSTPNPDSQRFPPTIPRDLVRSSSGTSNGNVHVTVTTTGRRSNCSMRRSSNDRASEQKQLNGNQTCVACLNNMPIRITTSRSRDTDLAFSLNHVRMRGSSPAPTERSSSQESQDSCQVNISVYADKLRLMRL

SEQ ID NO: 30916 - DNA, 3323 bp, DROSOPHILA
aaagttcagcgaaagtggaagtctcaactgacctggaatcccactcaactgtcacatatgtcggccatgtggacgagccaacatcatggcaaacatgccatttgtgccatgcaaccggaaatatatgcaaatttggcaacatctaactaattggggttaaccacttgccgattaagtagcgaatttagtgctgccgtgaaaaaaaaaaaaatgttgcatagtaattccccaagctggcagccccaacaactcattaaactgtctcccgagtcttttttgacataaaaatgataatttcggaaaaagcacgtgcagccggggtcagaaagtggatggcgtgggatgttaggggttagaaggcggattttttggggcaggtggagcagccagcggaagtcactcggtcgcttcggttgcatttcgcgtgtcgaagacacttaaaccgcaatgccaaaaggaaggcgactcgggcagctagacaaaccaaacattccccatcgacgattcagggctacgggaaatgtgatagactcatgggatatcagggatttaggtggaacagaaaactatatggtattaggattctaatctgttactacatatagagacttatcaaaaaaataaagattattataaatccagtacgaagcatatatatatatatatgcttatatgcttcctttattcaaatatactagcttttgcagcttctttgaaaaaacttctaccctttttagaaccatttcccgcagccctgtggctccgtccgcaggtcacccagatacatgacttcgacatgccgggcgacactggcgtcgtcgtcaagccaaacagaagcggcagtgaggcggcaactggcgaagcaaccagtcatccaccggcgacgaggaagaggacaactcaacgcccaaactggggacgctggagtacgcttttgtttatccgtttaatatgcacaggatttaattagccatagaatacgcggaaggagcgggagaaaatgcgacccatttgggagtcggccagcaggccgctgtttgtgcgctccgtgtggcaggaggcgatcgggaggcgtcacttcatcctcgactacgagccgcgacagaggcagcgctggaagcgacagaagaccagactgagaggtgagtgctacataatcttatgtcgaaacggaatcgagtcctttcaaaagttacgcccataattggacatcgattttgatacaaaaagtttagaagtttagaatttaaatgttatacaacatttgaagttatctttgaatccatctataaggataaggaaaagaatagctaatataaccatcatttgtattccaggcaactaccagcagtcggaatcctacgagattctcgagcagtccgtggaggacagtgtggagtacctggacgagtaccttttgctggacgccaccaagctgacgctgcagcagcaacaatcgctgcccacccttggtgggcgtccgggccccgtaccctcgacgggtggaggtcaacgaggagagcagcgccagcagagtcgccagtcgaaacgacgagcttggctgctgagtcgcgggcgcacctataacatggaacaccaccacatcgaccatcagtcgcgcaggagttcgctacaggatgcaactagcacgctctccacgacggcaaataatcccgaggagcgtctggccgaaagagtgctgcactggttggacttggcaggacgcactgatatagtgaaagagaaggtggtcactccgccggccagtggtagtgcccagttggccagatcagcgcagcggatgcagcgcagtcaccatcgcagcataagtctcaagcgcgtggcggctgcggcagtgaatcaccaccgatcggtggccaggaagcccagcgccaagccagcacccgttgcccaacaggtcaccagctcctccctgaccgcctccaatgccaagcccataacgattatcttcaacaaggagggcgtgcccgtgcgcctcaatagacccgctcgcaacatcgatctctgcaccctgagcagcagtgccagcaccacgagaagattggctggtcagttggcctcggcgcgcctgtacagcggagccactgcatccccactgccggaggacagccgtacgccaccgctcagtggccggggaatgggatcatctgccgcctccgatagccggaaacagctgcacatcttcatgcccagtctgcccaagaagggtttgctggcagcgggctccacaacgggcagtggcatgggtggctctggcgaggataacctgagcaccagcttcagtgagctgtgccagttgtagacagtcttactcattaaaatgcctgtccgaaggtcatcgataaacaaaatgtcttaattaaaaatttaatttaatttgtagaactttttagaacgattttaatttactatgaataaaaggaatcattattttgtttcccttttaatgcaaatagtatatcattaaatttaggaatggtaaaataggaaagactttcacttcttttgtactgcctagtttcactgacttttgcgtcgtttgtgcgattaattttggaaagatattgtttgatatatttctaacctgtcaaacttctaattgttatcctttcccaaaataacagtactaacaaaaggttgagtttgtcaagaacaacttaataatatagtatattaatagctaaactactaaagtaaactaaattagataatttcgttgactttgtatactctaaccgcaactaaaaaattttcaaaaatctaataccaattaaaatggatacagctatggtagagtacagtgtggaatctgtaaatgagccataattttttggcattattaaattcaattatttttttacaagtcaagtacctttaaaaattcgtcttgccccatttttctaagggtatttcttgtgcttcggaggactacttattaatatcacacaatcttttcttggttttattgattttcgtttttgttccgttgccattgaaagtttcttttgtttgttttttttttattcgtatttggtgagtttatttttggattaccccgaaaagtcggcggcatgtgccacgcccatttccttttgttttgatttcgcttctgacttcattgttgattcttttagccagcgggggcggtgatcctgcggggattcccacgtgaatggagcgtaatcaatgtaattgtggtaatattgcatgtttaacaatggcataaagttgaagttaaagttttaccctaatgaatgtggtaattttgcgcagaaaggcagagagtttaagtttggaacgga

SEQ ID NO: 30917 - DNA, 1128 bp, DROSOPHILA
atgcgacccatttgggagtcggccagcaggccgctgtttgtgcgctccgtgtggcaggaggcgatcgggaggcgtcacttcatcctcgactacgagccgcgacagaggcagcgctggaagcgacagaagaccagactgagaggcaactaccagcagtcggaatcctacgagattctcgagcagtccgtggaggacagtgtggagtacctggacgagtaccttttgctggacgccaccaagctgacgctgcagcagcaacaatcgctgcccacccttggtgggcgtccgggccccgtaccctcgacgggtggaggtcaacgaggagagcagcgccagcagagtcgccagtcgaaacgacgagcttggctgctgagtcgcgggcgcacctataacatggaacaccaccacatcgaccatcagtcgcgcaggagttcgctacaggatgcaactagcacgctctccacgacggcaaataatcccgaggagcgtctggccgaaagagtgctgcactggttggacttggcaggacgcactgatatagtgaaagagaaggtggtcactccgccggccagtggtagtgcccagttggccagatcagcgcagcggatgcagcgcagtcaccatcgcagcataagtctcaagcgcgtggcggctgcggcagtgaatcaccaccgatcggtggccaggaagcccagcgccaagccagcacccgttgcccaacaggtcaccagctcctccctgaccgcctccaatgccaagcccataacgattatcttcaacaaggagggcgtgcccgtgcgcctcaatagacccgctcgcaacatcgatctctgcaccctgagcagcagtgccagcaccacgagaagattggctggtcagttggcctcggcgcgcctgtacagcggagccactgcatccccactgccggaggacagccgtacgccaccgctcagtggccggggaatgggatcatctgccgcctccgatagccggaaacagctgcacatcttcatgcccagtctgcccaagaagggtttgctggcagcgggctccacaacgggcagtggcatgggtggctctggcgaggataacctgagcaccagcttcagtgagctgtgccagttgtag

SEQ ID NO: 30918 - protein, 375 aa, DROSOPHILA
MRPIWESASRPLFVRSVWQEAIGRRHFILDYEPRQRQRWKRQKTRLRGNYQQSESYEILEQSVEDSVEYLDEYLLLDATKLTLQQQQSLPTLGGRPGPVPSTGGGQRGEQRQQSRQSKRRAWLLSRGRTYNMEHHHIDHQSRRSSLQDATSTLSTTANNPEERLAERVLHWLDLAGRTDIVKEKVVTPPASGSAQLARSAQRMQRSHHRSISLKRVAAAAVNHHRSVARKPSAKPAPVAQQVTSSSLTASNAKPITIIFNKEGVPVRLNRPARNIDLCTLSSSASTTRRLAGQLASARLYSGATASPLPEDSRTPPLSGRGMGSSAASDSRKQLHIFMPSLPKKGLLAAGSTTGSGMGGSGEDNLSTSFSELCQL

SEQ ID NO: 30919 - DNA, 2426 bp, DROSOPHILA
tgaagatccttttttttgtcaactatttttatgggtcttacgacagttaaaacctaagcggtcataagctaattatggacattacatatccatcagtctgatgggatacaacaaccgtcagccgttgcgaaggagatgccttaaatatccatcaagcatcatgcaagcaacacccaaatctaaacctgccacacgtggcaagttgtcgttgtcgtcgtcattgtattattttatgattgacgcgtcggtgtttagattcgatttcaatattaccagcgatacctaaatacaggtaaaaaggaaatccagtaaagcgaaattatagaaaacagaggaagatttaaaagatattcgatcctgaagaattcgctctatttttaaagcagacgatatacaacaggaactgctgtctttcgttatatacctcctcttaagatagtaatactaacttatagttattttctgtgcattttggagatacatcgcaatagctatagatggtgggggataagcgcaaggctcaatgagtcattgcgtctggcatgacagcgaaacgacaccgagaaagccgcacgtttgtgacctttctggaaatgggtctggttgggtggtagccacggcggaatccgaatccgtggccaacggaaaaacggggaaaagttttcgacttcaaggcaagcgacaaagacaaagggggagcaattacttttggaggcaaaaaaaaaaaaaaaaactttggcccgcctgacgtttgacttttgcccgcttcgttcacggcaaaagaaaatgcgcaacaatattgggtgtattttggattgcacacataacaggcctaaacggacttatagacaagtcgttccgcctgccgtgacttattcgcgtttctgcaacggacgcggcaggttctcgcggcgactggagttccacttttccccattgttggccacctaacgagcaaagttttttcacggcacacattaattttccggccattagtggcatgtccaccgacgaggattccctgggcagtcccctcaagccggccacgcccacacccggcgagcgcgaaccgacgcgagaacgccatcgaggcggtcgatctggagcctcggatctgctgcgccatcagcagagctttgaggctcgctacagcgggatcatccagaagcaaatctgggagacgagcatcaacaaggatgtgctggaacgtcagctaaatgcgtacttccctttctccaggagcgcctcgctgaccaaggacgcatccggcggattcgatcagctcctggcgccggcgacaagtggaactggtccgaagtctcgatccctggccaccacgcccaccaggcgaccggcgggcgtctgtctggagaagctggagacggtggatgtggcctccctcgatcaacagaagcaagcgaagtaaggatgcccaaggattatgagtattctatcattgtgatgtccgtaaggttgaaaggcagttttgaacatttttagtctaagttaggataggttggatattttggatagaccccaacatataattcagtatatttaatatataatatctgtgaaaagacggaactagtgtttctttttggtgctctaaactgaaaaattctacatttacttcaaatgttagatttaaaaatctaatgaacaaagcaaagaaaaaatccaagctccctaaaaatgaaaaaaatttctaatatacgtagttttaagatttattactaacgtgtaagctgcaagtccagtccaatcatcctgaaatctattgtttatttggcacccctacaaattgtctacaacactaaaaacaatcaatttgtatagttcaaccaatttcgatgcaaaatactccttttattggctaagtttaagtccagaacattcccggatcaaagtaagacccatttaagctactattattcaatcttcttcaataaaacgagagcttattgcatattcaatttgttatcgagtcaaacggatagcaccatggtccatataaatctccacaggctcactgctaaatctaatttacgacaatattatgcgagaaaagaaaatgctgcgggggggtgtggaaaagcgggggaattgcgtagggcagagatcaaatgtaataatcaaatgtatttgcagcaattttcacttcagcaccttgagcgcgaatcgggaaagcacttaagtggaaatgccgccagtcaaacgctaaaagcccagccgcttttccccttttcctttttcccatccgtttatcctgtcaactggggggtgggaaacttctcctatggagctaatagtttttccacttttcctttgactttcacttccgtgccatctcaacaagttgctcgagtggttcggctatttcctcttggtttttcgcccaacttgttgatttaaattcatgaacg

SEQ ID NO: 30920 - DNA, 426 bp, DROSOPHILA
atgtccaccgacgaggattccctgggcagtcccctcaagccggccacgcccacacccggcgagcgcgaaccgacgcgagaacgccatcgaggcggtcgatctggagcctcggatctgctgcgccatcagcagagctttgaggctcgctacagcgggatcatccagaagcaaatctgggagacgagcatcaacaaggatgtgctggaacgtcagctaaatgcgtacttccctttctccaggagcgcctcgctgaccaaggacgcatccggcggattcgatcagctcctggcgccggcgacaagtggaactggtccgaagtctcgatccctggccaccacgcccaccaggcgaccggcgggcgtctgtctggagaagctggagacggtggatgtggcctccctcgatcaacagaagcaagcgaagtaa

SEQ ID NO: 30921 - protein, 141 aa, DROSOPHILA
MSTDEDSLGSPLKPATPTPGEREPTRERHRGGRSGASDLLRHQQSFEARYSGIIQKQIWETSINKDVLERQLNAYFPFSRSASLTKDASGGFDQLLAPATSGTGPKSRSLATTPTRRPAGVCLEKLETVDVASLDQQKQAK

SEQ ID NO: 30922 - DNA, 3264 bp, DROSOPHILA
tatagatttgttggggtattttaaattgagatatttggataacttgttagccattttagacttaatagatagtttaatcgttttgcattaacattcttaaagctacccttactaatgatcttaattattgcagctcagcggcaatgctgatttgaagaacctgtacgagggcctcaccatgacgcgcgcctcgctgctgcaggtgttcaagcgacacggactggagccactggatcccatcaaccagaagttcgaccccaatcagcacgaggcgctgttccagaaggaggacaagaccgtcgagcccaacaccgtggtggaggtgaccaagctgggctacaaactgcacgagcgttgcatacgtccggccttggtgggcgtgtcgaagtgttgatagccatgcggctgcccagaggcatgtaaaattcccagtactccccccccccccctaaaccaatttacatggcgtgtgtctctcaattgtttgcaatttgttttccgctgcaaaattcatgtacgtaaaccctgtgtaaatacaacctatcccacaaacgcatccttcgggcaaagcttgcgaatttagaattcctcctagtttctaagagatctgtgactggatttgatggccacaatttgtaccatacgcgtggccatcgagtgttccactttaaggtttaattacgataataaaacatgttttagtttgttgaaatataccacggaaatttgtatttcatcctcatctggaggagactctgtttatctaggtctctttttagtttcctttgattttccccgttttccttagcccttgaaattcgaatccctcatgaaaaaccatttcttttgttaacaaaaaccaggtagcgaagcgtaatcgcattcctgctcgtcgcgtaggtggaaaattcaatggaaatgcgtgattttctatgacccagcaggtaggcttccaagcacgttcccatgaattcagaggtagcacagatggtgggttccctaaaacgagatttgcgccagagttgaaagtctacttcaaacggttttgaactatctcgttggttagttgtccttaaacatttgaagtgaacggtatgattggtgtgctaatgcgttttctctggtccttggccatggtgcagtgcatccaggctagagtgtcgatgctgcctcgtttttatggacaagacagcgctgttatagtggacatcaatagaaaattcccacctagaatggactccaagctgcagaatgccctgtactacaacctgccggtctacaaactgataaagccaaccacaacaactacgacaaccacgacggctgctccaacctctggctatcctgctgatctcctgaacattgctcacaacaagctgggcctcaaagatctgcccaatctcgaggagctgggcgagatgattggtacggatggtgccagcgagaccatagactatatacgcacgctaactggaacggaggagggtttggccctgatgaaacagtatctggatgccctgcacttcgaggaggcggaggaggagaatgtggccgaggaacaagagaaggctgaagacgacgacgacgatgatgatgacaacaccatgggcaatgccagctacgatgagatgccgcaggaaaaatccaccaccactgcagatccccgtcctgagctgagtttaatgcagcgtttcggtgactttgtgaagcagtacaacctgtggtctggtcaggtcaccactaccaccactcctgctccgttcatcgctcggccaagtggctctttccagcccgtctttgtggctcctcctcctgctggcttgaaaccttttcgtcccatcctggttaggcagccactgccgtatcactatcccattcccctgcgtcccgtatcgctggccaccacaaagccaatccaggtgaccaccaccaccacgaccacaaccacacctgcccccgtgaccaagccacatctcaacacgcccaagctgatcatgcaagaggatgcggagggcaaatactcaacattgcctccgtacatccagcagttggccaaaatggccaatatttcgccgcaagtcgtggaaatctttctggagcggcagcccaagttggcggaactggccaagcgcctgagcaccctggcactcagtcccgaacagacccaggccatggacacccaggtgctcaaggccgtgcagcacgcactgagcaacaacgatgatcttcagcggctaatcgaggcgtcccaggcacttaagtaggcggaatgtgtgactagtcttaagaccatttcaaatgaaatacattttccataaaccaactagcttagtgatctcattttgtaattgattccatatataacactaaaaatcaaatgagttttaaagtaataatgggggtttatttcgaatgtgtatgatcttacaataaatctattgcagattgtatttatgagtacattcatattattatgtttaaatcaggaatttcataagaaaattggatatgatattattatgggtatacatgcaagcagatttgagagtttcccttcaaaaaaaagtaattttaataatatgtgaaatgccacatgggtttttaatgggttaagcacgttccatagcatttaacatagattttcatactgtggttagtacctcaaaacgcaaagcttcttatccgcagatgttagtcaacacgttattaaatactaccgttttttttctagcgtttattgcataactgtggcctattttgtgaattcaaccacagtttaatatctaacgctttttggttaatagaattcataattgttcaacaatttaaatgaaaagcagtgccaaaaaattagcaaaacgtttcggtaagattgttcacatgatttctatatgtccttcaaaaatagcacccaattaccctggaaaatgggcaaatgggcgtgcatgggacaacgcacatttaattaaccaatttatatacatatacgtatatgtatatatgtatgtatgtatacctaattgtttgacaatttaaaggaaatgcaaggcccacgaaataggccagacatttggtaagattgtcgatgggttttctatatgtccttcaaaatagcactctgctaccctggaaaatgggcagttgagcgtgcattggacaacacgtggttctgaaagataagagatgaggccatctccacgagcaataaaccgaattggattgagacgaagtgaaaaattaatgtgcggccagcagtgagacctt

SEQ ID NO: 30923 - DNA, 1264 bp, DROSOPHILA
taaaacgagatttgcgccagagttgaaagtctacttcaaacggttttgaactatctcgttggttagttgtccttaaacatttgaagtgaacggtatgattggtgtgctaatgcgttttctctggtccttggccatggtgcagtgcatccaggctagagtgtcgatgctgcctcgtttttatggacaagacagcgctgttatagtggacatcaatagaaaattcccacctagaatggactccaagctgcagaatgccctgtactacaacctgccggtctacaaactgataaagccaaccacaacaactacgacaaccacgacggctgctccaacctctggctatcctgctgatctcctgaacattgctcacaacaagctgggcctcaaagatctgcccaatctcgaggagctgggcgagatgattggtacggatggtgccagcgagaccatagactatatacgcacgctaactggaacggaggagggtttggccctgatgaaacagtatctggatgccctgcacttcgaggaggcggaggaggagaatgtggccgaggaacaagagaaggctgaagacgacgacgacgatgatgatgacaacaccatgggcaatgccagctacgatgagatgccgcaggaaaaatccaccaccactgcagatccccgtcctgagctgagtttaatgcagcgtttcggtgactttgtgaagcagtacaacctgtggtctggtcaggtcaccactaccaccactcctgctccgttcatcgctcggccaagtggctctttccagcccgtctttgtggctcctcctcctgctggcttgaaaccttttcgtcccatcctggttaggcagccactgccgtatcactatcccattcccctgcgtcccgtatcgctggccaccacaaagccaatccaggtgaccaccaccaccacgaccacaaccacacctgcccccgtgaccaagccacatctcaacacgcccaagctgatcatgcaagaggatgcggagggcaaatactcaacattgcctccgtacatccagcagttggccaaaatggccaatatttcgccgcaagtcgtggaaatctttctggagcggcagcccaagttggcggaactggccaagcgcctgagcaccctggcactcagtcccgaacagacccaggccatggacacccaggtgctcaaggccgtgcagcacgcactgagcaacaacgatgatcttcagcggctaatcgaggcgtcccaggcacttaagtag

SEQ ID NO: 30924 - protein, 389 aa, DROSOPHILA
MIGVLMRFLWSLAMVQCIQARVSMLPRFYGQDSAVIVDINRKFPPRMDSKLQNALYYNLPVYKLIKPTTTTTTTTTAAPTSGYPADLLNIAHNKLGLKDLPNLEELGEMIGTDGASETIDYIRTLTGTEEGLALMKQYLDALHFEEAEEENVAEEQEKAEDDDDDDDDNTMGNASYDEMPQEKSTTTADPRPELSLMQRFGDFVKQYNLWSGQVTTTTTPAPFIARPSGSFQPVFVAPPPAGLKPFRPILVRQPLPYHYPIPLRPVSLATTKPIQVTTTTTTTTTPAPVTKPHLNTPKLIMQEDAEGKYSTLPPYIQQLAKMANISPQVVEIFLERQPKLAELAKRLSTLALSPEQTQAMDTQVLKAVQHALSNNDDLQRLIEASQALK

SEQ ID NO: 30925 - DNA, 3056 bp, DROSOPHILA
ttattaaatactaccgttttttttctagcgtttattgcataactgtggcctattttgtgaattcaaccacagtttaatatctaacgctttttggttaatagaattcataattgttcaacaatttaaatgaaaagcagtgccaaaaaattagcaaaacgtttcggtaagattgttcacatgatttctatatgtccttcaaaaatagcacccaattaccctggaaaatgggcaaatgggcgtgcatgggacaacgcacatttaattaaccaatttatatacatatacgtatatgtatatatgtatgtatgtatacctaattgtttgacaatttaaaggaaatgcaaggcccacgaaataggccagacatttggtaagattgtcgatgggttttctatatgtccttcaaaatagcactctgctaccctggaaaatgggcagttgagcgtgcattggacaacacgtggttctgaaagataagagatgaggccatctccacgagcaataaaccgaattggattgagacgaagtgaaaaattaatgtgcggccagcagtgagaccttcagtcgtatccgaaaatatgcccaacttatagggggtgtattccataaaactagtgttataaaataccaagaaaatttagcatttcctaacctatgcctaaaagtatgctttttaattcatataaattaaatacaaaaacattctgtcaacttattcgtaacataacattttaattataacataaaactttaattataacctaaataactcatataaaaaataagaaatcaaaaaagttggtaagcattttgcacaagttaatccaaacaaatatgtaaggataaaaactaatccaatctaatcaaaacaaagagatagcaagtacgtatcttaaaaatgcgatactaaaaatatccgtaggcttagttccagtattcctttttcggtttcaaaattcaaaattaaaaaatgacaccaattcagctgatacgactgaatatgccgcatttccgggccaaaacgtggaatactaaagccatgtccaccaagtcggtcaagtcctgcttcgccaagtcgatgaggcccatgaaggagttcaagcgaccgcgaatatcgaagatcagtgtagttggcgccggtcaggtgggcacggcgatcagtgccatgttgttgctccggaatctcaccaagaacctggtcatcctcgatattaactacgaactggccaaagcggaggcactggactttcagcacgcatccgcctttctgagcgatgctcgggtggtgccctgcggcgatagtaccaactccaaggattccgatgtggtgattattacggcgggagctcggccctccggcaaggatcgttctcgcttggctgcaatgcaaaagaccgtcgaaatcctgaagaaggcggtgcccaaactggtggagctcagtcccaatgccaccttcattatcatctcaaatcccgccgatgttatgacctatgctgtccagcgaataaccaatctacccaagcatcgctgcttcaccactggctgtcacctggatacggtgaggtttcgcaatctgatcgcaaatcgacttcgattgccaccgtctcaggttcacggctatgtgatcggggaacacggcgccagtgcggttccagtgtggtccagtgtctccattgccggcattcgactgaatgatgtggtcaagaacctggcctgcggcgatgatccggagaactgggcgaagatcaacaagcaagtcaccaccggtggtctggcggtggccaaaaccaagggctataccaattgggccattgccctcacctgtgcggatatcgtgcaggcaatgagcggcggaaagggaaagatcgcatgcgtgggcacggacatgaagggcctaaacggaatccaggacaacgtggtgctatcgctgccctgcttggtcaccgcgggtggcattagccacgtgttcgagctgcccctcacggatgtggagcaaagcaagttgctggcctccgccaacattcttctggaggcccaatgctctctgagtatttgattcgcggtttggccaaagtcactggattttaacaagttttaatccatgaattctttagtagctgagctactgaagaattctatggatgaacttatactaatggtttatttgttgttccgaaatatttatatcgcaaacgaataccttttggaaatgtacatattctggaaaatgtatatggtatgtacatatacagataagaaaaaagaacttatgcctccattcaatgcattgttcatggaaatagcccataaaaaacacacccaaatctcaagtggaaaatgaaaacccggagaagaccagctgtgggagtgagtaggcaagccctttgccctttcccactttcagctagagcaagtgagatgcacacacacacacacgaatcttttgtagaagagctataaaaatgcagcgatacaagaaatctttgctagcatttctgtgaccctgttcgtagacgtctaaaattttgtaatttttccaaaaaatatgatttatatcgcttggttaagtgacaattcttttgaagattttggatccccaaaggccttggggcaggacgatcaagagaaatcgaaagtcaaaggtcttggaaaagaataggtgaacagcgcaaaggagaaagcagccgatgagctccggcaaagaaatgcggagtcttaagatgtttggggccttcattgcgcaacttttggagccaaggtctacgattgtagcaggcgcccacgaatctcagcagcgatcagccgatcgcgttccgctcgccacatttcgtttgtttattccaccattatttttattatttttgatggcgatgcgacgaagcgaatcaagtggttggttgacccggggttgcgacacgccaagattatgcagcatcccatcatccaatggatgcaagtgtagccaagtgtaacacgccaccaggcgaacagaagttgggcacgtggaactcccacgaaacttggagattttcaacgcctcgttgcatcgtctggga

SEQ ID NO: 30926 - DNA, 1056 bp, DROSOPHILA
atgccgcatttccgggccaaaacgtggaatactaaagccatgtccaccaagtcggtcaagtcctgcttcgccaagtcgatgaggcccatgaaggagttcaagcgaccgcgaatatcgaagatcagtgtagttggcgccggtcaggtgggcacggcgatcagtgccatgttgttgctccggaatctcaccaagaacctggtcatcctcgatattaactacgaactggccaaagcggaggcactggactttcagcacgcatccgcctttctgagcgatgctcgggtggtgccctgcggcgatagtaccaactccaaggattccgatgtggtgattattacggcgggagctcggccctccggcaaggatcgttctcgcttggctgcaatgcaaaagaccgtcgaaatcctgaagaaggcggtgcccaaactggtggagctcagtcccaatgccaccttcattatcatctcaaatcccgccgatgttatgacctatgctgtccagcgaataaccaatctacccaagcatcgctgcttcaccactggctgtcacctggatacggtgaggtttcgcaatctgatcgcaaatcgacttcgattgccaccgtctcaggttcacggctatgtgatcggggaacacggcgccagtgcggttccagtgtggtccagtgtctccattgccggcattcgactgaatgatgtggtcaagaacctggcctgcggcgatgatccggagaactgggcgaagatcaacaagcaagtcaccaccggtggtctggcggtggccaaaaccaagggctataccaattgggccattgccctcacctgtgcggatatcgtgcaggcaatgagcggcggaaagggaaagatcgcatgcgtgggcacggacatgaagggcctaaacggaatccaggacaacgtggtgctatcgctgccctgcttggtcaccgcgggtggcattagccacgtgttcgagctgcccctcacggatgtggagcaaagcaagttgctggcctccgccaacattcttctggaggcccaatgctctctgagtatttga

SEQ ID NO: 30927 - protein, 351 aa, DROSOPHILA
MPHFRAKTWNTKAMSTKSVKSCFAKSMRPMKEFKRPRISKISVVGAGQVGTAISAMLLLRNLTKNLVILDINYELAKAEALDFQHASAFLSDARVVPCGDSTNSKDSDVVIITAGARPSGKDRSRLAAMQKTVEILKKAVPKLVELSPNATFIIISNPADVMTYAVQRITNLPKHRCFTTGCHLDTVRFRNLIANRLRLPPSQVHGYVIGEHGASAVPVWSSVSIAGIRLNDVVKNLACGDDPENWAKINKQVTTGGLAVAKTKGYTNWAIALTCADIVQAMSGGKGKIACVGTDMKGLNGIQDNVVLSLPCLVTAGGISHVFELPLTDVEQSKLLASANILLEAQCSLSI

SEQ ID NO: 30928 - DNA, 2408 bp, DROSOPHILA
tcggggccttttataggcgaaaagttaaaaattaattacgtgtgccaacttaaagctctaaacaaggttatttaatgggaacgtcaacgtgtgtcaataaggaagtttttattgattggggactcacacaaaaacagtttgtatgaatggttcaaaatatcatattacaaaatggcaagaacattccttctgttgggtctggtcaggaagtgaatactatgcgaacatttgtaattgtttcgtaaattgtattttttaacaacctaataagttgtgcgataactttgaaataccagcgtttttttcaactcgaaaaggttgttcaaagtgtagagcagtttcgaaaatgagttcctgaatgaatgttcaatttgctttccaaaattttataatttaaaagtgtttgtattttcaatggacaaatcagtgggaagtcacacggcttaatcgcgacataatgaatgtgagtattatcagcgaatgatgcatatatgtaatttgtaatctaaatgctgttttccatacacctcataaaaggcaatccccatttgttgttgatctcaacaaatactataataacaatttttaaaaacgctttttcttatttgttttattattttgcttgcaaattttaatcgaatctcaataaaaagtttgaaaattctttctcgcactttcacttgctgtaatggatatctgattaacaatatgtcgatataccttgctatttaaatgattttgcaaacctgatcgaattattgtccataaaaggccactaattattgccaccgcccactgcaaatccaccaaggcgattgcggaacggaactttctagtatttcagtgttttttttttttggtttattaagtatacgaataaatatcataaaaaataaaatacaacaaacgcttaggttaggcgacaattacaatgcgaaaccgaaacaaacgcaacatttgcaggattagtttgattgaaacgggcggatcgggatctcactcagtgctggaccagtttgaatcgggatgcctctgcataatccctggcatccgagaagttgcgttccggcttaatgcgcacatcgttgggatcgttgacgaactcgccactccaagtggtgggcagtaccgtgggctcggtgttgtaatcaaagtagtcctggtcatcggatcgattgcgctcctgtttgatgcgggtctcgccactcttcacgaaggtgccatcccattcggtgggcaggacaatgggttccgtgttgaatccgtagaagttgttggtattggttacgttctggttctggcgacgtatcttggacacattattgacagctccatccggatacacgaacttgccgttccagccctcgcacttaatgggtatgtagtcctctttcttgcgcagcggcatttttgaactctgtttttgtttttacttttccaacagttcgatctattcacaacgagattgcaaacacgattgagtcgcattcgagcaggtcttattctaaaatatgatttcaccttgtttgagcgcaaaactcgtcatgtaaatgattgttatttgccgcagagagtcgacccccgcgatttccatttgttttgctcgtattttgaatcgctgacgtcaggggcgcggatcttaacgcgatttcttccgacagcttcaaacgggttcagacactcagacactggcagaaaatgttcgatgtcaaacgggtgaaaaggttaaaaaaagaggataaaaacttctacatttctactagaaacaatttgtaaatgtctttgcatgactaagaagtcttttcttttagaagcactttttaaatactttcagttacgttcatatgtacatatattgttgtctcggacctttcaggaaaagttaggaactccgacagcagaacaatttattgtacatatttcgaaaactaaaaaaataacattataaaatgcttactagcttattttgtatctcaaaactgtttagtcgcttattatttattgcaacatatgttagaatgtaattttcgtcttgcaatatttattttctctcagtgcacctcctccgcaggttcgcactttcgacggcgcgtcgctcggcgcttggccatataaagtcatcgcgtctggggcggctcaatggcagatcggagcccgaagcctcggagcagagttatggtggcctagctgtcataggtgtcttatgtaaaatacagaggtatatcttgattgccagcagattaaagtgattcattcattcgacccggcagcgaatatgactttttctgggggcggatcgcaattagaatgtgtatcgtatctatgccgcattctagtagtatgaatatttatttttggagtcttgcccatctatttgtgtagataaatcccacttataagtacggcaa

SEQ ID NO: 30929 - DNA, 408 bp, DROSOPHILA
atgccgctgcgcaagaaagaggactacatacccattaagtgcgagggctggaacggcaagttcgtgtatccggatggagctgtcaataatgtgtccaagatacgtcgccagaaccagaacgtaaccaataccaacaacttctacggattcaacacggaacccattgtcctgcccaccgaatgggatggcaccttcgtgaagagtggcgagacccgcatcaaacaggagcgcaatcgatccgatgaccaggactactttgattacaacaccgagcccacggtactgcccaccacttggagtggcgagttcgtcaacgatcccaacgatgtgcgcattaagccggaacgcaacttctcggatgccagggattatgcagaggcatcccgattcaaactggtccagcactga

SEQ ID NO: 30930 - protein, 135 aa, DROSOPHILA
MPLRKKEDYIPIKCEGWNGKFVYPDGAVNNVSKIRRQNQNVTNTNNFYGFNTEPIVLPTEWDGTFVKSGETRIKQERNRSDDQDYFDYNTEPTVLPTTWSGEFVNDPNDVRIKPERNFSDARDYAEASRFKLVQH

SEQ ID NO: 30931 - DNA, 2431 bp, DROSOPHILA
ttcctctaccagttgcatattattaagtttattattaactatatatcatatatgtactacgtaattgcttgcaaactgaaactaaattatagaactgtatttaattcgatcttttatgttcttaaaacgaaagtgaacatatattatttcttacctcttttttcatttagttgtgtttcatatgaaaaatgatataacatttctaaatgaaaatttaagatctacccaattaaacttattttactgtaaggaaacccttttcgcttataagagacccattcgagtatttttggtgatatattttcacttagttaggggctcctgcctgacatcctttgaccacctgggtgcgccaaatctatgaacatcgcctacaagtgtaagtaagaggctaatggctgtagatttaataaggcgtgttgtcgctggagctccatttccccacggcatccatgccggttattcccgatgagttgctaaaccgatttgctaaattacaaggtgcacctgcccccttttggggccatcatcgcatcttttgtccgacgcacacaagtcaggcgccgctttcagctccgcgactccctctaattacgcccgcgaggcgccggcgagtccgaatcattatgtcacctgtgcgaagaatgccgcacgtaatccggaaactgcacgacggacacgacgagcagctcattgtgcggaaatcgcatttggggcagatagcaccgcctaactaacgaccagccaactaatacgattagtgtcataaggcggcatgtcaccgagcggaggagctcgtacactgagcgaaaatagtgggtcaagcatatttcgagaacagaaattgttctctatgggctggagatattatttggctcataatttggatgatatgtaataatgcttcatgaaaatacttctttttcgacagctatggaaaataaatattactttattaatgaaatttctttcagtgcttctaatttggtgcgtcttgttattacttcttagatgattgcttctttttaatggtatccacgattgtcttcagctcgtagtacgagtagcgataatagctgtagtactcgggattcttgtacgtttgcttttttcctgccttgggtccaagttgctcctttttatccacaatccgataggtggatgggtgtatgaaatcgggagtagtgaaggcagttgtgttcaaagtttggggcgtacatccttcggggtgatcgcgtacatttcgcggactggcgcccaaacgcttgagggtattgacatcctttgagtaaccataagcgatcttcaagcgccaaaacgttgggcgccataaaagcggaattcttaaaggagcacgcatggtggggctgtatttcatacaaaataatttagattgaaaacagatgcttttttggtttgacaagtttgtcagcttaatttggagcactaagacgtagtgctaagctgtttcaaacaatcattttttaagagaaatctcttcacaatacgcactgccatatgtcagtaatccctttgaacaaatcaacaacaaatcactatgcgaaatccgaatatgtttaggttgtttagagctagataaacttggaacacacttagcagcactaagccaaatatgtttattttaccaagccccaaaacttcagcctgtcataaacatggaactgttccactttaagccgagcataaaccaggcacaactgccaaaacacaaagcacacgttgaataatttcgatcattaaacttattccacttaaaatccattcaggattcgaggggaccaaatggcggagataaatgccccaacagcccccaatgttaaccctcgacaatcagcacacccaacccatcaacctcacaatggacctccgggcggcggtaaagtttttaaaactaacgttgaacaacgccaacgatggcaataaaaatcaacagcaacaacaacaacaagaaccagagctgtagagccggcaaaataaacgctcaagtgttgaaaattgtcaggtcctggacaaaaaaaaaaaacagggactgggacaggtgggtaacacgtaggtggttcacctgaacgctttttaatacactctcaagcccacacgcacataacacgaaggcgcccctgattgtggcttgtaaatttatagtttcaccaagaaaatcgcgctggcaaactttttacttttactgggtctctgcgtgaaaactcacactgccacacacacacacacacgcacgtaactacacccacacactggcaacagctcttaacccactcgtttcaacttcctgcggcacatccccatccccatcccccttccacatctacaatctccattcacaatcccagtcagccagttggcgacatctaattgcttttgttttcggcccagagactggcattgccgcactaca

SEQ ID NO: 30932 - DNA, 431 bp, DROSOPHILA
tgacaaacttgtcaaaccaaaaaagcatctgttttcaatctaaattattttgtatgaaatacagccccaccatgcgtgctcctttaagaattccgcttttatggcgcccaacgttttggcgcttgaagatcgcttatggttactcaaaggatgtcaataccctcaagcgtttgggcgccagtccgcgaaatgtacgcgatcaccccgaaggatgtacgccccaaactttgaacacaactgccttcactactcccgatttcatacacccatccacctatcggattgtggataaaaaggagcaacttggacccaaggcaggaaaaaagcaaacgtacaagaatcccgagtactacagctattatcgctactcgtactacgagctgaagacaatcgtggataccattaaaaagaagcaatcatctaagaagtaa

SEQ ID NO: 30933 - protein, 125 aa, DROSOPHILA
MKYSPTMRAPLRIPLLWRPTFWRLKIAYGYSKDVNTLKRLGASPRNVRDHPEGCTPQTLNTTAFTTPDFIHPSTYRIVDKKEQLGPKAGKKQTYKNPEYYSYYRYSYYELKTIVDTIKKKQSSKK

SEQ ID NO: 30934 - DNA, 4043 bp, DROSOPHILA
gcgcatgaagtgaaaattaatttctaaatgcgggaaattaacaaattacaaacaacgcaatgggggactgtgggttggcaggtggcggaagtagacatgccataattcaccgcgcatacccacacagagagagacacacacacacacacatggccatggaggcctcttctgtatagactgcaaagttcgcagagcaacttccttatcgagcgatggagtagcgtggggggggggggactgaggaactcctgcaaggtgttgaagcacaggtgaggcacattgtcttgcttttcgcctggagccgtgccccacacctccaacccaaccgcctaccccgcatacttctggccgcacttcaactcacaaacactgacagttgacaggtttgctaatttgaagcagtaccccgaaaatgaagttagcgtctgtcaacgtcttcttcgctgtgataacggcgtttccaaccccaaccccacaccaacaacccacccacaaaccggaaatgcccagcccaccggcaacaaccccttcgtattcacacctttggttgccacagacgcgctgcggtcgcgcttttaacatttaattaagttgtgctcgattttatgttcgacaaaagtgtttgtctgccgttggcccctcgatgggatgtgtgtgtaactatgtcgtggttgtggctcctctgcgttgttgtcatttctgaggtttgagcaaagatttgaaaatggttgacgccagcaaggagagcgtttcaatggtgctcttcccaaggcccgcaattcgtggatataccaatgtagatctatataaaatattgctagtacttaaaatgttttatgaacccagtattccattttcaacaaaaattcatgtagtttcattttaaacaaacagggccaaaaatttagttctaaattcgttttttttttttaattcacgaccatctaaatttttagtttttagttttatgttcgtgggggactaagcacggttcttatcaatgggctccagatttggcggctgcctgcttacgcggatgtctgctccccaagtccgcggatccattggcatagcttataaatggcagctgcgcagatactgtgacccacctctcatggacagcgaaaggtacaagtgcgtgaaggagcaaaaggcactcgcaatgaagaaaaaggaggcggccgacaagaaggaggcggccaggagggatgccgaccgcctaatatgccagttgaagaagtgcatcggggtcaagtcgaaggcgctgaagtcaaaaatggattgcatgaagccggaggagaagaaggccatgggggatatgatggactgcgtgatggccggcgtcaagcgagtctgtctgaagtcggtgatgcagaagtactgtagggagcaggaacttaagctacgctacgagcggctgatcaaggataagaagatcgagaaattaatgaaggaatgtccggtcaagaagaagggcgactctgcggaagggtgcaaggagccaagagagaaagagagatgcaaggaatcagaaactcttaggaaatgcatagcagataccacaaagctcttagaagccgagttggaaagagagagtaagaaagagaaggaaaaatgtaaagataaaccggaagtggataaatgcaacgataggccaaagaaagcggacgatgcgaagactgcaaagaaagcagaagaatcactaaaagctaagaaaggaaagaatgccataattgatagctgtaagggagcacccaaggataaaagcaaagaaccggcgaaaaaagctaagacttgtgataagcctaaaaagattccgaaagataaacgtgcaaaggacgaaaataaggaatccaagaaggaggagtgcccaaagaagaccaaggaaaaaccgaaatgctccaagggagatgcaaaaaaatcaccattcgagcagaggatggaagagtgcgaatacgaagaatggaaggatatatgcaaagcacaggagaagaataagactgatgtggctgccatagaagactgccttagtgcgcaaatcaagaagagatgccgtaagatggtgatcaagaagatgtgtgcctattcctttggagaaccgaaaaaaaagaataagtgcgaggcagaaaaggaatgtggagatagttgcgttcaaaagaagtggaaagaggcatgccccactattcaagatctcacggaaaagaacgacgtagactttagcgaagcctctaaagaagtgaagaaaatgatgaaaaagtcctgcgaagaggaagaaaaaaataaagagtgcgagattaaggaattacaagctaatatcgaaaagtgtgcaatgaagaaaagatgcgcagacgcaagacaaaaaatcaagtgcaatgaagtagagagaaagaaaaagcgagaggaggaggagaaaatgaagaaatgtgaagaggaagcaaaaaataaaatatgtcaagtcctagtgaaaacacaagaagatattatgaaagtcgatggtgagttcaaaaaacaatgcaagagcgaaggctgtaaaagagaatgcgatgaggaaattaaaagaaagtgcatagaaaacgctttcaaaaaattatgcgaggtgaggaaaaaacgtacggaactgttgcaaagggaggagaagttaatgaaaaaggtcgaaaaaggaaaatgcgagaatgagcagcagaagaaatgcagagagcaagaacggagaaagaaatgcgaagaggaggagaaaaagaaaaaatgcgaagaggaagagataaaagagaaatgcgaacaggaactccaaaagcttaaatgcgccgaagaagcgaaaaagagaaaatgcgagaaactgaaaaagaaactggaatcgcttaagaacgaagaaaaagaactgaactccaagttaaaagacctaaaggacaaggaagaacgattgaagaaagcggatgaagaagagaaacggaaaaaatgcgaggaagataggattttgaaagaatgtgatgaattcgatcagaaagagaaagccgccgaagcagaggaaaaaaagaagaaaaaataaacctatcctgaaatttaatctcttaaaggaagagaacgtatggcttggataacctataatttgtaacgcagacaggtggacaactgcgcttttaaggagcccaaaatatcattgcttgcccaaggagaaaggcttaaaggaccacggcggtcgtcaaggccgcttgtccttcagttgatgcagcggatttcctaccctaggatatatttccctagatatatgatttctagattttcagaccaggtaatcgactgtagcaactgggctatcgtccttgccaccgtcaccgtggtcttggccacctcgcacgacagcaatggaaagttatgggtactgtgaaaagcgagtggtacattgatcacctttgaccccgttgcctttctagtagacgcccaggtcatcagcattgttgtccatatttccttgtgtttcgcactcgaagttgtcatgaattttatttcactttgcttagttttttaataaaatctccagtgactgcccccacgtaaacttggccttagtttcttttttttattaaccatccaaatttcattggtaaccgcagcacttagaaggacccttccgcagcaatcgtgctctttggaatgtttcgcaggtttattaacttgccgctaaaacgactgtgggtctgtcatcaacccagtccatacatccaaccctggaccctggtaaagagcaatggatctgcatttagtcagcagactaccttcttccaggatgatcctccgatgtcatacgacattctcaccaacgatctcagccaaacgggctcttcgccatcgataagacaggttccacaaaaggtctgcattgtgggcgaagttcacagactcaaagtctgtggatacagacaccctggcagctgttattttatcagtcagatgggacgcctctaccataaagaatcgggcaggggcaaaagggaatcccgtccagacgtctatcaacgagctcggcgttttagggaaagatcgaatgg

SEQ ID NO: 30935 - DNA, 2043 bp, DROSOPHILA
atgggctccagatttggcggctgcctgcttacgcggatgtctgctccccaagtccgcggatccattggcatagcttataaatggcagctgcgcagatactgtgacccacctctcatggacagcgaaaggtacaagtgcgtgaaggagcaaaaggcactcgcaatgaagaaaaaggaggcggccgacaagaaggaggcggccaggagggatgccgaccgcctaatatgccagttgaagaagtgcatcggggtcaagtcgaaggcgctgaagtcaaaaatggattgcatgaagccggaggagaagaaggccatgggggatatgatggactgcgtgatggccggcgtcaagcgagtctgtctgaagtcggtgatgcagaagtactgtagggagcaggaacttaagctacgctacgagcggctgatcaaggataagaagatcgagaaattaatgaaggaatgtccggtcaagaagaagggcgactctgcggaagggtgcaaggagccaagagagaaagagagatgcaaggaatcagaaactcttaggaaatgcatagcagataccacaaagctcttagaagccgagttggaaagagagagtaagaaagagaaggaaaaatgtaaagataaaccggaagtggataaatgcaacgataggccaaagaaagcggacgatgcgaagactgcaaagaaagcagaagaatcactaaaagctaagaaaggaaagaatgccataattgatagctgtaagggagcacccaaggataaaagcaaagaaccggcgaaaaaagctaagacttgtgataagcctaaaaagattccgaaagataaacgtgcaaaggacgaaaataaggaatccaagaaggaggagtgcccaaagaagaccaaggaaaaaccgaaatgctccaagggagatgcaaaaaaatcaccattcgagcagaggatggaagagtgcgaatacgaagaatggaaggatatatgcaaagcacaggagaagaataagactgatgtggctgccatagaagactgccttagtgcgcaaatcaagaagagatgccgtaagatggtgatcaagaagatgtgtgcctattcctttggagaaccgaaaaaaaagaataagtgcgaggcagaaaaggaatgtggagatagttgcgttcaaaagaagtggaaagaggcatgccccactattcaagatctcacggaaaagaacgacgtagactttagcgaagcctctaaagaagtgaagaaaatgatgaaaaagtcctgcgaagaggaagaaaaaaataaagagtgcgagattaaggaattacaagctaatatcgaaaagtgtgcaatgaagaaaagatgcgcagacgcaagacaaaaaatcaagtgcaatgaagtagagagaaagaaaaagcgagaggaggaggagaaaatgaagaaatgtgaagaggaagcaaaaaataaaatatgtcaagtcctagtgaaaacacaagaagatattatgaaagtcgatggtgagttcaaaaaacaatgcaagagcgaaggctgtaaaagagaatgcgatgaggaaattaaaagaaagtgcatagaaaacgctttcaaaaaattatgcgaggtgaggaaaaaacgtacggaactgttgcaaagggaggagaagttaatgaaaaaggtcgaaaaaggaaaatgcgagaatgagcagcagaagaaatgcagagagcaagaacggagaaagaaatgcgaagaggaggagaaaaagaaaaaatgcgaagaggaagagataaaagagaaatgcgaacaggaactccaaaagcttaaatgcgccgaagaagcgaaaaagagaaaatgcgagaaactgaaaaagaaactggaatcgcttaagaacgaagaaaaagaactgaactccaagttaaaagacctaaaggacaaggaagaacgattgaagaaagcggatgaagaagagaaacggaaaaaatgcgaggaagataggattttgaaagaatgtgatgaattcgatcagaaagagaaagccgccgaagcagaggaaaaaaagaagaaaaaataa

SEQ ID NO: 30936 - protein, 680 aa, DROSOPHILA
MGSRFGGCLLTRMSAPQVRGSIGIAYKWQLRRYCDPPLMDSERYKCVKEQKALAMKKKEAADKKEAARRDADRLICQLKKCIGVKSKALKSKMDCMKPEEKKAMGDMMDCVMAGVKRVCLKSVMQKYCREQELKLRYERLIKDKKIEKLMKECPVKKKGDSAEGCKEPREKERCKESETLRKCIADTTKLLEAELERESKKEKEKCKDKPEVDKCNDRPKKADDAKTAKKAEESLKAKKGKNAIIDSCKGAPKDKSKEPAKKAKTCDKPKKIPKDKRAKDENKESKKEECPKKTKEKPKCSKGDAKKSPFEQRMEECEYEEWKDICKAQEKNKTDVAAIEDCLSAQIKKRCRKMVIKKMCAYSFGEPKKKNKCEAEKECGDSCVQKKWKEACPTIQDLTEKNDVDFSEASKEVKKMMKKSCEEEEKNKECEIKELQANIEKCAMKKRCADARQKIKCNEVERKKKREEEEKMKKCEEEAKNKICQVLVKTQEDIMKVDGEFKKQCKSEGCKRECDEEIKRKCIENAFKKLCEVRKKRTELLQREEKLMKKVEKGKCENEQQKKCREQERRKKCEEEEKKKKCEEEEIKEKCEQELQKLKCAEEAKKRKCEKLKKKLESLKNEEKELNSKLKDLKDKEERLKKADEEEKRKKCEEDRILKECDEFDQKEKAAEAEEKKKKK

SEQ ID NO: 30937 - DNA, 4121 bp, DROSOPHILA
aagagtggcactccaaaattaactgaattgatggcttttgtctaagaatgtttagtacataattttccacattttccagtctataaaatttgtttttaattcaatctgtatgcacagctccacagttttttcgaagtgcacttgcagattgcagtcgaatggatagcactatatagtaatgaaagacgaagtcgtttgcattgcttttgtggctgtgttgccaggtaccagacgatggaacgaatgggtggtaaggggctgggttgaatcaaagggggtaaggagactggctaacgacattgaaaatgcttgtcgaacttgaaaattattcgattaagtgcattaccggcgagacatggatcggcaatcaaactgaattgcacacagagcggcgagccggaggggggtaaggtgggcttaaaaggttgcaaggacgaggtggggcacgaagtgcaggagggagggcagggaatatccttgcggagcccctgctgcaggggattccattgttgtgactgccgcagtgtcgtgcagtggagtgtctatccgtctggcactgtgtttgtttgtggccgccccagctcgtcttatttatgctgattgtgtttttgcctatgccaatcaatggggcacgctttcgggggagcgctaagcctttgtcgagcgccccaaggtatgctttaatttaatgcattcgggggaatacccggcgacgacgttacagtgaaacttccgcatggcgaaccactgatttggttggcaaatgttttgcgaacgggtggatttaaaaatgggaaaaggatataaaatcgggctaaattgtatcgctgattagcttttacatagcaaattctagatttgttcatatatatccaaataaatatatgaaatatattaattatgtgattatgttattattatgttttttcagcaagaaaaacaatgttgatatagaaaacttcacttacaggaaattcaacttggaagtggccaattgcactcatttaaatctacaatccgcactcaccgacttgtcctcatcgctgtttacgaagtgcagaccattcacgcccttgtccgagtccagttccgcgggaaggacagtggccacaagtccgtggtgttgctgctgatggtggtggtgctgctgctttggaagtaggacctgatgatgcagctgcgtggccaccgtgggatggtgcaccacatgctctactgtggtaaccggttcctccgcattggtcacaccttcatacccgttggataggccatgtccgtgggtgtaatcgatgtaggaactcggagtgggcagcttggaggccgcgctgctgggcactgcgggcagctccttgacatcgttgttgcccggttcgataatgggcacatactgcttggtcttagccattccaatcaatcgacccggctgaacccccagcgatccgtgctccaagagggttttcagagtgggtgccggggaggcgccttgtccgggatgaaagagaatcggagctgtactatcctgcgggcgatccaccagctgtttgccctgcctttgcagcttggcctgcatctccttggccaggaggtaggttaggccatggatctgatcgtcgggagacttgccaataagcgtggacagttgctggaactcgggcagctgtttgtagtgctcattaatgccatccggttgggcgtggtactcgattttgattaggggagaagcctctggctggagctcataggagttgtaggcctcctgcggcttcccatagatggcaggagcttccgccagcagaggatcaggcttggaaggtctaaattgaggtacaaccacttcaacactctgcgtgggcggcggtgccagttctgcggtgtaggtgtgatgcacttcctccactgcagctgtgggagctggcgcctcctgaaccacaatgggttgggctattgtgggagcaactgctgcatagtggggtttgtaaacataacgtagttgctccaccactggaaccggttggatgtgcacttggacaggagatggagatgccgctggttcagccggcttattgatgtactttacatagttgactaaaggcttgccaccatatgacaaggatttggctttgtagtgttcgtagtcggatttctgggcaggaagatacttgacatacgccttgccacccaatccatctttcatcagctggctaatgactttctgcacttcatggggcaaagtgctcagggatttctttgtcttcacatgtccagaattgacaggagcctctttgtaaacatacatgcgtttggtttccgccgtagcttcaccagtgaggatatcattgtcctccacccgaggagtggttgtagtcagctgcggagcttgggtgttattcctctgggtttccatagtcagtagagtgggtacagcttcagataccatttgtttgccagatctttggggcatggctttggcatcggccaactcaaatttgatcatctgcggagccgaacgcttggagcgctttgttttgcgaatcctcacctgaataggctgcttcctggccacttggggcttagtgtggcgaaagtctgtggatctagtggcctgactctggagatccagggagcgtgccttcttgatcagctgagctgtgatgggatcgggctccctagcatctgtttcttcgaaagggatcatttgaactttaaaatccgccggctgctgggcacccacaactgatcgtctctgtcgacgtggtttccgggacttggcttttgtggccttggtgggactaactgcaggagtcggtgcctgactggtactggctggacttgcagcagtgggattttccttgagggctctggcgtgatattgacgtagaatttgcttaagttccggacttggctcgacggcatccgccagctcgaaacgcagcattcttggtgccgttggcagttggcgttgctcacgcttgatcctagagtgggtttgggccacacgtcttggagactgattctccacttgctcattgtactgattgaaggctgccaagtaggtgtcacccgtgggattgtcaatttgacgcatgctgcggaaattccgttgatcaaagtaacgctgcatgtcctgtataaaattttttaaggttttagttaaatatttgtgggtattaacttttaaatacttacctcatatgaggaaaacgtttctagggatggtaaacgctgccaggtatctgcagcttggaccaaacttatgatcgcagtcattatcagtagctgaaaaggccaaaaataaaataaacacttcattttagttagtataaaacacagtacttaattagctttcaagttaatttaagactttgaagtagactgttttattcctttttttttggtttggaatacgtaacttagtataattacgacgcctgtttaataacagaaaaaaaaaaagatttgatcacttttattggccatttctttgcggctttgagcatgaacaataatttacgaccatctgcgagggttgaaccaactttggtttacatatacgcccgccccagactcataaataatccgaatatgtccagctgtccgtccacctgatttttggtcgtctgcccactttcactttccaccaatccccatttggacggaagctgcagcttcaactgcaagtggaacctggcctgaactcagctcgattcttggggtcttggcgaaataaaagtgaggagaaagaaaagaaatatcagaaaaaataaacaaatggaacgagtttagcacgcgctcctcgcgatccaagtttgttgggagttcgcctggccgccactttcacgtcaacaggttgaacttggcttttatggccattaaactcattgatgtgcgatttcaattgctttgctggcactctcgttttacgtaagaccaattatggctgtcgaattgattttggccagtgatgcaattcgatcagctgtattattaacttacatttcgcgatggattgcgataggagagcggctgtggtatttcactggctaagaagcaggaactaaactaaatcaggtgttaagataccgtgagactcgtaaatggctacatagtgaagttatcgcccc

SEQ ID NO: 30938 - DNA, 2121 bp, DROSOPHILA
atgcagcgttactttgatcaacggaatttccgcagcatgcgtcaaattgacaatcccacgggtgacacctacttggcagccttcaatcagtacaatgagcaagtggagaatcagtctccaagacgtgtggcccaaacccactctaggatcaagcgtgagcaacgccaactgccaacggcaccaagaatgctgcgtttcgagctggcggatgccgtcgagccaagtccggaacttaagcaaattctacgtcaatatcacgccagagccctcaaggaaaatcccactgctgcaagtccagccagtaccagtcaggcaccgactcctgcagttagtcccaccaaggccacaaaagccaagtcccggaaaccacgtcgacagagacgatcagttgtgggtgcccagcagccggcggattttaaagttcaaatgatccctttcgaagaaacagatgctagggagcccgatcccatcacagctcagctgatcaagaaggcacgctccctggatctccagagtcaggccactagatccacagactttcgccacactaagccccaagtggccaggaagcagcctattcaggtgaggattcgcaaaacaaagcgctccaagcgttcggctccgcagatgatcaaatttgagttggccgatgccaaagccatgccccaaagatctggcaaacaaatggtatctgaagctgtacccactctactgactatggaaacccagaggaataacacccaagctccgcagctgactacaaccactcctcgggtggaggacaatgatatcctcactggtgaagctacggcggaaaccaaacgcatgtatgtttacaaagaggctcctgtcaattctggacatgtgaagacaaagaaatccctgagcactttgccccatgaagtgcagaaagtcattagccagctgatgaaagatggattgggtggcaaggcgtatgtcaagtatcttcctgcccagaaatccgactacgaacactacaaagccaaatccttgtcatatggtggcaagcctttagtcaactatgtaaagtacatcaataagccggctgaaccagcggcatctccatctcctgtccaagtgcacatccaaccggttccagtggtggagcaactacgttatgtttacaaaccccactatgcagcagttgctcccacaatagcccaacccattgtggttcaggaggcgccagctcccacagctgcagtggaggaagtgcatcacacctacaccgcagaactggcaccgccgcccacgcagagtgttgaagtggttgtacctcaatttagaccttccaagcctgatcctctgctggcggaagctcctgccatctatgggaagccgcaggaggcctacaactcctatgagctccagccagaggcttctcccctaatcaaaatcgagtaccacgcccaaccggatggcattaatgagcactacaaacagctgcccgagttccagcaactgtccacgcttattggcaagtctcccgacgatcagatccatggcctaacctacctcctggccaaggagatgcaggccaagctgcaaaggcagggcaaacagctggtggatcgcccgcaggatagtacagctccgattctctttcatcccggacaaggcgcctccccggcacccactctgaaaaccctcttggagcacggatcgctgggggttcagccgggtcgattgattggaatggctaagaccaagcagtatgtgcccattatcgaaccgggcaacaacgatgtcaaggagctgcccgcagtgcccagcagcgcggcctccaagctgcccactccgagttcctacatcgattacacccacggacatggcctatccaacgggtatgaaggtgtgaccaatgcggaggaaccggttaccacagtagagcatgtggtgcaccatcccacggtggccacgcagctgcatcatcaggtcctacttccaaagcagcagcaccaccaccatcagcagcaacaccacggacttgtggccactgtccttcccgcggaactggactcggacaagggcgtgaatggtctgcacttcgtaaacagcgatgaggacaagtcggtgagtgcggattgtagatttaaatga

SEQ ID NO: 30939 - protein, 706 aa, DROSOPHILA
MQRYFDQRNFRSMRQIDNPTGDTYLAAFNQYNEQVENQSPRRVAQTHSRIKREQRQLPTAPRMLRFELADAVEPSPELKQILRQYHARALKENPTAASPASTSQAPTPAVSPTKATKAKSRKPRRQRRSVVGAQQPADFKVQMIPFEETDAREPDPITAQLIKKARSLDLQSQATRSTDFRHTKPQVARKQPIQVRIRKTKRSKRSAPQMIKFELADAKAMPQRSGKQMVSEAVPTLLTMETQRNNTQAPQLTTTTPRVEDNDILTGEATAETKRMYVYKEAPVNSGHVKTKKSLSTLPHEVQKVISQLMKDGLGGKAYVKYLPAQKSDYEHYKAKSLSYGGKPLVNYVKYINKPAEPAASPSPVQVHIQPVPVVEQLRYVYKPHYAAVAPTIAQPIVVQEAPAPTAAVEEVHHTYTAELAPPPTQSVEVVVPQFRPSKPDPLLAEAPAIYGKPQEAYNSYELQPEASPLIKIEYHAQPDGINEHYKQLPEFQQLSTLIGKSPDDQIHGLTYLLAKEMQAKLQRQGKQLVDRPQDSTAPILFHPGQGASPAPTLKTLLEHGSLGVQPGRLIGMAKTKQYVPIIEPGNNDVKELPAVPSSAASKLPTPSSYIDYTHGHGLSNGYEGVTNAEEPVTTVEHVVHHPTVATQLHHQVLLPKQQHHHHQQQHHGLVATVLPAELDSDKGVNGLHFVNSDEDKSVSADCRFK

SEQ ID NO: 30940 - DNA, 2512 bp, DROSOPHILA
ctgatgcggtcacgcgacgcggtagatgcaaccccaaacacggtgaaattctttctgagcgctccgccaaatccgcagctgtccggcgagatttccgccgagctgtttctgtttctctggagagcgagaatctcaccgaaagagagagattgcgcactgaacaaccctggcaaatctctattttatattctgcgataagttttaagtattttcaaacatctaacttcaatacttcttgcttatatattttttttcaaatttttaaatttaccgaatgattggatatctacagtatccaaataaattttttataataatgttatgtcataaattcaatttatttttagtctgctataagtttaaaaaagtattttaaaacttctaggcttactacttctctctcaaaatttagaaattaccgattgaggattggatttttatagatactaaaaaacattttcaaaacaatgttatgttataaatttcataatatttttgcttggcttctacaaaatgaaaattttttaaaaagtactgcttaattttaaagcattgtagctagaaatttcaatttcaaatgagtattattgctttcaatattgttatcagattgtttatagctaaaacaaatatattttttttgcaatgtcggttcatgtcattatgttaatagggttggaactgaagatatcaatccgaaaaactgccggctttgctctgctataaatctgtactgaaatattatataatgttaactacttcttcacattatatagatcaaatgtatgcacttgttttgtagcttttttccagttcttaaacaaatttagaaactatttagaataatagaacaatttttggattaacacttattttattttatttacatatttgtacaacagccctaatattagatatttaatgttgttcatataacaaatatcccgaacatcaacaatatttccttatgatctaatgacccttatgatcagttaagctttcagccctttatgcaattggttatttcggtccagaaggcctgaacttcaggatcctgcattaaactacgtttcttagcgttcaaaactatgttgaggatgtcggcatttttgcagcaatcccgtctggcggatttgccatccggcgcctccggggaaaagccttccgtctcctggtcatccattggatccacttcacccgccggactgcccaattgtccaactgcaaaataacaatgtatttgggggaatctattgcttaatcaacttaaatacctttcttgcacttggtcgcctctgttttcggtttttctgtccgtttttggtagggttttcttggttttgagacatctttcgtcttgctgcgcttggcattcgcatcggtgggcagcaattcgggactctcggcgggattatccgcatcctgctgcaggcgccgcttgacgtgcagattcaggcgctccttgatgttttgctgttccagttttatttgcacaccagtggtttctgccatgtttttgcgttttgaatataaaaacaatatccaaaacagtccaccagtgtgacccctaaataaatcttacaaaaaaataaacagtaacgtaagatacaactttctcacttgtatttgattgttcctaattatttctaactatgtaaatatcgttagtattggatgcaaagctatggcggtagacgtaaggaaggaattatcagtgcaatttagaagttaaataaatttgttatctaataattatttggcaaaatttgtggcagtgtgaacggaactgggttgagtctccgctaccccatatccgagccacgcaccccaggtctgcatttgtgtcgatggcaaatctggtatttttcagcgacgccatgttggattgcgaacaacagttaacagcagcaaacgagaaatcagctcgcagcgcagaaaaattaaaaaatatcgccgtaaaagtgagcccaaccgacccaaaacatatgaaaagtgtgaattaaaggacaataaagatataaatcattaattaagctttgagcaagcgcgaaaagtacgcgaaatcaacgttttgcaaaacgttcgccatacgcgtcgccattggtgtgagcgatagcttgcctgtgtgtgcgtgtggtattggaggaggtgagagcgcctgtgtgtgtgtgtgtttgcgtgcgtgtgtgagagcgagcgagcggcccctatgaaaagcaacagcaacaacgccagcaaaggacccgcaacaacaacaacaacaacagcaagagtaacaagcacagcgttttaatatccaaataatgagtgtcgctgcaatgactatggacgatcaaagaccctgtatgaacagttacgacaaaatgcccccgaccaaatacgagcaaaacctaaatatcctaaacagcagccaaaacagtggggccactggcggccccgcctccccaacgccctccggcttggaggaccaccatcatcatcaccatccgcatccgcaccatcatcaccatca

SEQ ID NO: 30941 - DNA, 459 bp, DROSOPHILA
atggcagaaaccactggtgtgcaaataaaactggaacagcaaaacatcaaggagcgcctgaatctgcacgtcaagcggcgcctgcagcaggatgcggataatcccgccgagagtcccgaattgctgcccaccgatgcgaatgccaagcgcagcaagacgaaagatgtctcaaaaccaagaaaaccctaccaaaaacggacagaaaaaccgaaaacagaggcgaccaagtgcaagaaagttggacaattgggcagtccggcgggtgaagtggatccaatggatgaccaggagacggaaggcttttccccggaggcgccggatggcaaatccgccagacgggattgctgcaaaaatgccgacatcctcaacatagttttgaacgctaagaaacgtagtttaatgcaggatcctgaagttcaggccttctggaccgaaataaccaattgcataaagggctga

SEQ ID NO: 30942 - protein, 152 aa, DROSOPHILA
MAETTGVQIKLEQQNIKERLNLHVKRRLQQDADNPAESPELLPTDANAKRSKTKDVSKPRKPYQKRTEKPKTEATKCKKVGQLGSPAGEVDPMDDQETEGFSPEAPDGKSARRDCCKNADILNIVLNAKKRSLMQDPEVQAFWTEITNCIKG

SEQ ID NO: 30943 - DNA, 4071 bp, DROSOPHILA
accatttcgaccacaataaaatgacaaatgcccgaaaaatctgaccatgttcgcacacgttagaaggagcggcagatgccgtcaaacaagtcccatgacgggactcatcacctacctcatcctcgtgctgctcctgctccacattttggccactccatctggccgaaagcggcctaacctccacccaaaacctgagcctaacaagtgtcgtttgcctgtcagagacgaacggacagtatggacagaccagtagtaggagcaggagcaggacaatgtctgggctttcccttgctgctggcccatcatcatggccatcatgaccatcacgaccatcaggcggcgtttttggggggtttaacaaccagaccaaccgagcaaccaaccaaccgaccggcgggcaatggggcttagtacgatgacgacaagtccaacaactcggacagggacaaggcgaaagcctattaaaaatcatgctaaacggcagtaaaacaatgtgtgtgtgtttcaacaccagttcccagttttgctggccagtttggagtccttgttttcgggtagctgctgcacccgacctaatgcgcattaacgccaaagtcgagatccccaaatccgagatccgagtggagccagcagatatccccgccattgcaattcgttgacgccaataaataaaatgtaatcagcttttcccgcccacccagcgaactctcggcgattgagagtctaataaaagtgctgcttgcagcaaaataaaattcagctcgaaaacaattttaagtagattggcagaatggagcgacagactggagttaaggaatggcaatgcaagttgactggaaattgctccttttggcctcttttgtggcaattgcattttgtatactgcacgttaacactgtactcagacgaaaagcttttcgatggcttttgtacgagtattttgcttactcgaaagttgtttgccattgcattgcaacttaatttacataaatatgaaagctatttgtgtgcacttaaagttaagaaaccaatctttttataaatccaatattagctacttttgattatattataaagcggccagaactttctttcacgtctatgaatactgctttacacagattgttcaaatattttcgaatcacgtactccttgaagctcaactgtcagttggtttcccaagtgctcgaacaccaatatgttcagtttcattttattagtacgccggtagagaacagatcgtttttaaaaaagtccccagaaaaatttttcgtttttttttttctctccaatatagttaaaactttctcttatcttttttcgtttcggatttttcgaccaaattttgagtgtggaaacagacggactagttttaatcacccaaaatttttgtagtattacttgcgttcgaaggggattttttgaaagcccatatccgattttcaaagtatccgaatataaccaagcagaactaaccgccaatcaggatgaacaagctacgtcagattcactgctcgttgaaaaatgcgtgtgtcctgtgcaaaccgcatgtcctgtccagtgctggcgtgagattctcctgcggcgatggcaagacgatggcgaagggcgtggtcgtcggcctctatcagaaggaaggcgacaaggatcccaagctgactcccgccggccacaagattgaccagcgcgtccaaggcaagctgatgaaggcgatctgtgaaacgaagttggacggacgactgggtcgcggcaaggtgttccacaacatcgataccgaattcgcagccgttgccgtggtgggcgtgggcctggagggcatcggcttcaatgaactggaaatgctggacgagggtatggagttcgtacgtgtggccgccggcgtaggtgccagatccctgcagcagcagggtatcaccaacgtcttggtggacggcatggactacgcagagcaggcggccgagggctcccaactggccgtctggcgtttcccggacaatctgtccaagaagaacatgccgatggtgccgaccctggagctattcgagtcgccggatcacgagggctggactcgtggcatcttcaaggcggaggcccagaatttggcaagacgcttaagcgatgcccccgccaactgcatgacgcctaccatgtttgcccaggccgccgtggacgctctgtgtccctgcggcattaccgtggaggttcgcaccatggactggatcgaggcccagcgcctaaatgcctttctgatgatcgccaagggcagctgtgagccgccagtgctcctggagctgagctactgcggcaccgcgcccgatgacaagcccattctgttcgtgggcaagggcatcaccttcaactctggtgccctcaacctgcgcccttgcagaggcatggatgagtatcggggcagcatgtccgccgccgcctgctgtgtggccatgatgcgctgcatcgccgccctgtcgctgcccatcaatgtgacgtgcatcattccgttgtgcgaaaacatgccctcaggaatgtcggcgaaacctggcgatgtggtcaccctgctcaatggcaagtcgatggccatacgtgatctggacaaggctggtgtggttgtgctatcggatcccctgctctacggacagaagacgtatctgcccaggttggtggtggatattgccacccttaacacgggagtgaagaaggccttcggtggtggcgccactggcatctggtccaactcacactacatctggaagcagttccagcgagctggctccatttccggtgaccgtgtgtggcgtctgccactctggcaatactacaggcgccaggtcaccgatgagcgcgcctatgatctgagcaacaatggacgtggattggccagctcctgcctggcggcggccatccttcacgaactagtgccctgcgtggactgggcacatctcgacacccgtggcactggactcctgtccaagtacggtctagtgccctatctaactaagaagcgtatgaccggacgacccacccgaacccttgttcagttcgtctaccaaatggcctgtccggagatgaagtaatccatttagctgatttaggcggttctgttgccgtgtgatcagtgatcagtgcagtgatcagtggccgattcacattcgaccaagtgttatatttcgtttgatattttcaagtaaatcaaagattttcggcgtgattttggcataaaaagttttcatatattctattaaatgctaactggcggaggttactgttaaagcttcaataaatttaatctacagttagattttaatacgatttcatggctatactttcttttcattttccccccaactcaggtgtgtctgggtgtctcctgtacacacgccctgctcatttcgcattttcacattttcaggacacttttcgtggccttttgcctggttgcgcacaaagacgcaccattggccggggactttgccttctggttcgccaaggaaatacagataaattaaattcaggaaaccccaagctgcgcgaaagtttttccgccagtgaaagaaaatgttaattccgagacgcgggtggaaacggagtggagtggactggagtgcatttccctggcacacgcttcaagtgcttgaggttggccaaatgaatatatataccgtatcagccgccatatatctatatcaattggtccagacagcgccccaaaatgtcgggccaacacacatacacttggaaaatataatctgctgtttgaacattaagtaaattaagtgagagagatatatgaactaggtgtggtgaagtgatttcattcacgaggtaattttcaaatttccaaagttatatggatactaaagtttaggaactagcctttctaaaggctaatagcttagataagcaaaatgtaaggcctttatttaatctaacatacgataataatgtatataccaaaatgggctaattcgcaagagtggcactccaaaattaactgaattgatggcttttgtctaagaatgtttagtacataattttccacattttccagtctataaaatttgtttttaattcaat

SEQ ID NO: 30944 - DNA, 2071 bp, DROSOPHILA
tatttgtgtgcacttaaagttaagaaaccaatctttttataaatccaatattagctacttttgattatattataaagcggccagaactttctttcacgtctatgaatactgctttacacagattgttcaaatattttcgaatcacgtactccttgaagctcaactgtcagttggtttcccaagtgctcgaacaccaatatgttcagtttcattttattagtacgccggtagagaacagatcgtttttaaaaaagtccccagaaaaatttttcgtttttttttttctctccaatatagttaaaactttctcttatcttttttcgtttcggatttttcgaccaaattttgagtgtggaaacagacggactagttttaatcacccaaaatttttgtagtattacttgcgttcgaaggggattttttgaaagcccatatccgattttcaaagtatccgaatataaccaagcagaactaaccgccaatcaggatgaacaagctacgtcagattcactgctcgttgaaaaatgcgtgtgtcctgtgcaaaccgcatgtcctgtccagtgctggcgtgagattctcctgcggcgatggcaagacgatggcgaagggcgtggtcgtcggcctctatcagaaggaaggcgacaaggatcccaagctgactcccgccggccacaagattgaccagcgcgtccaaggcaagctgatgaaggcgatctgtgaaacgaagttggacggacgactgggtcgcggcaaggtgttccacaacatcgataccgaattcgcagccgttgccgtggtgggcgtgggcctggagggcatcggcttcaatgaactggaaatgctggacgagggtatggagttcgtacgtgtggccgccggcgtaggtgccagatccctgcagcagcagggtatcaccaacgtcttggtggacggcatggactacgcagagcaggcggccgagggctcccaactggccgtctggcgtttcccggacaatctgtccaagaagaacatgccgatggtgccgaccctggagctattcgagtcgccggatcacgagggctggactcgtggcatcttcaaggcggaggcccagaatttggcaagacgcttaagcgatgcccccgccaactgcatgacgcctaccatgtttgcccaggccgccgtggacgctctgtgtccctgcggcattaccgtggaggttcgcaccatggactggatcgaggcccagcgcctaaatgcctttctgatgatcgccaagggcagctgtgagccgccagtgctcctggagctgagctactgcggcaccgcgcccgatgacaagcccattctgttcgtgggcaagggcatcaccttcaactctggtgccctcaacctgcgcccttgcagaggcatggatgagtatcggggcagcatgtccgccgccgcctgctgtgtggccatgatgcgctgcatcgccgccctgtcgctgcccatcaatgtgacgtgcatcattccgttgtgcgaaaacatgccctcaggaatgtcggcgaaacctggcgatgtggtcaccctgctcaatggcaagtcgatggccatacgtgatctggacaaggctggtgtggttgtgctatcggatcccctgctctacggacagaagacgtatctgcccaggttggtggtggatattgccacccttaacacgggagtgaagaaggccttcggtggtggcgccactggcatctggtccaactcacactacatctggaagcagttccagcgagctggctccatttccggtgaccgtgtgtggcgtctgccactctggcaatactacaggcgccaggtcaccgatgagcgcgcctatgatctgagcaacaatggacgtggattggccagctcctgcctggcggcggccatccttcacgaactagtgccctgcgtggactgggcacatctcgacacccgtggcactggactcctgtccaagtacggtctagtgccctatctaactaagaagcgtatgaccggacgacccacccgaacccttgttcagttcgtctaccaaatggcctgtccggagatgaagtaa

SEQ ID NO: 30945 - protein, 527 aa, DROSOPHILA
MNKLRQIHCSLKNACVLCKPHVLSSAGVRFSCGDGKTMAKGVVVGLYQKEGDKDPKLTPAGHKIDQRVQGKLMKAICETKLDGRLGRGKVFHNIDTEFAAVAVVGVGLEGIGFNELEMLDEGMEFVRVAAGVGARSLQQQGITNVLVDGMDYAEQAAEGSQLAVWRFPDNLSKKNMPMVPTLELFESPDHEGWTRGIFKAEAQNLARRLSDAPANCMTPTMFAQAAVDALCPCGITVEVRTMDWIEAQRLNAFLMIAKGSCEPPVLLELSYCGTAPDDKPILFVGKGITFNSGALNLRPCRGMDEYRGSMSAAACCVAMMRCIAALSLPINVTCIIPLCENMPSGMSAKPGDVVTLLNGKSMAIRDLDKAGVVVLSDPLLYGQKTYLPRLVVDIATLNTGVKKAFGGGATGIWSNSHYIWKQFQRAGSISGDRVWRLPLWQYYRRQVTDERAYDLSNNGRGLASSCLAAAILHELVPCVDWAHLDTRGTGLLSKYGLVPYLTKKRMTGRPTRTLVQFVYQMACPEMK

SEQ ID NO: 30946 - DNA, 2201 bp, DROSOPHILA
cgcataaaaggccaagcggaagtgaaaggtcatcggcaaggctgaaataattgctcaggtctgtgcgttaaacgcacaataacgagcatttaaaagtcaattatggaagaaaaggcgattgcagcagactggcgcatctgccaattgaatactattcgattattcgaatgttcgcctcgaatcaaaacgattcgaatcgagtccgtcgggtcatttcgcattttcgccttcctgaaagttgttcaatttgtcagagacctccgttcacgcaggctgtcagtaatttattgatttcactttattgcacatcgattaaacacattggccggcattgtttgcatgcactattgcactggctccctaatttcaaatacatttttcatgggcttatactaatttgaaatgagatgaaaatcacacagtatctatgatagcatttgagcaagaatggaaactgcagaatgtcactatttggtatttagttgaacaataaaacaatgagtggccatttctggggcgtatgttttttcattaaatgtctatctaatgattgcatttgaagaatgcttggaattccacgaatctttaagtccataccaagttaccttagaaagagttaaacgttttggattcttactataaaatgacataattttggaaaatttttagtttttaaatatttaagaaatcatagttgcttatttggtaatgatgtaattcacttaaaaatattttaaacttatgctaaatgtaattgaaatgaatggttttgagcaatggctacctaactttttcgcataacctgcgagaatctttagccaagttaagagcatttcgatgagttaatgagtaaggctcctttttgcaaataaatagccttcaattaacagacaactcatagtgtcctgttgcacatgtgtactttttgtttttctgtaagtgaatcttatggataacctagcttagattgcacattgggcccgtttgtagaccagtttcaatgcttcgtggcgccttcgaagctaacatccgcatggaaacccgtgtcgtcggcgtggtagatgacattctggatccttccgtccggcaaaaggatgtggtactggccgcgtgtcacgccatggagatcacgattctgcttgtggccaaaatcgttgccggtatggaaatcacgtatgcgataaccgaactcatactttgaggcgtactgctgcagctgcaacgaaagcaaaggggtatcacaatcgggggattagttatgtatttgcatagattgttcagtaaaccgataagtagaattcagctgagaggggcttcaattcgttttcccgcctcccgccacacgcctccaacgatatgcacattccacacacagtgctgcaattgggaaattcgtgcgcatgctaaaaagtatgcgatgcaaaatgcattaagcagactgtcatgtacagtgaggactgggcgcgacaaccggaagaagcgccgtgacaactgtagcttaagtaacagccagcgtataagacaattttgtgattgaaagcatttgcacccttcgttattcggggaatatgaagctgtttgttactctttacagctgatatgaaaatattggaataactgtgtatacttttttaagaaattatagaaaaagaatatgtagaactacagtatattagcgtaatggcattttgatatgctgttgggatatttaatatacaaaatacgaaacgaaatacgatttgaatatacggatcttgcgctgttgctcgacaagatagtgtatttaatttatggttatacttctacctaaaaggatattcgcagtgcccaactttcgtctatcgagtgcaaaagcaaaattgggtcttggcagatttcggtagctggagctggtgatgattgggatgtggagacggagtggggcccacgaggtggagtctgtcagtcgcacggctcggtttgttatgcatgcgattgtaaattgtatcgtaatgaaatttgcaacaatatacgagaccagtccccgagatcccctatcgaaccccctcaaaatctgtggcattctgtatgcaggaaggagagctgtcgttttgttgtgtcctgaacaattttggttttgcctttttattgtaagtatttcgcatttcagccagatgaaaataaaataagcaaacggatgtgtgttcgcggctgtgggtgag

SEQ ID NO: 30947 - DNA, 201 bp, DROSOPHILA
atgcttcgtggcgccttcgaagctaacatccgcatggaaacccgtgtcgtcggcgtggtagatgacattctggatccttccgtccggcaaaaggatgtggtactggccgcgtgtcacgccatggagatcacgattctgcttgtggccaaaatcgttgccggtatggaaatcacgtatgcgataaccgaactcatactttga

SEQ ID NO: 30948 - protein, 66 aa, DROSOPHILA
MLRGAFEANIRMETRVVGVVDDILDPSVRQKDVVLAACHAMEITILLVAKIVAGMEITYAITELIL

SEQ ID NO: 30949 - DNA, 5417 bp, DROSOPHILA
aaaatgaacaatttaccataatttgtcattagtatatgaggtatgctagtccgcatgtcaggtggtaatccattagtataaacatggtatggccacttgacagtcggcttgctagcccgattatcctcctatttctaatcgaaacaaaataagtgcttaggtgacttccatggttgtgtcttgttgctttcgagtttggaaggcatgttttttggaaaattgtgcgctgtgtagcgttgccttcgtgaagaatattcaatctcatggaaatctatacctccccgtatccttctcgagccatgtggatttttatagtgcctggaggcatcggagtcatcgcaacaacgagctaaatgtcgataatttcgtgaccgtgagtagttcttatccctgtgcatgggacaatgttctgtaaatcggaaacgattcccctttggttcaatcacacagggatcacttagttcggtggtaaactcgtagtttcgatatgtaaccaatcctcgacgtatgcccggattttgtgactcagttggccgtgaggtgagcaagtaatctgtgcacggcctgcatttctctacatgcctcttagcccgctttttgcgctcccgatgttcctcccactcccgctgggcacgggataccaaaggctgaggaacttgacagggagctgtctggcgtgtatcatttgagtggcagctccaatgactgcaactatccgaggaacaacttctgttacgtagtggggatttctttgcttgcgacttctgataattcctgcctcttggtggccgcctggaacaggatggttgcccaaaggaggagttggtactcctgtacgtaacgatttctgagcccgatgtgtgcgtatttcgtatcgaattgcctcttttctttatagttgtagaccataacttgggatctcttggtccgcgtatatccaggatactgtcctgatccctgaaggagattttcctgtccaaaggattcatttcgctgcatattacactttgcttaactttttgatgctccagatcagaagtctccctgaaatttatagaccgggggctatgcctaggtctttcgctcaccgattgattcgacttaaactcaattgctttagatcctgaccagagaaatcgcttggcaaatgcatgtagtctgggcagcaggcgtggtttctttgagagatgtccatctgaatctgcagtcaactttcttgagataagtcccggccatctgggattacttttgcatgtagaaagattatcttcccagtcaagtgaactgtcaattggagctcctttccgatttctactgtgtcctagtccaaatgacttaagattcttggcacgcgaacaagttagatgattgtggtgatcgagagaatctgagctagttttctcaacgatctgttgatgtgtggaagtgctgcaggtacatacatcctcactttgatctgaataatcccgactgcaaatggttggctggatacatctttggcgcactccacaactccgcctgctgtcagcctcctttaatcgccgcttcacctcgccccttacattcggatgcgttgtggaccagtagtaagagtacggcttgctgtctggaaacatttcccgctggcaccaattatgttccgcaagacgacgtttctctgccttccgaatatccggatcgacggcggaccagaggtagcaatacggtagtggcttagtcctcttgcacttggattggattggagcacagccgcgatcaataagcttctgtttttcggagcgatgaatgaaacctttatagccaaggctatttctctgatggtttggtgggatttcaatatcgttcggatcataagaatagggtgaatggcggtattccagaccaagttcctgatgattggagacggatgcatagaaagtgttctctgaggaagaatcttcctggacatcttcttcaatcttacaatggtcgtcatagcacttcttctcactactggtcactcgtttcttttttccattgcgggatccatagtttgtgcccttgatggctttgtagaaaggactgttctcgtacgcaatgcagcggggatctcgaatccttttggacttcccagttttaccagcagatatgggaggagcacaggatttagacaactgaatgggctgatcaatagagcaagaacagctttctataatttccttgggatacaaactaggctgagatttcgatacaattggattaggaggctcttgattggcttttaaagatggattgctcgcataaattctgtgcaatctagaaataggctggctctcctttgccttgaagttatccttagcacccttttcatctttttttactataacagctggtttttgtttagcaaatggcgagaattgttttttcctgaccttattgttggatacaggaggattggaagcctcttggcttaaaggtggctgcggaggactttcgtttttcggaggacatgagcaatcgcggtgacgaaagcagtcaattttggtgcatggaaactctacgggtgcagctgtggagatgccaggtcgcatatgtcggctctttcccgccgcatcgtacttgtagtaggagaagctgggcttgcgggacagatactttcgcggcagcttctctagaccacgcattctggcatggtgctgcttcagaagggtcaggaactcgggggacacccttcgtcctggaagggcgtaagttgccgccttatcctttcgacgaagggcatgtcttacgggcacatgaaacctgaagcagaacctccttttgcatggctttctctcggctgtggatcgtcgggtgtccagataccattccgttgccttgtcatccacatcgaagtactgcacaccacttctgactattttgggtggtcgcttaagatcctccagggatggaggatcgcgtggcacagctgagcagctcagtgaatctagaccgttgggttcacaggtcaagaagtcgtagtaggaggtgcaggtattctgcatgttgagcttctttatcttaagagcacttaaaatattcatctcgaaaaggggaattttgttgtattaaaactgaaaaattagaaaactaggctagtttaacataggttggtggatcgatccataaatatgtcatttattatattaaaacattatcatatggttaacaaattaaaattattcctagaattaagaattaatcaaaggactatcataagataaacagatcttatgactttccaatgattaatttttgcttctaagataaccatatagtatcatttaatttagcaaatcttagggtagttcatattccgatccctttgccttttctgtaattcaagataatatgaacggagttccaatcgacgcctttgggccattgctttctgcataaagtttgtttctcgttgatttttgtctaaaaggagattaactatttgttaggatagagatacaagattgactaacttaccctccaaaagcaatttgcatagatagcaatcacattttttcctttcacttagacgacagactttagcatctggaggcgatttcttcatttccgattgataagtatccatttggtccctccagattttgtccgaatatagacgtactctaacgggtttccgcggatgcatttccggcgacatcttatccgcggaaatcttgggtacaagttcttcgtgtggtgccaatattctaatcaatgaggggtactttctttgcggtttacctttatccaccgcctggaatcctttagtcggttgcatattacggagtctgactatattttccgtcacaaaatcgcgtggtttctttttgggtcgaaagtcttcgcgaatggcaacctccttcatcagtttatcgatccgtgcctgcacagatggtcttgcgttggcgtagaaagactcccgaatctgttcccgcatatgcaaatccatgacagcttgactctcgcgagttttgacctcctggctcgtcctcctcagggacaggatgctcacgagattatcatgtggtcccaaggcatattcatgcatccgggacttgttcttggtccgcatcgactgggattttttatggattttctcatggactttctcttcctttgccacaccggctataatgtcgttaattgtcttttttatgccatcaactggatcgtagtcctctggaaaagtcgcgaacaagtgtgcgtccgcatccgcatgcggttcgtccttgttgtgctctttctgccgcttaggtatcaaagattgggcaatggccacagtgctgattatcgatcctacagatggttggtacctatccgatgacgtctgactgggagttctgccatagtaagtgcttttctcgcttttcaaataggaaatgggattcttcgagttcatctggtttaatactttccgatctgccattgaatcctttatgtagtaatagaatttcttgagctgaatcttccgtccaggagtgggggcaaagcgtttcctcaaagaacaagttgatccgaaagagaactcacttgatgtacgagatcggtttgtgctctgaggctgggacgtggactttctatttttggtctttgcagccaatggaattgtatccgaattttttgaatctcccgcttccttggccacagaatatttcccaaaagcttgcaaaatttctggctttgttataacagatatttggtgatagggccgcataactttggtctttttcggttttagtactttctcagatgactgcgaaactacaggctcctcgactattggtagattctcataaagcgaagtggacattatggggtcctggtccatccagaacgaattacttgtgctttttccgacacgatttattcgaaaatggctggttaaagcccggttcagctctggtatgatcttttccttgccacttagcatttgtccaaatggtttggagtgattttggttcttattattgactttcatatgtctgtaggttttgctatcatggagtccattacttggctctagatctttatctgtcttagactttcctgtgctttccttcttgtcttttttggaattcaataaagtcctgcttcttaggaaaggatgatcttcgggcatcttcatatcgccgtcatttaatagctcatcaaaggtccttgtttcagtcctccgcctgtcctttggcttatctttggatgcccaggaaaacttggaggaatgtccaaggcgattagatgactttagaattggatgaaactcagaaattttgttagccttaccctcgagcattttatcaaaagtctcggtgtacggagctgaagtttttctccggtctgaagtacgacgttcttcgggaattttcaattcgtgcatactcctcagtgtcgtatgttttttg

SEQ ID NO: 30950 - DNA, 2160 bp, DROSOPHILA
atgaactcgaagaatcccatttcctatttgaaaagcgagaaaagcacttactatggcagaactcccagtcagacgtcatcggataggtaccaaccatctgtaggatcgataatcagcactgtggccattgcccaatctttgatacctaagcggcagaaagagcacaacaaggacgaaccgcatgcggatgcggacgcacacttgttcgcgacttttccagaggactacgatccagttgatggcataaaaaagacaattaacgacattatagccggtgtggcaaaggaagagaaagtccatgagaaaatccataaaaaatcccagtcgatgcggaccaagaacaagtcccggatgcatgaatatgccttgggaccacatgataatctcgtgagcatcctgtccctgaggaggacgagccaggaggtcaaaactcgcgagagtcaagctgtcatggatttgcatatgcgggaacagattcgggagtctttctacgccaacgcaagaccatctgtgcaggcacggatcgataaactgatgaaggaggttgccattcgcgaagactttcgacccaaaaagaaaccacgcgattttgtgacggaaaatatagtcagactccgtaatatgcaaccgactaaaggattccaggcggtggataaaggtaaaccgcaaagaaagtacccctcattgattagaatattggcaccacacgaagaacttgtacccaagatttccgcggataagatgtcgccggaaatgcatccgcggaaacccgttagaataaagaagctcaacatgcagaatacctgcacctcctactacgacttcttgacctgtgaacccaacggtctagattcactgagctgctcagctgtgccacgcgatcctccatccctggaggatcttaagcgaccacccaaaatagtcagaagtggtgtgcagtacttcgatgtggatgacaaggcaacggaatggtatctggacacccgacgatccacagccgagagaaagccatgcaaaaggaggttctgcttcaggtttcatgtgcccgtaagacatgcccttcgtcgaaaggataaggcggcaacttacgcccttccaggacgaagggtgtcccccgagttcctgacccttctgaagcagcaccatgccagaatgcgtggtctagagaagctgccgcgaaagtatctgtcccgcaagcccagcttctcctactacaagtacgatgcggcgggaaagagccgacatatgcgacctggcatctccacagctgcacccgtagagtttccatgcaccaaaattgactgctttcgtcaccgcgattgctcatgtcctccgaaaaacgaaagtcctccgcagccacctttaagccaagaggcttccaatcctcctgtatccaacaataagcccattcagttgtctaaatcctgtgctcctcccatatctgctggtaaaactgggaagtccaaaaggattcgagatccccgctgcattgcgtacgagaacagtcctttctacaaagccatcaagggcacaaactatggatcccgcaatggaaaaaagaaacgagtgaccagtagtgagaagaagtgctatgacgaccattgtaagattgaagaagatgtccaggaagattcttcctcagagaacactttctatgcatccgtctccaatcatcaggaacttggtctggaataccgccattcaccctattcttatgatccgaacgatattgaaatcccaccaaaccatcagagaaatagccttggctataaaggtttcattcatcgctccgaaaaacagaagcttattgatcgcggctgtgctccaatccaatccaagtgcaagaggactaagccactaccgtattgctacctctggtccgccgtcgatccggatattcggaaggcagagaaacgtcgtcttgcggaacataattggtgccagcgggaaatgtttccagacagcaagccgtactcttactactggtccacaacgcatccgaatgtaaggggcgaggtgaagcggcgattaaaggaggctgacagcaggcggagttgtggagtgcgccaaagatgtatccagccaaccatttgcagtcgggattattcagatcaaaggagacttctgatctggagcatcaaaaagttaagcaaagtgtaa

SEQ ID NO: 30951 - protein, 719 aa, DROSOPHILA
MNSKNPISYLKSEKSTYYGRTPSQTSSDRYQPSVGSIISTVAIAQSLIPKRQKEHNKDEPHADADAHLFATFPEDYDPVDGIKKTINDIIAGVAKEEKVHEKIHKKSQSMRTKNKSRMHEYALGPHDNLVSILSLRRTSQEVKTRESQAVMDLHMREQIRESFYANARPSVQARIDKLMKEVAIREDFRPKKKPRDFVTENIVRLRNMQPTKGFQAVDKGKPQRKYPSLIRILAPHEELVPKISADKMSPEMHPRKPVRIKKLNMQNTCTSYYDFLTCEPNGLDSLSCSAVPRDPPSLEDLKRPPKIVRSGVQYFDVDDKATEWYLDTRRSTAERKPCKRRFCFRFHVPVRHALRRKDKAATYALPGRRVSPEFLTLLKQHHARMRGLEKLPRKYLSRKPSFSYYKYDAAGKSRHMRPGISTAAPVEFPCTKIDCFRHRDCSCPPKNESPPQPPLSQEASNPPVSNNKPIQLSKSCAPPISAGKTGKSKRIRDPRCIAYENSPFYKAIKGTNYGSRNGKKKRVTSSEKKCYDDHCKIEEDVQEDSSSENTFYASVSNHQELGLEYRHSPYSYDPNDIEIPPNHQRNSLGYKGFIHRSEKQKLIDRGCAPIQSKCKRTKPLPYCYLWSAVDPDIRKAEKRRLAEHNWCQREMFPDSKPYSYYWSTTHPNVRGEVKRRLKEADSRRSCGVRQRCIQPTICSRDYSDQRRLLIWSIKKLSKV

SEQ ID NO: 30952 - DNA, 3353 bp, DROSOPHILA
ttaaagaagcctagcttgtttaaagtcactttgataatgattattataaatcctttacaggtaaatacccggtgaagcccaagtttccagccgttggcggcaatgagtgtgtggcggaggtcatctgcgtgggcgacaaagtcaaaggctttgaggcaggacagcacgtcattcccttggccagtggcctgggcacctggaccacccatgccgtctacaaggaggatcaactattgatcgtgtccaagaaggttggcttggcggaggccgccacctcgacagtgaatcccaccactgcctaccgaatgctaaaggactttgtgcagctctgtccgggtgacacggtcatccaaaacggcgccaatagcgccgtcggccaggcagtgcaccaattgtgccgagcctggggcatcaatagcgttggcattgtacgcgaccgcccagaaattgccgaattgaagcagatgctgcagtgcctgggagccaccgaggtcctaacagaggccgaaattcgcaccagtgacatcttcaagtcgggcaagttgaaaaagccccgtctggccttcaactgtgtgggcggaaaaagcgccacggaggtgtcgcgtcatctagacaatggcggagtgctggtcacctacggcggaatgtcccgcgaacccgtcacagtggccactggacccctcattttcaaggacattgcatttagaggcttctggatgactcgctggtccaaggagaactacagttcaccagagcgttcgaaaatgttcaaggagatcttcgagctgatggagcagggaaagttcgtggcccccaaccatgagatggtgcccttggcaaagttcaaagacgcggcggccgctgccttgagcttcaagggattcaccggcaagaagtacatactggatatgagcatttagatgcgtaactcgaggctaagcctgctgtttatttacatatacgacttgtgtattaaaattgttatctactgtgatacactttagaccatctccacctcattggactgatacttcagctgcagagtcatggcggacggcgaggtggcatcggtgactgtgagctgctgtccatcgtgtagacccagttcgcccaggctctgagtaaggttctttcgggtggcctcttcaatgctctttaccccggacatgtacaaagtccgccgcttgccgtccttcatcacagtggtcaaggctgggcttttcagctggaaacgcggggaatcacacaatagctttatcacatcctccagcgtggtggtgttgggatcctcaatcggcaacggctgcggtgtattgctgcacgccaagcagttttccgacttctcggcctcgtaggtgtaggtatagattccgtccaggtcgttgaagttcaggtagtttgccatgctgtcatagcagctggtggccaacttaaagacctccaaagcacaggcggcggcaatggctgcattggtactggccacagctggaatgatgtgcttgacaacgccctggaccaagcgataggtcactccggtgatgttaaactcattggaccgctccagtgcccgttcgtagatccaaccaatgtgctggggatcgtccccatcgaggggcactccaaacggattctgtttctcccactgtatgatctttacgtactcaatgcaatgctccggaagcctgggagtatttgctatggtgcataggggatagttgacctgcggcgggaacaggtccagcgtgcactcaatgcaggccgtgaaaccgggcaggatgacgcgtgcgttccccttgaagccctcggtgccgccatcaatcatgggcactatggagctggtatctatggtgccgtcctcctcatatcgcagcattgatagcagcatgccattgatccaacgccgggcgacaatggagtctaggccacagacaaccaggtggaactgctgatagaaggactcatcgaagtcctggattttcttgaaatgcggcgtcacccggcaagtaggcactcttgcgttgatgaagcgagccgcacactccgccttggaggcgccaatgtctgtgcgacggaacagaaactggcgattcaggttggacagctcgatggtgtccatgtcgatgacgtgcaggttgccgaagcccatcagagccagatccttcagcagttcgcagcccaggccaccggctccgatgatcagaacctggcacttggtctgcaagaactccaggttttccgacgaggccgcgaaaccgtccttgcagaagggaccttcgcgttccaggatgttccgcagtccattgaaacgcttgctctggaggattaagccaggattgggtgagtggacagacatttttcaaacaaaatcgagactgtgattcgtttagcaacactactcgggtcggaataaatattagtgatggtagcttatgtgaataagaatttatataagacatattgtaaataaaaaaaaatattgtaattatattattattaatataatcatttcaaaagtattaataggataacattaaattattttttatttaattccgaaagaattgttaacttgaaacaatctctatcatctctaacacgatcagatcgatattttctgttagcatgactaccctactgttatttcgagccacccattaatggtcacactgcgcagatggcgtcaatttgaaaacaacggaacttgaaaaaattcagcgcgtcttttgcagcgtgctccgtttgccactcgtttttgggtaaatactactgattttcagtagatttcgaagttgaatcaaggaaaccagtgtgcaggcagtccctgcgagtgaaaaccgattcgtagaactaccgagacaagcaaaaatggcgctctccgcattggcgtccttcgatgatctgcgacgctgcatgcaagtgcttaccgatggaactcctgaggagggtgagtaaaactgaaaacacgcaaggcaaatgaagccctacatgatgcttgtattccatttagagttcctgcggttcttgcgcatgttcgagcagtaccacgaaaagtgcgcgggctacgcggccgagacggccaggatacaaaacgagctggacaagtcgttgaccaaaatgggcgacctggagggcaaactctttcacgcacgccgcatcatcgacatggagatcaaggcgcgccgccaggcggaacacgaacgagatgccatggagagcaagatcatggctgtggcagatctgctgcgacacgagcgcaatctgaacaacgagacccgcgacaagctggcctttctgcacacactgccctcgtcgcgaaagcgcaagtccctgaatgccgtgcgggaggacaagtc

SEQ ID NO: 30953 - DNA, 1353 bp, DROSOPHILA
atgtctgtccactcacccaatcctggcttaatcctccagagcaagcgtttcaatggactgcggaacatcctggaacgcgaaggtcccttctgcaaggacggtttcgcggcctcgtcggaaaacctggagttcttgcagaccaagtgccaggttctgatcatcggagccggtggcctgggctgcgaactgctgaaggatctggctctgatgggcttcggcaacctgcacgtcatcgacatggacaccatcgagctgtccaacctgaatcgccagtttctgttccgtcgcacagacattggcgcctccaaggcggagtgtgcggctcgcttcatcaacgcaagagtgcctacttgccgggtgacgccgcatttcaagaaaatccaggacttcgatgagtccttctatcagcagttccacctggttgtctgtggcctagactccattgtcgcccggcgttggatcaatggcatgctgctatcaatgctgcgatatgaggaggacggcaccatagataccagctccatagtgcccatgattgatggcggcaccgagggcttcaaggggaacgcacgcgtcatcctgcccggtttcacggcctgcattgagtgcacgctggacctgttcccgccgcaggtcaactatcccctatgcaccatagcaaatactcccaggcttccggagcattgcattgagtacgtaaagatcatacagtgggagaaacagaatccgtttggagtgcccctcgatggggacgatccccagcacattggttggatctacgaacgggcactggagcggtccaatgagtttaacatcaccggagtgacctatcgcttggtccagggcgttgtcaagcacatcattccagctgtggccagtaccaatgcagccattgccgccgcctgtgctttggaggtctttaagttggccaccagctgctatgacagcatggcaaactacctgaacttcaacgacctggacggaatctatacctacacctacgaggccgagaagtcggaaaactgcttggcgtgcagcaatacaccgcagccgttgccgattgaggatcccaacaccaccacgctggaggatgtgataaagctattgtgtgattccccgcgtttccagctgaaaagcccagccttgaccactgtgatgaaggacggcaagcggcggactttgtacatgtccggggtaaagagcattgaagaggccacccgaaagaaccttactcagagcctgggcgaactgggtctacacgatggacagcagctcacagtcaccgatgccacctcgccgtccgccatgactctgcagctgaagtatcagtccaatgaggtggagatggtctaa

SEQ ID NO: 30954 - protein, 450 aa, DROSOPHILA
MSVHSPNPGLILQSKRFNGLRNILEREGPFCKDGFAASSENLEFLQTKCQVLIIGAGGLGCELLKDLALMGFGNLHVIDMDTIELSNLNRQFLFRRTDIGASKAECAARFINARVPTCRVTPHFKKIQDFDESFYQQFHLVVCGLDSIVARRWINGMLLSMLRYEEDGTIDTSSIVPMIDGGTEGFKGNARVILPGFTACIECTLDLFPPQVNYPLCTIANTPRLPEHCIEYVKIIQWEKQNPFGVPLDGDDPQHIGWIYERALERSNEFNITGVTYRLVQGVVKHIIPAVASTNAAIAAACALEVFKLATSCYDSMANYLNFNDLDGIYTYTYEAEKSENCLACSNTPQPLPIEDPNTTTLEDVIKLLCDSPRFQLKSPALTTVMKDGKRRTLYMSGVKSIEEATRKNLTQSLGELGLHDGQQLTVTDATSPSAMTLQLKYQSNEVEMV

SEQ ID NO: 30955 - DNA, 3157 bp, DROSOPHILA
aatactaatactaaattattttgttgtacgaaacgaaagaaatgcattaaaactcgtgttttgtaattctatttaattaaaacaattcaaatgcgaaataaacatttacaaaaaaaaaaaataacaacataacccgacgactttttactttaatacccggcgataagaaataaaacccatgattctgttgattttcgaatttgatttattcattgaagttctcaatcgtagtagttatttgacacattgaaattgaattttcgatataataccatgatcgatccgtgcggatcactatttggttttctacaaaacactcaattaattgtgatatttaaatatgtgtgcatgcatgctaatgcagatgccctgtatcggggttactcctcctcctcctcctccttctacgttccctctattctgaccaccatttactgactagaaatgccgcttcaactttaatcatccaactaactcaagtacaagctgggttcatacgtttctttgtgctatgggctgccagagggggtttcatttcgactaaactttgaagtgcagttgcagattatgcgtaagtggatatcaataccgtctcctcctcgttcgtcccgatgctgtggtgtaatctcgtcaacgccagcgctgccagttggtgctcctaaatacatgctgctgctctacgcgctagctttcaaaggccctaataatatcggcttggcatgatgccgcaagtcttttgtaaattattataaatatcattatagttaaggtacaactaaatatcatcattaatatagtccaaattagctaacacggctcgctaaagctaactaaacataaatacataaatacatatatacgaacgtacgaacacaaacaaagtcacagaagtgcgcctcataaaactaaacctgggccgtttgggttggtgcttcattgtgtattagcagcatggcaacgcaatgggtatccggatccccatttctaccggaagccatcgtcacctggcaagcccggaactggctgactgggccttcgcctgcttgctattcgtgttgaccgcattcgatgtggagccacctgcgttggctggagctgcagccgcattctgctccccccgttccctttcggcccgatgatggtgtccatgctgatggtgatgatggtgacgcctaccgccgcgatagtgccgccgattgtggtgatagttattgttggtcggctccggcatgatgcggtgggtctcctgcaccactggcgcaaatgtggaactagttgtgggcttgataacctcctccttcgacggtccttctagctttttggctgcctcggcctcctcacggcggcgcctgcgcctgatgtcctcctccgtctcgatggaaatcacggcagagccctcggcgttcacatcgataatggcgccgcgactcttctgctgcagatacagctccgacatgcgctgctgcatttgacgcagctcctcggtcaccttaaattccggagcattcagcaactcagatggcggcatggcgcacttgaggctatccgtttcgtcgccgatgtgctcacggcaaacggggcacagcgcctggaagggatcggccgtcttctgcagccaggcaggcaatttatcgaactcctcctggtagttgcgacgtagggcattgagatgccgagccaggcaatagctgtgcaggtagtggaagcactcggtgcgtgtgaactcgtcgccatcagcgaatccatacaaacagacaacgcactggccactgggcagattgctgccactgagatgctctcgcaccacctcgatgaggtcgaaaacgaccggaaaaccaattgactccttgatcttggcgttgcacgcgcttcggattgcctccaggcgggcatcgtccaatccacgcggacgcagcagcttgaatgtggggctctcctccggatagccaggtgttggatgcacctgcagggtaacgcacacgtactgctgctcctcctcctcaccggtcaggggcagcaccgtggtctcgatctgctccacctcgccgcttctcgggaattgcaatactcgctgtagtatcgaaaacatatattgtattgttttacttacctgggtgtgcgtttaatgcaaacatcgtccattaggatggcttccagcgactccacttcgtcttgtaaactgcaagagtacgcaattgttatgcaacattaagctaggaattttaacatttgtttgcttacgcgtccattttatcaccggtcaattcagtttttgagtatttttcgaggttttgtttaaaaaatcgatttgagacacctgaaatttggagaaaacacggcgaccgtttgtcgcttagccaaaaataccagcaaataacattataaatctctttggcgtcattaaaattcaagttggcagcaatgtagcgacggtcatactaacctgcataataattttcgttttactcttttgatggtcaaaaatcataactactactaacaaatgttgcgccgaggctttttatctcgcatcaacgcagcccaatggagccgccaaatgtcggtggtggccaagtccttgaagtacacacagcacggcgaaccacaggaggttctgcaactggtggaggacaaacttcccgatcccaaggacaaccaggtgctggtgaagattctggcagctcccattaacccggcggacataaacaccattcagggtatgctggccattaggatatatcacaaacaaacatatattatgcatgatacaactgaaatatagccataaccggcatgaactgcataattaataacgataatcttctgctgaaacaactggataagaactgaagatcagagatacttgtattctaagtatacccacttgcttgaaagtcagttatgggataatcagaagtaatccatttaaagttaaacgaatgttatcagtacatctttgtactttgaacgatgctcaaggttgtggctttaaattttaaagaagcctagcttgtttaaagtcactttgataatgattattataaatcctttacaggtaaatacccggtgaagcccaagtttccagccgttggcggcaatgagtgtgtggcggaggtcatctgcgtgggcgacaaagtcaaaggctttgaggcaggac

SEQ ID NO: 30956 - DNA, 1095 bp, DROSOPHILA
ctggaagccatcctaatggacgatgtttgcattaaacgcacacccagcggcgaggtggagcagatcgagaccacggtgctgcccctgaccggtgaggaggaggagcagcagtacgtgtgcgttaccctgcaggtgcatccaacacctggctatccggaggagagccccacattcaagctgctgcgtccgcgtggattggacgatgcccgcctggaggcaatccgaagcgcgtgcaacgccaagatcaaggagtcaattggttttccggtcgttttcgacctcatcgaggtggtgcgagagcatctcagtggcagcaatctgcccagtggccagtgcgttgtctgtttgtatggattcgctgatggcgacgagttcacacgcaccgagtgcttccactacctgcacagctattgcctggctcggcatctcaatgccctacgtcgcaactaccaggaggagttcgataaattgcctgcctggctgcagaagacggccgatcccttccaggcgctgtgccccgtttgccgtgagcacatcggcgacgaaacggatagcctcaagtgcgccatgccgccatctgagttgctgaatgctccggaatttaaggtgaccgaggagctgcgtcaaatgcagcagcgcatgtcggagctgtatctgcagcagaagagtcgcggcgccattatcgatgtgaacgccgagggctctgccgtgatttccatcgagacggaggaggacatcaggcgcaggcgccgccgtgaggaggccgaggcagccaaaaagctagaaggaccgtcgaaggaggaggttatcaagcccacaactagttccacatttgcgccagtggtgcaggagacccaccgcatcatgccggagccgaccaacaataactatcaccacaatcggcggcactatcgcggcggtaggcgtcaccatcatcaccatcagcatggacaccatcatcgggccgaaagggaacggggggagcagaatgcggctgcagctccagccaacgcaggtggctccacatcgaatgcggtcaacacgaatagcaagcaggcgaaggcccagtcagccagttccgggcttgccaggtga

SEQ ID NO: 30957 - protein, 359 aa, DROSOPHILA
MDDVCIKRTPSGEVEQIETTVLPLTGEEEEQQYVCVTLQVHPTPGYPEESPTFKLLRPRGLDDARLEAIRSACNAKIKESIGFPVVFDLIEVVREHLSGSNLPSGQCVVCLYGFADGDEFTRTECFHYLHSYCLARHLNALRRNYQEEFDKLPAWLQKTADPFQALCPVCREHIGDETDSLKCAMPPSELLNAPEFKVTEELRQMQQRMSELYLQQKSRGAIIDVNAEGSAVISIETEEDIRRRRRREEAEAAKKLEGPSKEEVIKPTTSSTFAPVVQETHRIMPEPTNNNYHHNRRHYRGGRRHHHHHQHGHHHRAERERGEQNAAAAPANAGGSTSNAVNTNSKQAKAQSASSGLAR

SEQ ID NO: 30958 - DNA, 4520 bp, DROSOPHILA
gctccggaagcctgggagtatttgctatggtgcataggggatagttgacctgcggcgggaacaggtccagcgtgcactcaatgcaggccgtgaaaccgggcaggatgacgcgtgcgttccccttgaagccctcggtgccgccatcaatcatgggcactatggagctggtatctatggtgccgtcctcctcatatcgcagcattgatagcagcatgccattgatccaacgccgggcgacaatggagtctaggccacagacaaccaggtggaactgctgatagaaggactcatcgaagtcctggattttcttgaaatgcggcgtcacccggcaagtaggcactcttgcgttgatgaagcgagccgcacactccgccttggaggcgccaatgtctgtgcgacggaacagaaactggcgattcaggttggacagctcgatggtgtccatgtcgatgacgtgcaggttgccgaagcccatcagagccagatccttcagcagttcgcagcccaggccaccggctccgatgatcagaacctggcacttggtctgcaagaactccaggttttccgacgaggccgcgaaaccgtccttgcagaagggaccttcgcgttccaggatgttccgcagtccattgaaacgcttgctctggaggattaagccaggattgggtgagtggacagacatttttcaaacaaaatcgagactgtgattcgtttagcaacactactcgggtcggaataaatattagtgatggtagcttatgtgaataagaatttatataagacatattgtaaataaaaaaaaatattgtaattatattattattaatataatcatttcaaaagtattaataggataacattaaattattttttatttaattccgaaagaattgttaacttgaaacaatctctatcatctctaacacgatcagatcgatattttctgttagcatgactaccctactgttatttcgagccacccattaatggtcacactgcgcagatggcgtcaatttgaaaacaacggaacttgaaaaaattcagcgcgtcttttgcagcgtgctccgtttgccactcgtttttgggtaaatactactgattttcagtagatttcgaagttgaatcaaggaaaccagtgtgcaggcagtccctgcgagtgaaaaccgattcgtagaactaccgagacaagcaaaaatggcgctctccgcattggcgtccttcgatgatctgcgacgctgcatgcaagtgcttaccgatggaactcctgaggagggtgagtaaaactgaaaacacgcaaggcaaatgaagccctacatgatgcttgtattccatttagagttcctgcggttcttgcgcatgttcgagcagtaccacgaaaagtgcgcgggctacgcggccgagacggccaggatacaaaacgagctggacaagtcgttgaccaaaatgggcgacctggagggcaaactctttcacgcacgccgcatcatcgacatggagatcaaggcgcgccgccaggcggaacacgaacgagatgccatggagagcaagatcatggctgtggcagatctgctgcgacacgagcgcaatctgaacaacgagacccgcgacaagctggcctttctgcacacactgccctcgtcgcgaaagcgcaagtccctgaatgccgtgcgggaggacaagtcctatggcgacatcaactccaccggatcgttgctgtcggatttgtctattacacactccgaggacgacttcctcgatgtgcgcacatcaaaatcttggcgagagcatcgtccttcgctgcccaagaaccagattcctagcgttggcaacaagagatcgcgattgagcactggactgaatggcagtatgtccgggactacaccaaccactggcaaatcgcggcgctctagcgtcggaatcggagtggagcaacacacggtggacgtgggtcaaggcgctgagcgcttttgtgccaccaccaaggtcaccataccccaggatggacagggcgtgattcgtgcagagtcgaccattgagtcgctgcctgtaattgccggcaacgagaggatcggcgacggactatcctcgacgccacggcgatcggtgcttaaagaggccaccgcaccgccgctgacgccggtaaatgctatggcacctcacgttgtcgctgaatccggaacgccactgcagcaccgtccactgatgaggaaccacaccttcagtcagaagacattcttgcgtggcgacaattgcgttcagtgtcagaaacggtaagcttactagaagttctgctccaagtaggttttttttattaattaaatactttttatactcttcagcatacggtttggagccgttgggctgagatgtcgggattgcccggtgcgctgtcacatcgattgtcggtatctgctcaccgttagctgtgtgccgcaaacgggaacaccgacgacgaagaccatgactggctatgtaacggactttgcaccatctattgcacccatgatcccggcactgattgtgcactgcgtaaatgagattgaagcccgcggcctgaccgaggttggcctctatcgattgtcctcgtcggagcgggagtacaaggccctcaaggagcagttcctgcgaggcaaggccactccacatttgggcaacacggatatctatgtgctgtgctgttgtgtcaaggatttcctgaggtccctaacagagcctctcattcccaccagccaatggaaggatttcgcaaacgcagtccaaaatcctgacaccaaaactgcccaggatatgttggttaagtcggtgaagcagctaccacaggccaatagggatacgctggccttcctcatactgcacttccaacgaattgcccagtgcccagtcgtgctaatgccgatcgataacatctcgctcatctttggccccaccattgtgggctactccacaccagatcccgaccagcatgcgatctacacggaagttttcacccagaagcaggtgatgaaggcacttcttgagctgcccgtttcgttctgggagcaatatatcgttatagatccgacaagaacaccggccacagttatcaagcgggtgccaagcaacaaaaatgacttactctcgctatatggtgagttatttatgagctaatttttttaattattctaattatctctccttcacagcaactcccttcaaaggaggcaccattaagaagcggaagttttacggcacaccgccggcatctgcgcacaagaaataacgagactttccttgttggaaagcatttgacgtgttacttaagtttacttcaagtattttgcaagttttttgtttccggccagccaaccccgagctgtatttgtacccaacccaaccataagcttttctttataatttatgcgttcgattataaactaaagcacgttattatcgtactaacataagtatactcaccagagaaataaactaaaatatgcatttgaaaagcaataagaacaatgaacaaatatataaataaacgataaaagaatataacaagtttttattcaagttcaaatatttttgaatctgtttagtgaacttacttttttatattcttgatggcaaattattggaggcatgttagtaaccaaaagtatattaaacatttccggatttggatttggaaacgggaatgtttcgccacaaaacgtgcatcacaactaatggcaaactcgatacaactttggaatatccctttgataggattatctaaaaacgtgataagctcggtcattgaaaatactgactgccgctcagaaaaccccatgactgataattgtgcacagctagagccgtatcatcatcaaactggtttggacaactctcgtaataatacccttaactgcgccatggaaccgtcagtctgtcgattggaacccatttagaatgttcggagcgcatcagaatctctcaattcagctggtgatttttctctccttagccgtcaccatttgcttgggatcccaaaatgccacaagctgcgggcatcgctgtggaggaggcgactgtatccaactggaccagctgtgcgatgggagcgccaactgcttggatggttccgatgagacggtcgccatgtgtgagaaggtctggtgtccgggttatgcatttcgctgcagctacggtgcgtgcatagccagcacagcggtttgcgatggcgtccaggactgcgtggatggttcggatgagcagggttggctgtgccgggcgcagatgcagcaggctaactgcgacaactgggaaatgtactgctcctctggccaatgcatgacctattccaaattgtgtgatggcatccgtgactgccgagatggagacgatgagctggagtccctttgcgagggcgttaccataccaacgactacagtcagttcaacgacaagtacaactacggaaagtagtatccataggataactcccactgttcctgtaacaaggaaggcgtcacgaccaaatcctcttcaggagaacggggagtg

SEQ ID NO: 30959 - DNA, 2333 bp, DROSOPHILA
cagatggcgtcaatttgaaaacaacggaacttgaaaaaattcagcgcgtcttttgcagcgtgctccgtttgccactcgtttttgggtaaatactactgattttcagtagatttcgaagttgaatcaaggaaaccagtgtgcaggcagtccctgcgagtgaaaaccgattcgtagaactaccgagacaagcaaaaatggcgctctccgcattggcgtccttcgatgatctgcgacgctgcatgcaagtgcttaccgatggaactcctgaggaggagttcctgcggttcttgcgcatgttcgagcagtaccacgaaaagtgcgcgggctacgcggccgagacggccaggatacaaaacgagctggacaagtcgttgaccaaaatgggcgacctggagggcaaactctttcacgcacgccgcatcatcgacatggagatcaaggcgcgccgccaggcggaacacgaacgagatgccatggagagcaagatcatggctgtggcagatctgctgcgacacgagcgcaatctgaacaacgagacccgcgacaagctggcctttctgcacacactgccctcgtcgcgaaagcgcaagtccctgaatgccgtgcgggaggacaagtcctatggcgacatcaactccaccggatcgttgctgtcggatttgtctattacacactccgaggacgacttcctcgatgtgcgcacatcaaaatcttggcgagagcatcgtccttcgctgcccaagaaccagattcctagcgttggcaacaagagatcgcgattgagcactggactgaatggcagtatgtccgggactacaccaaccactggcaaatcgcggcgctctagcgtcggaatcggagtggagcaacacacggtggacgtgggtcaaggcgctgagcgcttttgtgccaccaccaaggtcaccataccccaggatggacagggcgtgattcgtgcagagtcgaccattgagtcgctgcctgtaattgccggcaacgagaggatcggcgacggactatcctcgacgccacggcgatcggtgcttaaagaggccaccgcaccgccgctgacgccggtaaatgctatggcacctcacgttgtcgctgaatccggaacgccactgcagcaccgtccactgatgaggaaccacaccttcagtcagaagacattcttgcgtggcgacaattgcgttcagtgtcagaaacgcatacggtttggagccgttgggctgagatgtcgggattgcccggtgcgctgtcacatcgattgtcggtatctgctcaccgttagctgtgtgccgcaaacgggaacaccgacgacgaagaccatgactggctatgtaacggactttgcaccatctattgcacccatgatcccggcactgattgtgcactgcgtaaatgagattgaagcccgcggcctgaccgaggttggcctctatcgattgtcctcgtcggagcgggagtacaaggccctcaaggagcagttcctgcgaggcaaggccactccacatttgggcaacacggatatctatgtgctgtgctgttgtgtcaaggatttcctgaggtccctaacagagcctctcattcccaccagccaatggaaggatttcgcaaacgcagtccaaaatcctgacaccaaaactgcccaggatatgttggttaagtcggtgaagcagctaccacaggccaatagggatacgctggccttcctcatactgcacttccaacgaattgcccagtgcccagtcgtgctaatgccgatcgataacatctcgctcatctttggccccaccattgtgggctactccacaccagatcccgaccagcatgcgatctacacggaagttttcacccagaagcaggtgatgaaggcacttcttgagctgcccgtttcgttctgggagcaatatatcgttatagatccgacaagaacaccggccacagttatcaagcgggtgccaagcaacaaaaatgacttactctcgctatatgcaactcccttcaaaggaggcaccattaagaagcggaagttttacggcacaccgccggcatctgcgcacaagaaataacgagactttccttgttggaaagcatttgacgtgttacttaagtttacttcaagtattttgcaagttttttgtttccggccagccaaccccgagctgtatttgtacccaacccaaccataagcttttctttataatttatgcgttcgattataaactaaagcacgttattatcgtactaacataagtatactcaccagagaaataaactaaaatatgcatttgaaaagcaataagaacaatgaacaaatatataaataaacg

SEQ ID NO: 30960 - protein, 625 aa, DROSOPHILA
MALSALASFDDLRRCMQVLTDGTPEEEFLRFLRMFEQYHEKCAGYAAETARIQNELDKSLTKMGDLEGKLFHARRIIDMEIKARRQAEHERDAMESKIMAVADLLRHERNLNNETRDKLAFLHTLPSSRKRKSLNAVREDKSYGDINSTGSLLSDLSITHSEDDFLDVRTSKSWREHRPSLPKNQIPSVGNKRSRLSTGLNGSMSGTTPTTGKSRRSSVGIGVEQHTVDVGQGAERFCATTKVTIPQDGQGVIRAESTIESLPVIAGNERIGDGLSSTPRRSVLKEATAPPLTPVNAMAPHVVAESGTPLQHRPLMRNHTFSQKTFLRGDNCVQCQKRIRFGAVGLRCRDCPVRCHIDCRYLLTVSCVPQTGTPTTKTMTGYVTDFAPSIAPMIPALIVHCVNEIEARGLTEVGLYRLSSSEREYKALKEQFLRGKATPHLGNTDIYVLCCCVKDFLRSLTEPLIPTSQWKDFANAVQNPDTKTAQDMLVKSVKQLPQANRDTLAFLILHFQRIAQCPVVLMPIDNISLIFGPTIVGYSTPDPDQHAIYTEVFTQKQVMKALLELPVSFWEQYIVIDPTRTPATVIKRVPSNKNDLLSLYATPFKGGTIKKRKFYGTPPASAHKK

SEQ ID NO: 30961 - DNA, 3934 bp, DROSOPHILA
cgatgtgctcacggcaaacggggcacagcgcctggaagggatcggccgtcttctgcagccaggcaggcaatttatcgaactcctcctggtagttgcgacgtagggcattgagatgccgagccaggcaatagctgtgcaggtagtggaagcactcggtgcgtgtgaactcgtcgccatcagcgaatccatacaaacagacaacgcactggccactgggcagattgctgccactgagatgctctcgcaccacctcgatgaggtcgaaaacgaccggaaaaccaattgactccttgatcttggcgttgcacgcgcttcggattgcctccaggcgggcatcgtccaatccacgcggacgcagcagcttgaatgtggggctctcctccggatagccaggtgttggatgcacctgcagggtaacgcacacgtactgctgctcctcctcctcaccggtcaggggcagcaccgtggtctcgatctgctccacctcgccgcttctcgggaattgcaatactcgctgtagtatcgaaaacatatattgtattgttttacttacctgggtgtgcgtttaatgcaaacatcgtccattaggatggcttccagcgactccacttcgtcttgtaaactgcaagagtacgcaattgttatgcaacattaagctaggaattttaacatttgtttgcttacgcgtccattttatcaccggtcaattcagtttttgagtatttttcgaggttttgtttaaaaaatcgatttgagacacctgaaatttggagaaaacacggcgaccgtttgtcgcttagccaaaaataccagcaaataacattataaatctctttggcgtcattaaaattcaagttggcagcaatgtagcgacggtcatactaacctgcataataattttcgttttactcttttgatggtcaaaaatcataactactactaacaaatgttgcgccgaggctttttatctcgcatcaacgcagcccaatggagccgccaaatgtcggtggtggccaagtccttgaagtacacacagcacggcgaaccacaggaggttctgcaactggtggaggacaaacttcccgatcccaaggacaaccaggtgctggtgaagattctggcagctcccattaacccggcggacataaacaccattcagggtatgctggccattaggatatatcacaaacaaacatatattatgcatgatacaactgaaatatagccataaccggcatgaactgcataattaataacgataatcttctgctgaaacaactggataagaactgaagatcagagatacttgtattctaagtatacccacttgcttgaaagtcagttatgggataatcagaagtaatccatttaaagttaaacgaatgttatcagtacatctttgtactttgaacgatgctcaaggttgtggctttaaattttaaagaagcctagcttgtttaaagtcactttgataatgattattataaatcctttacaggtaaatacccggtgaagcccaagtttccagccgttggcggcaatgagtgtgtggcggaggtcatctgcgtgggcgacaaagtcaaaggctttgaggcaggacagcacgtcattcccttggccagtggcctgggcacctggaccacccatgccgtctacaaggaggatcaactattgatcgtgtccaagaaggttggcttggcggaggccgccacctcgacagtgaatcccaccactgcctaccgaatgctaaaggactttgtgcagctctgtccgggtgacacggtcatccaaaacggcgccaatagcgccgtcggccaggcagtgcaccaattgtgccgagcctggggcatcaatagcgttggcattgtacgcgaccgcccagaaattgccgaattgaagcagatgctgcagtgcctgggagccaccgaggtcctaacagaggccgaaattcgcaccagtgacatcttcaagtcgggcaagttgaaaaagccccgtctggccttcaactgtgtgggcggaaaaagcgccacggaggtgtcgcgtcatctagacaatggcggagtgctggtcacctacggcggaatgtcccgcgaacccgtcacagtggccactggacccctcattttcaaggacattgcatttagaggcttctggatgactcgctggtccaaggagaactacagttcaccagagcgttcgaaaatgttcaaggagatcttcgagctgatggagcagggaaagttcgtggcccccaaccatgagatggtgcccttggcaaagttcaaagacgcggcggccgctgccttgagcttcaagggattcaccggcaagaagtacatactggatatgagcatttagatgcgtaactcgaggctaagcctgctgtttatttacatatacgacttgtgtattaaaattgttatctactgtgatacactttagaccatctccacctcattggactgatacttcagctgcagagtcatggcggacggcgaggtggcatcggtgactgtgagctgctgtccatcgtgtagacccagttcgcccaggctctgagtaaggttctttcgggtggcctcttcaatgctctttaccccggacatgtacaaagtccgccgcttgccgtccttcatcacagtggtcaaggctgggcttttcagctggaaacgcggggaatcacacaatagctttatcacatcctccagcgtggtggtgttgggatcctcaatcggcaacggctgcggtgtattgctgcacgccaagcagttttccgacttctcggcctcgtaggtgtaggtatagattccgtccaggtcgttgaagttcaggtagtttgccatgctgtcatagcagctggtggccaacttaaagacctccaaagcacaggcggcggcaatggctgcattggtactggccacagctggaatgatgtgcttgacaacgccctggaccaagcgataggtcactccggtgatgttaaactcattggaccgctccagtgcccgttcgtagatccaaccaatgtgctggggatcgtccccatcgaggggcactccaaacggattctgtttctcccactgtatgatctttacgtactcaatgcaatgctccggaagcctgggagtatttgctatggtgcataggggatagttgacctgcggcgggaacaggtccagcgtgcactcaatgcaggccgtgaaaccgggcaggatgacgcgtgcgttccccttgaagccctcggtgccgccatcaatcatgggcactatggagctggtatctatggtgccgtcctcctcatatcgcagcattgatagcagcatgccattgatccaacgccgggcgacaatggagtctaggccacagacaaccaggtggaactgctgatagaaggactcatcgaagtcctggattttcttgaaatgcggcgtcacccggcaagtaggcactcttgcgttgatgaagcgagccgcacactccgccttggaggcgccaatgtctgtgcgacggaacagaaactggcgattcaggttggacagctcgatggtgtccatgtcgatgacgtgcaggttgccgaagcccatcagagccagatccttcagcagttcgcagcccaggccaccggctccgatgatcagaacctggcacttggtctgcaagaactccaggttttccgacgaggccgcgaaaccgtccttgcagaagggaccttcgcgttccaggatgttccgcagtccattgaaacgcttgctctggaggattaagccaggattgggtgagtggacagacatttttcaaacaaaatcgagactgtgattcgtttagcaacactactcgggtcggaataaatattagtgatggtagcttatgtgaataagaatttatataagacatattgtaaataaaaaaaaatattgtaattatattattatta

SEQ ID NO: 30962 - DNA, 1596 bp, DROSOPHILA
atgtcggtggtggccaagtccttgaagtacacacagcacggcgaaccacaggaggttctgcaactggtggaggacaaacttcccgatcccaaggacaaccaggtgctggtgaagattctggcagctcccattaacccggcggacataaacaccattcagggtaaatacccggtgaagcccaagtttccagccgttggcggcaatgagtgtgtggcggaggtcatctgcgtgggcgacaaagtcaaaggctttgaggcaggacagcacgtcattcccttggccagtggcctgggcacctggaccacccatgccgtctacaaggaggatcaactattgatcgtgtccaagaaggttggcttggcggaggccgccacctcgacagtgaatcccaccactgcctaccgaatgctaaaggactttgtgcagctctgtccgggtgacacggtcatccaaaacggcgccaatagcgccgtcggccaggcagtgcaccaattgtgccgagcctggggcatcaatagcgttggcattgtacgcgaccgcccagaaattgccgaattgaagcagatgctgcagtgcctgggagccaccgaggtcctaacagaggccgaaattcgcaccagtgacatcttcaagtcgggcaagttgaaaaagccccgtctggccttcaactgtgtgggcggaaaaagcgccacggaggtgtcgcgtcatctagacaatggcggagtgctggtcacctacggcggaatgtcccgcgaacccgtcacagtggccactggacccctcattttcaaggacattgcatttagaggcttctggatgactcgctggtccaaggagaactacagttcaccagagcgttcgaaaatgttcaaggagatcttcgagctgatggagcagggaaagttcgtggcccccaaccatgagatggtgcccttggcaaagttcaaagacgcggcggccgctgccttgagcttcaagggattcaccggcaagaagtacatactggatatgagcatttagatgcgtaactcgaggctaagcctgctgtttatttacatatacgacttgtgtattaaaattgttatctactgtgatacactttagaccatctccacctcattggactgatacttcagctgcagagtcatggcggacggcgaggtggcatcggtgactgtgagctgctgtccatcgtgtagacccagttcgcccaggctctgagtaaggttctttcgggtggcctcttcaatgctctttaccccggacatgtacaaagtccgccgcttgccgtccttcatcacagtggtcaaggctgggcttttcagctggaaacgcggggaatcacacaatagctttatcacatcctccagcgtggtggtgttgggatcctcaatcggcaacggctgcggtgtattgctgcacgccaagcagttttccgacttctcggcctcgtaggtgtaggtatagattccgtccaggtcgttgaagttcaggtagtttgccatgctgtcatagcagctggtggccaacttaaagacctccaaagcacaggcggcggcaatggctgcattggtactggccacagctggaatgatg

SEQ ID NO: 30963 - protein, 339 aa, DROSOPHILA
MSVVAKSLKYTQHGEPQEVLQLVEDKLPDPKDNQVLVKILAAPINPADINTIQGKYPVKPKFPAVGGNECVAEVICVGDKVKGFEAGQHVIPLASGLGTWTTHAVYKEDQLLIVSKKVGLAEAATSTVNPTTAYRMLKDFVQLCPGDTVIQNGANSAVGQAVHQLCRAWGINSVGIVRDRPEIAELKQMLQCLGATEVLTEAEIRTSDIFKSGKLKKPRLAFNCVGGKSATEVSRHLDNGGVLVTYGGMSREPVTVATGPLIFKDIAFRGFWMTRWSKENYSSPERSKMFKEIFELMEQGKFVAPNHEMVPLAKFKDAAAAALSFKGFTGKKYILDMSI

SEQ ID NO: 30964 - DNA, 3493 bp, DROSOPHILA
caccacttggacgcaggagctcatttggctggtggccaatgggctggattttgagcatgcccaggagcgaccactaaccgaacgctttccattctttgagtgagtgcttgtcgcgcgatcctatcttaattaagtgaactccaaccgcccttagatttccgctctttgtgcatcccaaaattaaggaagagctgcaggaggaaaaccgagactcggctgaagctctggagttcattgagaagatagctcgaccgggttacgaggctttgagcgaaataccacgctcgcagcgacggtttatcaaaacgcatttccccttttctctaatgccgcctagtgttctcgaaaagaagtgcaaggtgatctatgtggttcgtgatcccaaggatgttgcagtttcctactaccatttgaacagactcttccgcacccaaggatacgtcggagattttgagcgttactggcattatttccaaaacggattaagtaagtgatccttcgatggagttgccatccttaaccaactatctttcagatccctggctgccctattacagtcacgttaaggaggcgcgggagcatgcccatttgtccaatgtactctttctgcgctacgaagacatgttggctgatctgccaggtgcaatcaacagcatagccagcttcttagagtgtccaccgaaacccgaggatatggataggctactcgatcatctgagcatcagaagcttccgtgagaacaagtccgtaaacatgcacgaaatggcttccgttggcgttctcaacaaaggagaggcaggattcgtgcgcagcggagccaagacagcgtatcagccgcaacaggagttcgtggagaatccgaagcttttgaagagcgccaacgagtgggtggaacagaatattaaatcattcaagaccatatgaaatacctgactttgttggctatctttactggtgtttttcttttttggttttgaattgaaacggaactagactatgactaacgtatttgcacattgaaactatccacgctcgcactagcgatctgcttgtggatttcgttgacctccgcctgggttaaggtgcgctccatatggcgataaacaatgcggaagcacacgctcgatttccccgttttcgggtgcttaaacttgtccaccagactgatctgtaagaaaagtaaagtatatgagaaatactcgtaacatatgatacgtttgggatagctaagaccaacctgctccaccatatcaccagctacagagcggactagatcgtaaaagtcgttcggcgagaagccggcatccacctcaatgtcctggggcagccagaacgacaagtcattcgtgcactgcggatagtgggagatgggcttgtacttgggcagattgtgcagatccttttcgctaaactgcgacagaaagccactgtcgttcgaccagaagagccggatgtcaggtatatcgaacagcaccatggccagtcgctccaggccgacgccaaaggcgtagccaatcgattgatgaacgcccgatctctgcaggatttcgtggcgcatgatgccgcagcctaagacctccagccagttgtccttgaaatagatctccagctcccaggagggctgggtgaagggaaaataggtgtccacccatctgtacttgatgcgcggcccaaacagatccttggtcaggccaaccagcacgtgcttcatctcgtgctccatcaacttgacggcctcgagcgtgtggcagggctgtttggtttggtccatgaacttggatgagggcagaatcagcttggggtcggccagcgtacccgaccacgtctcttcaaagagttccaggccaggattgcgctcgaaaagcttgtctttggtgaccagccgcacagcgtccgcctggtggaataccggatagtgggtgctatcgatttcgtcccgtcgatacacctcgcccacgaccagaaagttgtccagcccgcccgagatcaattccacctgatgggcggtggtgtgggcgcgcagcagatgctgctgattgatgtaatagcaatcggatttctgtcgactcacatgatcggcgggaattagcagattgtcaaagttctgctgcacagtaaccaccggattcatttgatcatagacggagaatagtggattgcccctttggttgcgatacgctccataaaagtagtttacgatcctctggcggatgatggaaagcgggtggtccgtctgcaggtgcttgttggcccccacgtaggagagtatcttgggcgttacgttcgtccatccgtcggtggcgtacgtgcttccactgacctccagctgcggtggcgatgacggcgacttcgcgggcgccgcactgctggccaggcagcgggtggacttcaaccagtgccgtgctccctgcactcgaagcgtcagaagcatattggagggactttattgattcgatgcaactatttattgcattttttgttataacttggaagttatgttatgttatcagatgttatgttaacatatcgataattttctacagcagtcgcaaggcttcagcagcacggactgtgctgttaggcgcacactaacagagctgttggataaccacctggcgccatctgccggaaagcgaaagtgttgaacagaaattgtatgaaattgtatgaattgaaatgtattttttaaatcaaaactaaaaattgtgaataagtaatcaaatattacaaattcaaagcaaaatacataaaatatatttttaagggatgtcttgagtgaaaagaaaccaaacttagttgactgcaaaactttgatttgccaaaataacttctctcccaattcaaaaacttcaatttttaaaattatataatttttatttatttttctacaaacatcaacagatttgttgttcacctatatcatacatgatggcagagaaacgcgaatacaatggacccattacaaaattagttcattaaatatgaggttgggctaaattattaaagttcatttttgagatgcttgcgttggtatcttttctgtttcttttctaaatcatatcatatgaatgctggggctaaactacatcagttctgctctagaccaggggatagctggaggcgctagcgatgccgcactggttctccttgttgcgcagcatcttgatgaagcccttgtcgccccaggtggtgccccacgagttcttcaccagccagtaatcctcgccggactcgtcggtgccgaagccaacgaccagcacaccgtgatccagattctgggcatcacactgcggctcgttgtagacgccctccgagtagaactggaacgactcgtgggaggcatcgatggcgacggaaacgggaccaacggtggccacagcctcggccatcttcttctcatcaccctggggaatatcggtgaatccacgatcggtggctccgactgtgcccttgttaaagtggcacgagtcatcgatggcctcgtagggatagg

SEQ ID NO: 30965 - DNA, 1424 bp, DROSOPHILA
cttccaagttataacaaaaaatgcaataaatagttgcatcgaatcaataaagtccctccaatatgcttctgacgcttcgagtgcagggagcacggcactggttgaagtccacccgctgcctggccagcagtgcggcgcccgcgaagtcgccgtcatcgccaccgcagctggaggtcagtggaagcacgtacgccaccgacggatggacgaacgtaacgcccaagatactctcctacgtgggggccaacaagcacctgcagacggaccacccgctttccatcatccgccagaggatcgtaaactacttttatggagcgtatcgcaaccaaaggggcaatccactattctccgtctatgatcaaatgaatccggtggttactgtgcagcagaactttgacaatctgctaattcccgccgatcatgtgagtcgacagaaatccgattgctattacatcaatcagcagcatctgctgcgcgcccacaccaccgcccatcaggtggaattgatctcgggcgggctggacaactttctggtcgtgggcgaggtgtatcgacgggacgaaatcgatagcacccactatccggtattccaccaggcggacgctgtgcggctggtcaccaaagacaagcttttcgagcgcaatcctggcctggaactctttgaagagacgtggtcgggtacgctggccgaccccaagctgattctgccctcatccaagttcatggaccaaaccaaacagccctgccacacgctcgaggccgtcaagttgatggagcacgagatgaagcacgtgctggttggcctgaccaaggatctgtttgggccgcgcatcaagtacagatgggtggacacctattttcccttcacccagccctcctgggagctggagatctatttcaaggacaactggctggaggtcttaggctgcggcatcatgcgccacgaaatcctgcagagatcgggcgttcatcaatcgattggctacgcctttggcgtcggcctggagcgactggccatggtgctgttcgatatacctgacatccggctcttctggtcgaacgacagtggctttctgtcgcagtttagcgaaaaggatctgcacaatctgcccaagtacaagcccatctcccactatccgcagtgcacgaatgacttgtcgttctggctgccccaggacattgaggtggatgccggcttctcgccgaacgacttttacgatctagtccgctctgtagctggtgatatggtggagcagatcagtctggtggacaagtttaagcacccgaaaacggggaaatcgagcgtgtgcttccgcattgtttatcgccatatggagcgcaccttaacccaggcggaggtcaacgaaatccacaagcagatcgctagtgcgagcgtggatagtttcaatgtgcaaatacgttag

SEQ ID NO: 30966 - protein, 453 aa, DROSOPHILA
MLLTLRVQGARHWLKSTRCLASSAAPAKSPSSPPQLEVSGSTYATDGWTNVTPKILSYVGANKHLQTDHPLSIIRQRIVNYFYGAYRNQRGNPLFSVYDQMNPVVTVQQNFDNLLIPADHVSRQKSDCYYINQQHLLRAHTTAHQVELISGGLDNFLVVGEVYRRDEIDSTHYPVFHQADAVRLVTKDKLFERNPGLELFEETWSGTLADPKLILPSSKFMDQTKQPCHTLEAVKLMEHEMKHVLVGLTKDLFGPRIKYRWVDTYFPFTQPSWELEIYFKDNWLEVLGCGIMRHEILQRSGVHQSIGYAFGVGLERLAMVLFDIPDIRLFWSNDSGFLSQFSEKDLHNLPKYKPISHYPQCTNDLSFWLPQDIEVDAGFSPNDFYDLVRSVAGDMVEQISLVDKFKHPKTGKSSVCFRIVYRHMERTLTQAEVNEIHKQIASASVDSFNVQIR

SEQ ID NO: 30967 - DNA, 3526 bp, DROSOPHILA
ccacaaagactagaaaaatgggtcagcacaaaggggaattggacaaaatctaaacaaagaagcgcaacagaatctaaagcgcaaagcaaaaggggcaataaaaacgggcatagacgaagatgccgactgttgattattgtggagtgcaattaaagtgtaaataagtcgccacacagacatgacgcaattagattcaacaagtcaatacgaagcaattaatcggcattaatgcagggcaggtatatttgcgttctcaactcgaaaataactaaaaagactacatatattgcttaccactcggaattgcgtcgcaaggaatgcagtaaattcactgatttatcactgttgttgcactctttttaattggctgaaacaacactaatgtgcaagtcaaccgattgtatttaacaagtcgctcttgatgatccagtcccaaagacctttcgttgtttaatgaaaaccagcagaaattgtttaaacaagaaatctccgacagagtgaccagtccgaatcttctggaaataccagaagttgcctgagcagacggcttatcgataacagcgtgggcagtgatgcagttcttgtgtgtaaaacggccaaattcagtcgctaaatcgaaataattggtcagcctaaatatatgcaagagctttttagtttatgtttatttaataatgagtgttaaataactaaaaactatacctctcttgttacttttgcaatcgaaagatttctaagtcactcaacgaactcaatttaaattatacaacaaatgtctaaactgaattttgttcaacagtgttttgaaatactaaatgttagaattcacccgttgatggtaacactgctgaggtaagaagaagacaaattttgctcgtcattgggaattgacgattcactgaatttttgataaactcaacaaagtaaacgcattatatatcccgtaagtagtgcagcgactactaataaccccaaaccgatcacggcaccataaaacactttcgagttatgcgccaaagaaagtcgtaattacaatacgttcttcatccaatcttcgccagctctcaagaagcacccgcatcatgtttggaagacaaagtggactgggtagttccagcaacagcagcaacctggtggagttccgcgcaggtcgcatgaacatggtgggcaagatggtgcatccggatccgcgcaagggcctggtctacatgacccagagtgacgatggcctgatgcacttctgctggaaggatcgcacctccggcaaggtggaggacgatctcatcgtcttccccgatgacttcgagtacaagcgcgtcgatcagtgcaagacgggccgtgtctatgtgcttaagttcaagtcatcgacacgccgcatgttcttctggatgcaggagcccaagacggacaaggacgacgagcagtgccgccgcatcaacgagctgctgaacaaccctccatccgcccaccagcgcggcggcggcggcagcaacgacggcgacctccagtacatgctcaacaacatgtcgcagcagcagctgatgcagctcttcggcggcgttggccagatgggtggtctcagctcgctgctgggccaaatgaagtgagcatttaaacccttgcagccatagtgtccaagaactagtcaagtagatagcttcttaacttacagggtatcgtttttattgtttataagcatgtaatcgaaggaatgaagccagaacttgagttcaccccctttttcaatattttcctttctatattctccgcagctcccggacgccctcgtcgcgcaacacctcctcatcgggtggcggtggggcatcggccttgcagacgcccgaaaacgtcagtgtgccgcgcactccgagcgctccatcgaaatcgggcagcagccgcagcagcagcaatgtgaactcgcaggtcggcgaaggtgccggctcctccgttgatgcggatgcccccggtaagaactcaaccacatcgaccacaacggcgtcaaaatcgaccggagcctatgccaatccattccaagcctacttatccaatctctcccccgaacatggcgcaggacgatccctgaatattgacctatcgacggccctacccggcgccgatgccatcaatcagataattgccgatccggagcatgtcaagacgctgatcgtgcacctgcccgagtcggaggatgtggacgatgatcgcaagcagcagatcaaggacaatatcacctccccgcagttccagcaggctctggcccagttctccagtgccctgcaatcggcccagctgggacctgtgatcaagcaattcgagttgtccaacgaagcagtggccgccgccttctctggcaatctagaggattttgtgcgtgctctggagaagagtctgccccccggtgccaccatgggtggcaaaccctccgccagcgagaagaaggccagcgatcccgaaaccccaacttcagtggcccgcgatgagaacacagatcccgctaccgaaaaacaggaggagaagcaaaagtagcttacgtgtgcggcttggtagtcattgatatggaatccgaaagcaaattttttcatgtgctgagtgatttttggatgctaaataaattcaaatgggagttaatcggtagttatctatctaattgtgtgtttgatatacatcaaaacggcttattaatttatatttaaaatattactactttaataaaaggatacgcgttttggtaagtactcgtccagctcttttcagaatgcatcattatactcattatacttgggtttttggcttacctaatttaatttaaaaaaacaaagtctaacgtgtacaatttattttaaattttgaagttaataatggggggatatatggaagtaacggtaatattaatcccgacaaggtcattttgttggtgtccccctaacaaaagctcgctgccccgctctctcatcgcaacacactggtcgtccctttctggcgcgaattgcgcgctctctcagcgagagccgtctcacacagatatatacacacacaggcacacgcaacaatatttattttattcaattccaaaacggccagcaaataagttgtgtttgtgcaaaactcgcgcgttcgcaattttccgaagctgactctcaattctcatacataacgatctcaagcgatctccgccaggcgaatcaaacccggatatatccagatctgcagtaattgccatattttttcgccaatttttgcgttgcgggctggatgtttttgtatctgttgttgttggtgctttcattttgcagcaatctctgtgcctgtgtgtgtttgtgtgttggtgcttttggcggacgtgagaaggtgtgtgtgtctagtggcagcctgtatgttttttttttgcatgactgcttcgcggagctgtggggaaagcttttccctccaaagtagttgtcataaaaaagttaaaagccgcggcaaaaacaaaaatcaaagcaaacacagaaagcgcgaagagagagggcagtgagacagagagaga

SEQ ID NO: 30968 - DNA, 1252 bp, DROSOPHILA
ttcgagttatgcgccaaagaaagtcgtaattacaatacgttcttcatccaatcttcgccagctctcaagaagcacccgcatcatgtttggaagacaaagtggactgggtagttccagcaacagcagcaacctggtggagttccgcgcaggtcgcatgaacatggtgggcaagatggtgcatccggatccgcgcaagggcctggtctacatgacccagagtgacgatggcctgatgcacttctgctggaaggatcgcacctccggcaaggtggaggacgatctcatcgtcttccccgatgacttcgagtacaagcgcgtcgatcagtgcaagacgggccgtgtctatgtgcttaagttcaagtcatcgacacgccgcatgttcttctggatgcaggagcccaagacggacaaggacgacgagcagtgccgccgcatcaacgagctgctgaacaaccctccatccgcccaccagcgcggcggcggcggcagcaacgacggcgacctccagtacatgctcaacaacatgtcgcagcagcagctgatgcagctcttcggcggcgttggccagatgggtggtctcagctcgctgctgggccaaatgaactcccggacgccctcgtcgcgcaacacctcctcatcgggtggcggtggggcatcggccttgcagacgcccgaaaacgtcagtgtgccgcgcactccgagcgctccatcgaaatcgggcagcagccgcagcagcagcaatgtgaactcgcaggtcggcgaaggtgccggctcctccgttgatgcggatgcccccggacgatccctgaatattgacctatcgacggccctacccggcgccgatgccatcaatcagataattgccgatccggagcatgtcaagacgctgatcgtgcacctgcccgagtcggaggatgtggacgatgatcgcaagcagcagatcaaggacaatatcacctccccgcagttccagcaggctctggcccagttctccagtgccctgcaatcggcccagctgggacctgtgatcaagcaattcgagttgtccaacgaagcagtggccgccgccttctctggcaatctagaggattttgtgcgtgctctggagaagagtctgccccccggtgccaccatgggtggcaaaccctccgccagcgagaagaaggccagcgatcccgaaaccccaacttcagtggcccgcgatgagaacacagatcccgctaccgaaaaacaggaggagaagcaaaagtag

SEQ ID NO: 30969 - protein, 389 aa, DROSOPHILA; identical to SEQ ID NO: 28659

SEQ ID NO: 30970 - DNA, 4741 bp, DROSOPHILA
tctgcttaattctgacaaagcagcccggcagatcattcacccagtgcagacttaggctagagatgaccagatccagtgaattgtcctcaaactgaaagggattctcatttagacttgcaactttggtctaagtagattaattacccacatccagctgctcttcgtccttaactagtttcaccattttcagacccggagtgccctgtgcctgctccagcatcgtagcactggtgtccgtgagcgtcagctgctccacactctccgccagaatgtgtctggacagatagccgcgactgcatccgatatccgccgccgccttgaactcccgcttaatgtcgaatactctgtcagccaggcggaagccgatctcctccttcaagtaatcgtatagtccaacgtcttcgctgtatacgtatattgtttactaattgaatatatactctaatcctggcgagaagatctcacctgagtgcggccctttccttctgtaatctcttggcattgcggtcaaatatatgttgcgatgtttgggtgagtgaggatagggcgcggagttcacatttgacctttaaggtcgatagttttgttaattttcttaacatattccgacttttgatcagagcagtgctgtaataagcaaccggctgcgggaaaatgaaaatattacatttttaaaatggaaagtcgaagtatgtataccctacatgtcttatatcttgtggattcttaaatttttctatttatgaaagtaataccaatgttgtttaaacaattgaaacgtcatgtgtgactatttacaaattatgtatacaatgtttcacgtattattgaatttaaattattaacgggaacgtggtgatatattttttttaatatttaaaaagaaagagtattgaacgaacagctgttggccagtgctggaaaagagcgacatcaagacattcccattcggccgttggcttacactgttaggtagtgcctatttgttttggcgccaaaagtgacgggaggtcatcgcgagagatcaattgaaattaagcattaaatcacatcatgagcttcttgcgcagtgccctgcgctatgcccacaccaatggctacacgggactcctttacactccgcgcggcgagttcatcatcacgtgcggcacagatggagacatccggcactggacctgcattagtgacgacgatccacgctcaagttgcctgggcgagttcgtcatgtgcatagcccacacgggaacccgtttgctggcctcgacggatcggaatacgatccatgcctacacctttcccgagatggacagcgatggcatcctcatgcgattcacggcaccggctacgtgcctcaaggtatccggtggctatactgctgccggcagcgaggataccactataaaggtgcttaagggagatacagctggcaacgaaacggtgctggaggggcacactggtcccattctggcactggacttgtttgcggagcgaaagctgctggtttccgtggccggggatggccaactgaaggtgtggaacttcgaggagggcaaggagctgaagaccattgggggcttgccaaaggtcaacagtttcgagagcgccagcctgtatggcactccgcatttcgagccacaaagcggtgaacttctggcctatgccgttgacaacgagattgtggtcctcaacacggccaactgggaagtggcctttaagctgcgcgacgactcggtgtccagtaactacagctgctgccagttctcgcccaatggtgagcgcctggccgccggaacaaccaagggcgaggtgagcatcttcgatgtaaagaaacggaaggcagtaacagtggagattccgccaagcgactgcaatgccataacatgccttgcctggaatctgtccggagaggtggaggtggccttctgcgatgccactggccagctgggaaccgtatttcttggcgatgcagtcgacacaggcaacggcgatggattggtggacgaccaagccgagctgttgggcgatgactatgagtttgaggccggcgatgacgtggacactgcagcagacgacggcgatggcgttagtctggaacagcttaagcgcaaggtgatgaactttgcggatcccgtagatcacgatgacgcctccaaccaatccctggacagcagtagccgaactgtacctgcacccgttgccccgcaaatcaagctcttcaagcagcagacggcctttcagcccagtgccacaccggccgatctagagcatcgctacatggcatggaatgatgtgggcattgttaccgcccatgtggagccctcaggcgatagctccatcgatgtggagttccacgacgctagtattcaccacgctctacacattagtaactacaatcagcacaatttggccagtgtgagcagtggagctttggcattggcctccaacgaatccagcaagttagtagtcattgctctggccgccgccggaaacaaagagtggtcactcagcctcccggattgcgagagtgcagaggctgttgtggccacgcgatttctagtggctgtggccaccagctccagttttctgcgtatcttcaccgtgatgggtacacagcgtgaggtgctaaccataccaggaccaatggtggctattgctggacacgagcacagcctaatggttgtttaccacagttccgcgcccagtcagacgcagcagcatctcgccgcgatgttggtgaacataaatggattgagtttgcgacaagaatatctgcccgttccgctgactccaggccggcagctcacctggtttgggtacagcgacaccggatcgccgagtattgccgacaacatgggtctgctgcagttgtatcgccggagcagcaacgcctggttccccatctgcgacaccatgaagcaaagcaccagtgtgtcgcacaacttctttgtggtcgctgtatccgagaaacgtcagatagtccaggcggtcctgtgccgcggtacctcctatcccatgaccaatccgcgtcccatgctccaggaactgcgtatgcagatcccgctctgcgacgtcgaagtggaaaagtccgagctggaggatgcactgctgcggtccagtctgatgcaaatggatggggcagagaagatgcaaaaggagacggccatcaagctgtttgcattggcctgcagcagcgagtgcgagacgcgagctagggaattgatcgaatcgattgcctgcactgatctgcttcaactggccgtgaaatacgccacgaaacgtggacgcatccacctgtccgaccgtctgtgcgaactgctacctcaattggaggcggtccaggaggcacgcaagcagcagactttgttgggtgccagcggcattgcggccaccattgttctgccaatgactcccacatcggcctcacaaagcggcccaaaacccaaggccatcgagctgagctcggccaaacggggcaccctgaagagattggtcaattcacccaatatgtttaaagcagcagcagcatcggcagcatcccggccctcgactccggatatcacaccctctccgctggacacccaggaaaacatattcggcgaatcggaatccgaggttcccatgggtaaagccaccgatcaccggtcccctttgaattcggttaatccctttgctatgaagcgcaaactgggcgacactggagtcatctttggatccgaaaagctgaagctggcaaagaaatagtctgtttgtagattgataagtaggtttaagataaatatattatataaataatgtgtaacgtttatcccattctgtgagctacatgtaaaataacaaatttttatttgagctttttatggaacagaattgttaaggattaatttgcttatttaaatttaaagaataaaatatacttttatttatattaaaatgtatattctttaaaaagcggagggtacaagtttatttaaaatatgatcaatatatttttaaatattttaaaattctacaaattaaacattctggtctccaaagaataccgttggtatttttatctttggaattaaaccaaccaaatagtgtgaccaaactttgtaaatgacattaatcgatcgaaacgatcattttaggctggattttccacgactttcaagtcaaagttatgtgttcgtttaattctattttgtaaataagtgttacacgctcaaattccaacataaaattacacactcatacacataggaaaaaacacaatataaaggttagaaataataagcaaaaaaggtgctagatatatcaaaaaaataaatatatatattttttaaataacaaactaaattgacagttacatacacgtatgtaagtattgcggcagcgagtgcttccttttgcgttgtttacgaaattctcgccactggaagaaagctaaagaactccgtaatgaatttccagttccagcgaactgatcaccgctattcagaaggctctctgctgcagacgcaaacacacacacaagcaggcaaacacacagggacatcgttaaaatctaaagatggagagactctatttccaatttaatgttgaattagttttcgttgaagccattttttaacccaacaacttttttaagaaatccccgtctgggtaacccgtgcatataaaacccaacgctcgcgcatcactctcttcatttgttacctgaacgttacgccgtgcatttcgatcgtcagctgaatagtac

SEQ ID NO: 30971 - DNA, 2741 bp, DROSOPHILA
gtgacgggaggtcatcgcgagagatcaattgaaattaagcattaaatcacatcatgagcttcttgcgcagtgccctgcgctatgcccacaccaatggctacacgggactcctttacactccgcgcggcgagttcatcatcacgtgcggcacagatggagacatccggcactggacctgcattagtgacgacgatccacgctcaagttgcctgggcgagttcgtcatgtgcatagcccacacgggaacccgtttgctggcctcgacggatcggaatacgatccatgcctacacctttcccgagatggacagcgatggcatcctcatgcgattcacggcaccggctacgtgcctcaaggtatccggtggctatactgctgccggcagcgaggataccactataaaggtgcttaagggagatacagctggcaacgaaacggtgctggaggggcacactggtcccattctggcactggacttgtttgcggagcgaaagctgctggtttccgtggccggggatggccaactgaaggtgtggaacttcgaggagggcaaggagctgaagaccattgggggcttgccaaaggtcaacagtttcgagagcgccagcctgtatggcactccgcatttcgagccacaaagcggtgaacttctggcctatgccgttgacaacgagattgtggtcctcaacacggccaactgggaagtggcctttaagctgcgcgacgactcggtgtccagtaactacagctgctgccagttctcgcccaatggtgagcgcctggccgccggaacaaccaagggcgaggtgagcatcttcgatgtaaagaaacggaaggcagtaacagtggagattccgccaagcgactgcaatgccataacatgccttgcctggaatctgtccggagaggtggaggtggccttctgcgatgccactggccagctgggaaccgtatttcttggcgatgcagtcgacacaggcaacggcgatggattggtggacgaccaagccgagctgttgggcgatgactatgagtttgaggccggcgatgacgtggacactgcagcagacgacggcgatggcgttagtctggaacagcttaagcgcaaggtgatgaactttgcggatcccgtagatcacgatgacgcctccaaccaatccctggacagcagtagccgaactgtacctgcacccgttgccccgcaaatcaagctcttcaagcagcagacggcctttcagcccagtgccacaccggccgatctagagcatcgctacatggcatggaatgatgtgggcattgttaccgcccatgtggagccctcaggcgatagctccatcgatgtggagttccacgacgctagtattcaccacgctctacacattagtaactacaatcagcacaatttggccagtgtgagcagtggagctttggcattggcctccaacgaatccagcaagttagtagtcattgctctggccgccgccggaaacaaagagtggtcactcagcctcccggattgcgagagtgcagaggctgttgtggccacgcgatttctagtggctgtggccaccagctccagttttctgcgtatcttcaccgtgatgggtacacagcgtgaggtgctaaccataccaggaccaatggtggctattgctggacacgagcacagcctaatggttgtttaccacagttccgcgcccagtcagacgcagcagcatctcgccgcgatgttggtgaacataaatggattgagtttgcgacaagaatatctgcccgttccgctgactccaggccggcagctcacctggtttgggtacagcgacaccggatcgccgagtattgccgacaacatgggtctgctgcagttgtatcgccggagcagcaacgcctggttccccatctgcgacaccatgaagcaaagcaccagtgtgtcgcacaacttctttgtggtcgctgtatccgagaaacgtcagatagtccaggcggtcctgtgccgcggtacctcctatcccatgaccaatccgcgtcccatgctccaggaactgcgtatgcagatcccgctctgcgacgtcgaagtggaaaagtccgagctggaggatgcactgctgcggtccagtctgatgcaaatggatggggcagagaagatgcaaaaggagacggccatcaagctgtttgcattggcctgcagcagcgagtgcgagacgcgagctagggaattgatcgaatcgattgcctgcactgatctgcttcaactggccgtgaaatacgccacgaaacgtggacgcatccacctgtccgaccgtctgtgcgaactgctacctcaattggaggcggtccaggaggcacgcaagcagcagactttgttgggtgccagcggcattgcggccaccattgttctgccaatgactcccacatcggcctcacaaagcggcccaaaacccaaggccatcgagctgagctcggccaaacggggcaccctgaagagattggtcaattcacccaatatgtttaaagcagcagcagcatcggcagcatcccggccctcgactccggatatcacaccctctccgctggacacccaggaaaacatattcggcgaatcggaatccgaggttcccatgggtaaagccaccgatcaccggtcccctttgaattcggttaatccctttgctatgaagcgcaaactgggcgacactggagtcatctttggatccgaaaagctgaagctggcaaagaaatag

SEQ ID NO: 30972 - protein, 895 aa, DROSOPHILA
MSFLRSALRYAHTNGYTGLLYTPRGEFIITCGTDGDIRHWTCISDDDPRSSCLGEFVMCIAHTGTRLLASTDRNTIHAYTFPEMDSDGILMRFTAPATCLKVSGGYTAAGSEDTTIKVLKGDTAGNETVLEGHTGPILALDLFAERKLLVSVAGDGQLKVWNFEEGKELKTIGGLPKVNSFESASLYGTPHFEPQSGELLAYAVDNEIVVLNTANWEVAFKLRDDSVSSNYSCCQFSPNGERLAAGTTKGEVSIFDVKKRKAVTVEIPPSDCNAITCLAWNLSGEVEVAFCDATGQLGTVFLGDAVDTGNGDGLVDDQAELLGDDYEFEAGDDVDTAADDGDGVSLEQLKRKVMNFADPVDHDDASNQSLDSSSRTVPAPVAPQIKLFKQQTAFQPSATPADLEHRYMAWNDVGIVTAHVEPSGDSSIDVEFHDASIHHALHISNYNQHNLASVSSGALALASNESSKLVVIALAAAGNKEWSLSLPDCESAEAVVATRFLVAVATSSSFLRIFTVMGTQREVLTIPGPMVAIAGHEHSLMVVYHSSAPSQTQQHLAAMLVNINGLSLRQEYLPVPLTPGRQLTWFGYSDTGSPSIADNMGLLQLYRRSSNAWFPICDTMKQSTSVSHNFFVVAVSEKRQIVQAVLCRGTSYPMTNPRPMLQELRMQIPLCDVEVEKSELEDALLRSSLMQMDGAEKMQKETAIKLFALACSSECETRARELIESIACTDLLQLAVKYATKRGRIHLSDRLCELLPQLEAVQEARKQQTLLGASGIAATIVLPMTPTSASQSGPKPKAIELSSAKRGTLKRLVNSPNMFKAAAASAASRPSTPDITPSPLDTQENIFGESESEVPMGKATDHRSPLNSVNPFAMKRKLGDTGVIFGSEKLKLAKK

SEQ ID NO: 30973 - DNA, 2138 bp, DROSOPHILA
gtagtctactaccgaaaattggaactgtgtatttgctgtaactatttgtttggacctttaaattgagctgcctacgaatggagcccagttgtgcttctgcgagcatcatttataaacctctaaaatgaaaaacaggctgctgccagccactaattaagccgcacaaagaaatgctcagcgcaattacatggaggctggcacatccactatgtacttattttaatatatgtatctacaaagtaaatatatgtacatatgtatatatatatatatgtgagatgacttggttagacagacacctgcagcttcagcttcagcttcagttttagcctcggcttggccacatttccagttgagcgacgccccaaactggcaatgagtttttacggcacacaaacagcagccaacaggcaacagacaatactggctataaggaaaatctagaataacaacagagagccacaaatatttatcgcagtgcgctgaacaagaacagattgactatttgattgaaggtgaaaatctagtaagtcgtgacttctcaaggcggaaggaaatgccttgaaatgcatttttgggtaaatgttatctgttatgagaataacggtagatatatatatatgaattatacgtatacatatatgtacgtaatccgctgtctattcaacgaatgcatttattgcataggaagttaagatttcaagtgttggaaagttcactgtactgtttccgaatttcattattgacagttacatgtgttagcctgctgttagaaaagtgcaagctggtttcttaagtaatatactaagtaatattaagtgtaactctgtttgtaaataccatatttccgaatttgatgatgcttattccgatttaaacccgtgtggttttaaatcaaaatcggattgaaatcaaagtgccacatgcatgtcttatcacattttcgagttgtccaagtgtaactcgtaactcggagcgagaatccagttgcccagcgcgcctagctgttggcgttgtagctgttgttgttgcgcccccaaatgccctccatgggtcgctgactaccacgacgccgccactgccactgctcgggcgatggcgtcactgccggcgtctctgccgccgaagcactgcgcataatcacaacaaaatcaaacaaatgaacggcactgacacagcggcaacaccaacggcaacagcagcagcagcagcagcagcaacatcaacgcagcggcagcaacatcaccgcaacagcaacagcttcgagtcgcgtgtgtgcgttcatgtgaggttgtgttggcaacttcgttgcgtgtgtaacaggcgcccagattttccgagagagctgaaaaagaacattttcacatgcggagtggggtggagtgttcccatttgtggatgttgggtttgcggaatttttataggttaagctgtaagcggtgtgaagagaggggggcgagaggagtgttgttgtagagaggaggcaagggggcgtggcagagaggctggggcgagcgaagagggttgctggtgtggccttaactagtttcagccggccggtgtcgttgccttataaacgagctaaaaatgcgagataaagagcgcttcgcacgactcactcgactcactggactcacttggatttttgtgagtgattcctgcgaaaccccaaacacaaacccaaaacctctgaattttcccagaacaccccccccaccccccaacgtttcccccgctttaccatcagctcaaattcctttgcgcattcctacgacgttgatgtcgctgcctgtttccggtgtcacttccttatttagttgttcacgtttgtttgttgttttgtgctgttgcctggcttttgggtaggatttcgctggatttcgtccttgtaggctcaacccaatttaacagccatcagaaagtgggcagcgaattcaatttgcctgaaagccacccacaaaaaaaagaaacaaaacaaaaaaagaagcgaagcaaggaaaacagaaacggtgatcattagttggattattattagtctattagtggtaatcaaatttatggcacaaatacaaattgagggaaaactttcatgacgccaaaatggaaattgaaaacagcgagtggggcagcggtggagc

SEQ ID NO: 30974 - DNA, 138 bp, DROSOPHILA
atgcgcagtgcttcggcggcagagacgccggcagtgacgccatcgcccgagcagtggcagtggcggcgtcgtggtagtcagcgacccatggagggcatttgggggcgcaacaacaacagctacaacgccaacagctag

SEQ ID NO: 30975 - protein, 45 aa, DROSOPHILA
MRSASAAETPAVTPSPEQWQWRRRGSQRPMEGIWGRNNNSYNANS

SEQ ID NO: 30976 - DNA, 3352 bp, DROSOPHILA
aaattaagtgctggggaaactattttatgttgttgtctggacttgagcaggcttttaatggattgcaatttgcatatgtgtactaaatttatgcgaaaatatttagtgcatatgaaagtggagtgaaaattaatagcttcattgggtaatgcattatgattcggaaaggaaatattatacattataatatattttattcttatacctctaatttgattcatttcagaaccatcatgcgccagactcaacgaacgcagcacagcgaaatgtccaaacaaaacggattccaacagcagaaggccgtaaaagaaagccaaatagattggcaataaaaagttagataaattaacttagtagctcatcacgcccaaaggcaaatcactttgaagtgcaaccaaataaggaaagagcaaattaagcgaatagaacggctagaaggagatctcccagtggagcgggagtagcttcgtttttttttcgtggaccgtgcgatagaaagccgtcaaaattacgacataccacccacccacgcccaaagtcaaacagaacccggccaatacggacgccatgtccgggtcgggtgcgtttgacgatgagccgccgccggagccgcgggacggatggctactggtgcgcatccatgtgccggagctgaatgtctacaagtgtctgcagttcccatcggagcggctcgtttgggatgtcaagcagcaggtgctcgcctcgctgccgaaggtaagtcggtcactgtcattaccactgcgatacccattgtcttttcggtgtatatagagcacgggcatgtctcatgtgcgctaaatactcactaaacggggagaaatatgtacatccgaaatggggtctacttcacatagtatggagttctgctcaagcgaaattatgatctgtatttctgtatcctacatgcattattttattaggcacatcaaatgcttgctcaacatactaaaatttgtaaatatcattattattactattattacacataaccggtttccagttcatcttcgtaggcgaagagcagttctatgtagtaggaccaaaccaccagccaggcatacactaaaagtactataaaacattaaatagtatacttaatttaggctttagattcatgattattgggggtacccacacattgtgatgacagtcaggatgatgatgatggtattaaagctgtaaacggtcagggcaaaaatgtgcacaattatccaaatgggtgtgaaaaccaaaaatggcaggaagagcatctcgttgttctacaaaattatgaggtattataagcatatgctaaatatattgggaatatttataatagacagatcacatacattgtgcactcccaggcagagcatggccgaaactatgatgccgaagaaggagaagaccatggtggccttgagggccgccggtgctgggataagggacctctgatactcgttcggaaagatgcactccatcatgaagccggtgccgatggtgatgtaaatgaaccaggttagaaaaatgcatccgaagagcagcacaccgaaacgcagggaatagcagtagcagcacttggtaaagatctgcttcagatatttgcagcgacaggccatgattgatccgatcctcagccgcactgcaagttttaaacaacaattttcaaagctttcctgagaaactgaaatttgttgaaaatctagtttgtataaaagggacacactgaaagaagtaaactagatcagttaaattcagttacacgttagtttaacatttattttacaactcatcaaattgaatcgtcagaatccacactgctcaaatatcgataaaaagccagcactattagcagggaataaacgagaccaactagggggtatgaaaatcaagacattattcagacatattcaatcaaaaatggccaacacccacctatgatgaacacctgaacggccaatataatcggcgaaggtttcgacctggccaactggacaacggccattaggaaatatagggatagtataattgcatagatgataatccacataaggacaaagcctcgcttgctctgcatttgtaatgttataaagcattagaatcttgaaagaaaccaattgaatctcttaccttcgaagcagcatacacaaggagtatagagctcagagttccaattgtcaggatcggagacatgatgacgggtgcccaccatttgtgggacacttgcttgatgaaaatggtgtcatccgaatgcgttatcagctccccaacgtgaaatgttatgaagatggctccaatgattatgcaacccacgttgaggggcaggaaaaagcagcactttttaaaaaacatgccgctacagaaatttgtgatttttttttacatgaatttcgcccaaaacaacagaatgcaaggaacagttgatcgtaaaatttttgcgttagttatttaatatttgaatcaataataatcttgcactaagattaaggatcaaaatccttaaaagacacaaattcacaatcaaactaaatgcattttgcattgaatcacacaaaaaaccaattactgtggaatcgcaatgcaatttttcaacagatgttgttgattgaaatttttatgcagccaaaggctgacacgtgcccttacaacataaaaacgaccacgccccctcagccgccctcgaatggctgccaaatggccctcgtgaagtttcaatttttgaagttcaatgcaatttatcggcaactgcaatgtctgaggtcgtgcgcccagttggaaatcgtgacgctgcagatccaaagatatttgacaattgaatggcagtctgtcaaggggaggcaaaaaaaaagtgtcagtcacaaggaaggttagtttttcaatggccaacagattaggagaactacgtgttaacatattcacatatgttacttagtttgaaatatgagtaaatgcgtggtcagggggtcaagatcagcggttatttgcccttataatgccgtcaaattactcaccgaatgaaaggcacttccccgctcctttgtgctaatgaaagccaaacaatggtcaatcaattgtatacatttaatcgcaatttgttgagcaaattgctgtcgaaacattgtcaagcgtaaatgcaatgcgggggcctcgcccaattcaatattgaaaccgcaaaattgcaaacggaaactctgggcgatacccaaactgaaaccgaactggatttgaaatcacactggtatcgattcgaatcgaactgaactgaactgaactgaaatgaacttcgctgaaccgaacacaatgacctccagctaattgcatggccgggtctttcgtgccggttccgttttcg

SEQ ID NO: 30977 - DNA, 774 bp, DROSOPHILA
atgttttttaaaaagtgctgctttttcctgcccctcaacgtgggttgcataatcattggagccatcttcataacatttcacgttggggagctgataacgcattcggatgacaccattttcatcaagcaagtgtcccacaaatggtgggcacccgtcatcatgtctccgatcctgacaattggaactctgagctctatactccttgtgtatgctgcttcgaagttggccaggtcgaaaccttcgccgattatattggccgttcaggtgttcatcatagtgcggctgaggatcggatcaatcatggcctgtcgctgcaaatatctgaagcagatctttaccaagtgctgctactgctattccctgcgtttcggtgtgctgctcttcggatgcatttttctaacctggttcatttacatcaccatcggcaccggcttcatgatggagtgcatctttccgaacgagtatcagaggtcccttatcccagcaccggcggccctcaaggccaccatggtcttctccttcttcggcatcatagtttcggccatgctctgcctgggagtgcacaataacaacgagatgctcttcctgccatttttggttttcacacccatttggataattgtgcacatttttgccctgaccgtttacagctttaataccatcatcatcatcctgactgtcatcacaatgttgtatgcctggctggtggtttggtcctactacatagaactgctcttcgcctacgaagatgaactggaaaccggttatgtgtaa

SEQ ID NO: 30978 - protein, 257 aa, DROSOPHILA
MFFKKCCFFLPLNVGCIIIGAIFITFHVGELITHSDDTIFIKQVSHKWWAPVIMSPILTIGTLSSILLVYAASKLARSKPSPIILAVQVFIIVRLRIGSIMACRCKYLKQIFTKCCYCYSLRFGVLLFGCIFLTWFIYITIGTGFMMECIFPNEYQRSLIPAPAALKATMVFSFFGIIVSAMLCLGVHNNNEMLFLPFLVFTPIWIIVHIFALTVYSFNTIIIILTVITMLYAWLVVWSYYIELLFAYEDELETGYV

SEQ ID NO: 30979 - DNA, 2594 bp, DROSOPHILA
ttgggattttacaagcacttttaaatgctttccttttttccacctttttctaaagcctttcattttgtcacaacctttgactgcaaaacctttcatctttcagacagagcacccacaacttttatcctcaattaggatttatcatttcccgcaagcgatttccattttacactagttttcccccatttcccgccatctccgtcccccgccctttcgaaatgccaactctaactagttgaatgcaatcaacacgctcgcaattaaatgcgacaaagtgcagacttgcagatgtggttgttgctgcagttggtggctaacccgttccgcccacagttccagttgcctcgacatgtcccgctccgcccgcttttccgctccattttccgccccccccccccttcctcctccccaacacaaaagcgacaactgtcagcgggtctttggcacacatttacatgcctccaatcctccacccaccgtgtggcacctcctcctttccagctagcgtgtgaatttaatttgtgcataattgcaattgcaactgccattgcagtgctgcagccataaaatgtcaatatcaaattgtaatcatcaacgagaaatgtttgcggcagcccaagtgttttcttttcactctgacaatttgtttttcctattagataggcctgcagacatgaaaaggggctcggaaaatcgggccaattgccgtctgactgatatcatcaagtgcgtaggaaaagtgcagtggacagtttcgaaaagtaaaccaatttaaaaattaagtgctggggaaactattttatgttgttgtctggacttgagcaggcttttaatggattgcaatttgcatatgtgtactaaatttatgcgaaaatatttagtgcatatgaaagtggagtgaaaattaatagcttcattgggtaatgcattatgattcggaaaggaaatattatacattataatatattttattcttatacctctaatttgattcatttcagaaccatcatgcgccagactcaacgaacgcagcacagcgaaatgtccaaacaaaacggattccaacagcagaaggccgtaaaagaaagccaaatagattggcaataaaaagttagataaattaacttagtagctcatcacgcccaaaggcaaatcactttgaagtgcaaccaaataaggaaagagcaaattaagcgaatagaacggctagaaggagatctcccagtggagcgggagtagcttcgtttttttttcgtggaccgtgcgatagaaagccgtcaaaattacgacataccacccacccacgcccaaagtcaaacagaacccggccaatacggacgccatgtccgggtcgggtgcgtttgacgatgagccgccgccggagccgcgggacggatggctactggtgcgcatccatgtgccggagctgaatgtctacaagtgtctgcagttcccatcggagcggctcgtttgggatgtcaagcagcaggtgctcgcctcgctgccgaaggtaagtcggtcactgtcattaccactgcgatacccattgtcttttcggtgtatatagagcacgggcatgtctcatgtgcgctaaatactcactaaacggggagaaatatgtacatccgaaatggggtctacttcacatagtatggagttctgctcaagcgaaattatgatctgtatttctgtatcctacatgcattattttattaggcacatcaaatgcttgctcaacatactaaaatttgtaaatatcattattattactattattacacataaccggtttccagttcatcttcgtaggcgaagagcagttctatgtagtaggaccaaaccaccagccaggcatacactaaaagtactataaaacattaaatagtatacttaatttaggctttagattcatgattattgggggtacccacacattgtgatgacagtcaggatgatgatgatggtattaaagctgtaaacggtcagggcaaaaatgtgcacaattatccaaatgggtgtgaaaaccaaaaatggcaggaagagcatctcgttgttctacaaaattatgaggtattataagcatatgctaaatatattgggaatatttataatagacagatcacatacattgtgcactcccaggcagagcatggccgaaactatgatgccgaagaaggagaagaccatggtggccttgagggccgccggtgctgggataagggacctctgatactcgttcggaaagatgcactccatcatgaagccggtgccgatggtgatgtaaatgaaccaggttagaaaaatgcatccgaagagcagcacaccgaaacgcagggaatagcagtagcagcacttggtaaagatctgcttcagatatttgcagcgacaggccatgattgatccgatcctcagccgcactgcaagttttaaacaacaattttcaaagctttcctgagaaactgaaatttgttgaaaatctagtttgtataaaagggacacactgaaagaagtaaactagatcagttaaattcagttacacgttagtttaacatttattttacaactcatcaaattgaatcgtcagaatccacact

SEQ ID NO: 30980 - DNA, 537 bp, DROSOPHILA
gaaccatcatgcgccagactcaacgaacgcagcacagcgaaatgtccaaacaaaacggattccaacagcagaaggccgtaaaagaaagccaaatagattggcaataaaaagttagataaattaacttagtagctcatcacgcccaaaggcaaatcactttgaagtgcaaccaaataaggaaagagcaaattaagcgaatagaacggctagaaggagatctcccagtggagcgggagtagcttcgtttttttttcgtggaccgtgcgatagaaagccgtcaaaattacgacataccacccacccacgcccaaagtcaaacagaacccggccaatacggacgccatgtccgggtcgggtgcgtttgacgatgagccgccgccggagccgcgggacggatggctactggtgcgcatccatgtgccggagctgaatgtctacaagtgtctgcagttcccatcggagcggctcgtttgggatgtcaagcagcaggtgctcgcctcgctgccgaagagcacgggcatgtctcatgtgcgctaa

SEQ ID NO: 30981 - protein, 64 aa, DROSOPHILA
MSGSGAFDDEPPPEPRDGWLLVRIHVPELNVYKCLQFPSERLVWDVKQQVLASLPKSTGMSHVR

SEQ ID NO: 30982 - DNA, 3203 bp, DROSOPHILA
ataaatattgtatattatatgaagaacaagaaaccaggcagcttaaaataatataattgcttttacaaacttcgatctctgttctgacgataacaaacatttcgtatattaagagaatgaatgtgaaacagttttgatgccgcacaaagtgcatccacagaacttggagatagcttgacgaatttatttcaaataaatcatgtatcccccgtctaggttaataatgtgaattgaaaatattatttccatactcgtccctctgtgttatctatacgcctgttatatacatacaaacatttttcattaaattgttcattgcttagctgttttaaagtatttaattattcgataaaaaatgtatgacttgtattttggaaaaatcacagagtatttacaactgcataactcgttcttaactactttttgtaatatatctgtaacatttcttaaaataaatagtggtattggatctttctttctttaactttcaaggcgggctcacaatagctattaacataaccaggaatatatataaagtgatatatatatttatatagtttgaataatgtcctctctacccaagcttcacatatatccttacttttgtgtgggacaggatcaattagaattttccctacaaagtttctcatcacaattggcgaggatgggccaaaaacgatgaagtttcttctatttctttggttggtatatacgtttagctatttataaacaggtttcatcattcaactgatttattgtgcgtaggtattttaggcgttcagccaattttaaatcgattcttacatttgcaacccgctatagtcttaattaccccgtaaaatgcgccatagatgcgcgtattcacttaattattcagctcacgtgtgaactgcgcgcttggggcggtcggttttaaatatttgatttttattgccaagctaggccgatatgtggcgtatataagtggatgagtgggtgccatctgcagtcagttgtgaggagaactgcctaggagctgggcctggaagaatacttactaacaaccaaaatactcaaagagaacctggcttgggaggcacagcattcgtaatactcatcgagaatcttagggatggaacgctggcatgatcgcgtggctgtggtcacgggtgccagctccgggataggagctgcagtggcacgccacttggtgagtgcaggggtcattgttgtaggtctggcccgtcgggtcgaccgcatgaaggctatcaaggaacaactgccgccggagctgcagggccgcctgcatgccatccactgcgatgtcgaagatctggactcggtgacggctgcctttgactggatcgaggagcagctcggcggatgtgacatcctggtgaacaacgcgggatgcctgaaccccggacaacttctcaccctggagctagagcagctgcagcaggtcctgaacgtgaacttgatgggcgtggtcatctgcacccgccgcgcctttcgctcaatgcagcaacgcgaggtggatggccatgtgatcctcattaacagcctaacgggccgtaacatcatcaatccacctggtgacgagctgcaggtgctcaacatgtatccgcttaccaagcacggggttacggccatgttggaagtcctgcgacaggagctgcgcggattcaagactaagataaaggtcacagtgagtgcacaaaaatcgatcaaatagtatatatatgtccgtccgtatcaacttcgagatttcagaaactataaaagctggttaagattaagcgtgcagattcaagagtaatagacgtcacggaacgttcttcgttgtattgtttttcttgccaattattaagttcaaagtattaatttacgtcgcatttttagctgagtaacgagtatcaactaaggaagtgaactcttttataaccgacaagtctacaagctgtttatctcctgttttttctagagcatcactccaggtgtgaccgatacggagattctgccctccggctacggtattttgccgatgctaaaaccggatgacattgccgcaggcatcatgtacgtgctcggcacacccgcacatgtccaggtgcacgagctgaccattaagccgttaggagagcctttctaagtccgtcccgaaatgtcattacgataatgataaaaagaccgtgcgcagccaataaagtgactgaaattgggtatattttttggaaatctcatacgttgggcggactgtgtcgcttgctgtaaaaaactaggaatgacataaatatgaagatgcaagcataagcatgtcaagaccttacgggagcggggggttggagtttggaacaggtgacgcaacatctgtcactgcaacaagaacgctctctgtcaatattgaaagcgtacgtgtgtccaaccgcacacacacacacacgcaggttcctgttggggaactagtgcgggaaggcacggagcttctcccacgaaggactgcatccaataacgcaagatctaaggttaaaaaggacgccaggagacatattctgcgtccaaatctccactaccaacgaggctgtacgccaaatggttacctagttataatacatgtgttgaaaaaaacacacaggccgagtgtaaagaggaagctttatgactggagcatcgcgttggcgctcccgaaatttccgccagcgtgggcatgccaagggtgatgatgacctacactggcgtcgccttcccgaacacttacccgttacagacaaatcttttgaggcccatggatcggagccttgttttcttacactagaacatatcaatgagaatcccaaaaactgtggtcgtcgccccgccccttatatttaattaactaattttcgtaatatctaatttcgcgtgcatcttccagtccaagcaaaaataatcatttcgcgacagcgattatgtattatattattttactaataataacaccgaaaaattaataaaaacaaaagagaatgctatagtcgtcttccgggactatcaaatacccgttacgcaggtagtggaaatacgaacgaaatataattttggggaatacaaaaaaaataaaactaaaaactttaaaaactttatatagtcggaaacgcttccttctgcctgttacatactttatagtatagtatagtatacccttttactctacgcgcaatgggtataataggggaccgtgtccc

SEQ ID NO: 30983 - DNA, 927 bp, DROSOPHILA
agaactgcctaggagctgggcctggaagaatacttactaacaaccaaaatactcaaagagaacctggcttgggaggcacagcattcgtaatactcatcgagaatcttagggatggaacgctggcatgatcgcgtggctgtggtcacgggtgccagctccgggataggagctgcagtggcacgccacttggtgagtgcaggggtcattgttgtaggtctggcccgtcgggtcgaccgcatgaaggctatcaaggaacaactgccgccggagctgcagggccgcctgcatgccatccactgcgatgtcgaagatctggactcggtgacggctgcctttgactggatcgaggagcagctcggcggatgtgacatcctggtgaacaacgcgggatgcctgaaccccggacaacttctcaccctggagctagagcagctgcagcaggtcctgaacgtgaacttgatgggcgtggtcatctgcacccgccgcgcctttcgctcaatgcagcaacgcgaggtggatggccatgtgatcctcattaacagcctaacgggccgtaacatcatcaatccacctggtgacgagctgcaggtgctcaacatgtatccgcttaccaagcacggggttacggccatgttggaagtcctgcgacaggagctgcgcggattcaagactaagataaaggtcacaagcatcactccaggtgtgaccgatacggagattctgccctccggctacggtattttgccgatgctaaaaccggatgacattgccgcaggcatcatgtacgtgctcggcacacccgcacatgtccaggtgcacgagctgaccattaagccgttaggagagcctttctaagtccgtcccgaaatgtcattacgataatgataaaaagaccgtgcgcagccaataaagtgactgaaattgggt

SEQ ID NO: 30984 - protein, 247 aa, DROSOPHILA
MERWHDRVAVVTGASSGIGAAVARHLVSAGVIVVGLARRVDRMKAIKEQLPPELQGRLHAIHCDVEDLDSVTAAFDWIEEQLGGCDILVNNAGCLNPGQLLTLELEQLQQVLNVNLMGVVICTRRAFRSMQQREVDGHVILINSLTGRNIINPPGDELQVLNMYPLTKHGVTAMLEVLRQELRGFKTKIKVTSITPGVTDTEILPSGYGILPMLKPDDIAAGIMYVLGTPAHVQVHELTIKPLGEPF

SEQ ID NO: 30985 - DNA, 3055 bp, DROSOPHILA
aaattataatggtaaaataagttcgaagttgtaggactcaaaatgtttcaagcgtatcaacggaaaacgagtaaagggtataataataaaaatgcaccatctactacatacttcaaactagtgtactattactagtatacctatatagttaaatacaaaaaagaatttattattaatgttcattaatgaaacaaaatatgactttcgagaatcgtacatgtttttaaaattttctagtgcatgtaagagcaggacgggcctaaatgtttttgtcatatcggtagcattaggcaagataaagaaagaagtccgaaaaaataatccatgaataattaagcgagggttttgggcgttttgtggagcgtcaatgtcatgcaacaaatttgcttggttgcttaatagtgtagttcatacttatttactttacacttcacaaaaagtcggaacatgtgatcgccataatgacaaacgcaccgatataaaacgccttggctagtgctcctagtacatatgtacacatgtgtgcacttggtaaaaatccattcgtttgcctttaacatgtttctcaatgaatttagtaaaagcttttactctacgactaacgagttttagctaagtgttccaagcatttggattgaaatgcggtttgaattgatctgataccatctgatatgattacgtttcactctgcggtttggcggtacttgaatgcgtcatacatatgaaaaacacataaacactgtatgaaaaaataaaatcacaattgaaaaagctgataaattttttttgtattttaattttttatcggccaataaatatgcataatgtttaaagttttaacgttacaaaaattatgattcttaaatttcaaaagtaatgaattttaatgtattgggcttctaggtccactcttcgctctgtgtggatatatagactgagcccccttaatccgaagctgtctattgactcagatacgtcggaggttttatttgactcacagtcgccggcatggaacgttggcataactgcgtagcagtggtgaccggagccagttcgggaatcggagcggcaatcacccgaaaactgatctccgctggcgtcatggtggttgccctggcccgtcgaatggaccgcttggagcaattgcgtgaggagctgccgcaggatcggcgatcgcgattgcgtataatgcagtgcgatgtttcggatgtgtcatccgtaaacgcggtctttgacgcggtgcagggggatctgggcaacgtggacattcttatcaataacgccggaaagctgtccggtggacagctgctgactatgtcggtagacactgtgcagcagatgctgcagacgaatgtaatgggcgtggtctactgcacccagcgcgcctttgaatcgatgcggcagcgccagtccaagggtcatgtggtgctcattaacagcattgtgggtcactacatctttaatcccctgcctggaagtcagcaggaactcaacatgtacccggccaccaagcacgcgatcaccgctcttaccgagctctttcgccaggagatgcgagatttcaagaccaaagtcaaggtcacggtgagtacgtgtttaatgaatgcactacaaactaatcaggaaattattattcacaatcgaagctttaaagcctcccaaaatcttgttttactcaatagaaacataagtacatatatgtaaattaaatggctatggaacattcatcgatacgtttacatttttatacgcattaagttttatgacatttctgccttagctattttttgccatagcatccgaagcaaagttattgctgtggttgttaatacctttgttatgggcaaaagtgtcaagacaggcagtctaatctacactattttacagagcattagtccgggattggtggacactgagttagtgccgttggactacaaagggctgcctatgctacaggcggaggatgtggcaaatgccatcatgtatgttctgtcgacgcctccacatgtccaggtgcacgagctgaccatcaagcccttgggtgaacccttttaggacacccctgcattgcttcacttttactactaaatatttaactatgatggccatgtctttgcccttagtttcttaactgaattattcgcggattgcaataaacaggaataaaataaacggatccaatgtctgaaatgtctttgaaatatattgtgacaattttcattataccatacttgcaatattaaaaaatttggcgataaagaggaaaatctcataaatattgtatattatatgaagaacaagaaaccaggcagcttaaaataatataattgcttttacaaacttcgatctctgttctgacgataacaaacatttcgtatattaagagaatgaatgtgaaacagttttgatgccgcacaaagtgcatccacagaacttggagatagcttgacgaatttatttcaaataaatcatgtatcccccgtctaggttaataatgtgaattgaaaatattatttccatactcgtccctctgtgttatctatacgcctgttatatacatacaaacatttttcattaaattgttcattgcttagctgttttaaagtatttaattattcgataaaaaatgtatgacttgtattttggaaaaatcacagagtatttacaactgcataactcgttcttaactactttttgtaatatatctgtaacatttcttaaaataaatagtggtattggatctttctttctttaactttcaaggcgggctcacaatagctattaacataaccaggaatatatataaagtgatatatatatttatatagtttgaataatgtcctctctacccaagcttcacatatatccttacttttgtgtgggacaggatcaattagaattttccctacaaagtttctcatcacaattggcgaggatgggccaaaaacgatgaagtttcttctatttctttggttggtatatacgtttagctatttataaacaggtttcatcattcaactgatttattgtgcgtaggtattttaggcgttcagcc

SEQ ID NO: 30986 - DNA, 752 bp, DROSOPHILA
tcgccggcatggaacgttggcataactgcgtagcagtggtgaccggagccagttcgggaatcggagcggcaatcacccgaaaactgatctccgctggcgtcatggtggttgccctggcccgtcgaatggaccgcttggagcaattgcgtgaggagctgccgcaggatcggcgatcgcgattgcgtataatgcagtgcgatgtttcggatgtgtcatccgtaaacgcggtctttgacgcggtgcagggggatctgggcaacgtggacattcttatcaataacgccggaaagctgtccggtggacagctgctgactatgtcggtagacactgtgcagcagatgctgcagacgaatgtaatgggcgtggtctactgcacccagcgcgcctttgaatcgatgcggcagcgccagtccaagggtcatgtggtgctcattaacagcattgtgggtcactacatctttaatcccctgcctggaagtcagcaggaactcaacatgtacccggccaccaagcacgcgatcaccgctcttaccgagctctttcgccaggagatgcgagatttcaagaccaaagtcaaggtcacgagcattagtccgggattggtggacactgagttagtgccgttggactacaaagggctgcctatgctacaggcggaggatgtggcaaatgccatcatgtatgttctgtcgacgcctccacatgtccaggtgcacgagctgaccatcaagcccttgggtgaacccttttag

SEQ ID NO: 30987 - protein, 247 aa, DROSOPHILA
MERWHNCVAVVTGASSGIGAAITRKLISAGVMVVALARRMDRLEQLREELPQDRRSRLRIMQCDVSDVSSVNAVFDAVQGDLGNVDILINNAGKLSGGQLLTMSVDTVQQMLQTNVMGVVYCTQRAFESMRQRQSKGHVVLINSIVGHYIFNPLPGSQQELNMYPATKHAITALTELFRQEMRDFKTKVKVTSISPGLVDTELVPLDYKGLPMLQAEDVANAIMYVLSTPPHVQVHELTIKPLGEPF

SEQ ID NO: 30988 - DNA, 2674 bp, DROSOPHILA
aagatcacgcgacgcgaagtggctgggcacaagtaacgggacttaaaactgtgaacaatttgctgtcgatccgcaggcacttctgcactcgtcgagtgttcgatcgcgactgagcatgcttttttgaacaacaattcaatatgcaatattcagacatgattgaaagtaaatccgttgtttacgcaagagtgcatatacattaggaatcatatttttgggtggacatagccaaacaacggatactgttttttttatattcctttatttacacatatactattctgccggctggaacgggcttaggatgttatggggcagggtgtatcgtccacgggcgaggcaacgctcggcctgagaccacctttgctgaccactgaccctgtcagacacgccaggttcttcttctccactccaggatcactcttcactttcagtgttcgtccttccgagtcctgccgtctgctcctctccaccagttcggtatttgaaaactcccgccttccgttccaacgctcatcatcttttcccgcctggcaacaccgccgaactcaccatgatcgtgtcatcgatatcggtgagcggcgttgccactaccgacattccgacgctgccatcttgtgtcgatcgccgcccatagtgtggccgcgtgttgagaatccgtgctattccagtatttttttttctgcaagttaccccccctcgttaggcgaccgtaccacgtttcttgctgttcggcgttttgttcggccatttcgaccctcacttccccgcctcgccgcaccttgaggcgatagcgctgcccgcaaagctcgaacagcttggcccagtgcacctttcgcttccgcgccccttggcgcgtggcctactcggccacccggagcagccacttctccaacggcacttccctccacctctggtcgtccagcggaccctgactgcgggagcagcggtgtctttcgcgcctttgggcagacgcggcagctttggtggcggcagcgcctcacctagcgcgggccaattgcactcccccttctccgggttctcttcttccgaactcaccccctttgggtggttgagtcgtcggcggcgtcagtggcaacggcggcgcgggtggctgtgttggcggcggcgttttcggcaatggcgactcttttggcgtctgcgccggcatcggctggcccgccgttggtgcccacagtgcttcctcttcctcctgcagccgagccaaccgctcctgccatgcggccttggcggcagcgaccttccgcgcatccactatctgttggaaccgccgcagggtggcgactcgtgcctccatgaaccgggtcctcggtcggcggtgcgacccggggcctatccgcccctgacctgcgtagcccgccgcacgattcggtacgccatccgagccttggccatccgcacgttctcgtcctcgtccgacgacacctccggggtgaccgtctcgcccccgtcgtcgtcctcctcactttcagggtgacgacctcgaccgcgcatttcgtatccattaccggtgctcgtctttcagttcgacatccggaatctcttaagggattatagtggcgcgcctgatcctgcggcactctcttcatgtttctccgaagatttccttcaatttctccgcgttctccgccggcatctgtgtgcacttgccagtcccggtcgtcgtcgaataactcgttgggcagcctcgagtcggcgagtatcctgtggtctccgccaaacttgtgctctaccgccagctgcagctccggccagtgttcgtcccatgtcctctgatcggcacctgtgaactgcgcgatcattgtttttacggtcctgttggccctttccgtagggttctcttgaggagtatggagccgtgagctggtgttgcaccccccgcttctccagaaacctcatgaacgccctgcttttgaagtgcacaccgtggtctgtaatcataactttgggcaccccgtacctggccactatctgctctcgaccttctcatagaaacgatctcggtccacttttagaatatgtccaccaggaccaacggcattgaattcccgtgtttcgaccgcggcaagggcgttgacgttgggcatcagatgtaacgaactgattttctatttctgctcgctgcggattgtaacggctagctcagagagtttgtgcgttcgtcccaccaaatttatgctttttgtgactgccgaaacaaaaatctccacgtgctcttcagtccttgcttgctcaccgggactggcagtcaaggtatgacttcggtgagcaggaagtgaggccaggtcgcactccctcccttaagtgtagtccatgagggctcctcctccaccctttagtcgccttttacgacgagccgggaacgctgaggtagaattcttcgcccgccgtcacccaggacgcctgttttgacttagacacccactctgttggccatctcatctgatcggacgcgcttcatcatattaatgataaggctgtgtcccagcaccaaagacactagaataacaagatgcgtaacggccatacattggtttggcactatgcagccacttttttggtgacggccaaaattactctctttccgctcactcccgctgagagcgtaagaaatctaaaaatataatttgcttgcttgtgtgagtaaaaacaa

SEQ ID NO: 30989 - DNA, 699 bp, DROSOPHILA
atgcccaacgtcaacgcccttgccgcggtcgaaacacgggaattcaatgccgttggtcctggtggacatattctaaaagtggaccgagatcgtttctatgagaagttcacaggtgccgatcagaggacatgggacgaacactggccggagctgcagctggcggtagagcacaagtttggcggagaccacaggatactcgccgactcgaggctgcccaacgagttattcgacgacgaccgggactggcaaacgagcaccggtaatggatacgaaatgcgcggtcgaggtcgtcaccctgaaagtgaggaggacgacgacgggggcgagacggtcaccccggaggtgtcgtcggacgaggacgagaacgtgcggatggccaaggctcggatggcgtaccgaatcgtgcggcgggctacgcagatagtggatgcgcggaaggtcgctgccgccaaggccgcatggcaggagcggttggctcggctgcaggaggaagaggaagcactgtgggcaccaacggcgggccagccgatgccggcgcagacgccaaaagagtcgccattgccgaaaacgccgccgccaacacagccacccgcgccgccgttgccactgacgccgccgacgactcaaccacccaaagggggtgagttcggaagaagagaacccggagaagggggagtgcaattggcccgcgctaggtga

SEQ ID NO: 30990 - protein, 232 aa, DROSOPHILA
MPNVNALAAVETREFNAVGPGGHILKVDRDRFYEKFTGADQRTWDEHWPELQLAVEHKFGGDHRILADSRLPNELFDDDRDWQTSTGNGYEMRGRGRHPESEEDDDGGETVTPEVSSDEDENVRMAKARMAYRIVRRATQIVDARKVAAAKAAWQERLARLQEEEEALWAPTAGQPMPAQTPKESPLPKTPPPTQPPAPPLPLTPPTTQPPKGGEFGRREPGEGGVQLARAR

SEQ ID NO: 30991 - DNA, 1942 bp, DROSOPHILA
acaaacagaaatagaagaaactccatttcccacactatatccatcaatcccagcccaagtataggcttctctttaagggaaggggagtgacgtatttgggtggtccaaaccagccacttccattatttcaaggaaatcagtaattttccataatgtatcccagctgcgcagcattcgtttatctttggcagcgcagccgttcttgtaaacatcctaaagcctgacctaagcagatttgactgccctctttcaacgctacctaatcttaagaacccaagagcgaggctctcccgaaatacaaatattgttcaaatactgaggcttctcctcaatccaatttgcatttgatttttagtcttaagctgagatccaaagaataaagtcgtgaaactatttctcctaaaaactattttttatttcttggcgttgtccttagtcaactgacgggacattagttcgactcataaataaaacaacaattttactatatatgtacatacagagacatttctgacagttatgggggaaatttgttgtctgaggtactaaaggaaaactgaaaaccaagcgagttactgaaaagtaagaggctagattaggttaggtttagtttagcatgcacatccagaaaatactgttagctgatagtgtttgctatgtatgtttgatatattgttaattatgcttatatatgatattgtaaataaaccgtttgtaagctggttccttgaagcaaagctttttttggctggcaatacatactttagggctaaaagtatacctatttgaggcattagtggtgactgtacccgtggtacagttcccaccttgtgcgaaactctcttgggctgttattgcaagttgttaatgaggaattagggaggaatatctacacaaaaaaccaaggacattcaactaaacatatacaaggggatgcaggagcggggaaggaagattttttaaggacataagaagctttgcaactgaaaaacttacgcgcgtttgcttgcccagcttcttgtttacctggacgcccacactgagcttctggcccaagtggcgggaggtctgcttgatcaggatgcagatcatttccgtctgtagctcgggcatatccaacgcatgttgcagggcattctgggcgagcaccacatggtagtcgatgcccggctggttgacagccaccgacataaacagctgaatgctctgtatggaggtgggtgaactgccgttggcttgggcatggcccgcctgttgggtatcacaggtgaataggctttgggtggcgcacaacagtagttgctgtaaatttcggggtcggtcgtttgtacagtgttgaaaaacattttgttcggttcggttcggttcggttacacgcgaaacacattcaacggaaacgcaacgttcgaaacgcaacgtaaggcaacaaaaagatggagaaaagaagaagccagagaacatttctgatcaattttttttactcatcataaaatggtggtgtgattttgatttgttatgtgcttgatgttgttttctgttgatagtgttgtgtaacggtgttgcttcgataagcttaatgcgaaggataacgagactaagcacagacatagagcacattcaaagctaagtataaaggttcaaagaagcaggacaatcatgatagccttataaacgttgggaaaacataaaaccaaacagagcttaaattgccaatacctgcaacataaaggtcatttaaaggcggctgcgtaatagaggttatgtctgatcagtagttttaagtgattatagtggttttttggttcatgttttcatattttgattttgtaaaatttacagcaaatactttatacaatgagctgtttggttccctttcgcatttgatgatatagaaagttatacagtaacgtactgaaagctatatatatatatatagtgacgt

SEQ ID NO: 30992 - DNA, 4624 bp, DROSOPHILA
atggtctccaccatctgcctcttaattacacaagttcctgccagaacaagagccccgctcaatggtggaattccggataatcgaacaccctttgcaggtgtcctaatggtgcgtgccatggagcagcggctgagtgagtggcccaagccaccgcctcagcaagctcagcatccgcactcacactcgcatccgcaccagccaatccccagtcatccgcaggagcaacaggccaagaaccattgttctcccagccatcaggcaagtggaggtgcaacagcaggagcagcaggatcgggcttaccgcccacccaggaaactgagaaaaccatcacgtctctggagatccaagtggaggaacagcgacaactgcgactgcacgacgcgcgacaaatcgaagccaaggctgccaagatcaaggagtgggtgaacaacaagcttcgcgatctcgaggagcagaaccagctgctgcgtgagcagaacgtcaagtgcaatcagcagttggagttgctcaagaatcacatagccaatcaatcccagcggcatagcattgtgggaccagtgcggaacagcctaagcctagacgtccaggattttaccgggtccgggtcgaatcctgaacatcggaggagaagcgaaagcctagatccccaggagatcatcggccggccgttgaccagctcatatccccatcaccagcacaggagaaacctttcgatggagccccaggaactggaacgaaatctggtggccgcggtagatgggttaaccctggctcccttgtccagcatctccaacaaagcaccgggaggagtccccactgaatctggggtagttaccaggccagacagctcagatacagatactgcccatgattatgcagagatttacacaccatcctgcgaaaagcttcccgcctggatgaagaacaacccggctctcatggccagtggtggaaattccagtactaccacaaccaccaccagtgagctgggtgtcccacggcctccgacaccacccctgcatcggttccccagctgggaagcaaagatataccaggtggcgaacgatggactggcgggagctggaacaggaacaagtaccgctgaaagtacggccagccaggaaccagatatccaagacgggatgggaaccaatctctccaatggccggcgacatggccacggtcatggatcaggaactggaatcggaaccggggatggacacggtaccctgggtagcacgccgggaactccgctgccaccgtcgaggcaacaacaaaccgccagcggcggcttctgtgatatatccgtgcccgtttacgcaacggttaagggtagagcctcgcaaatccgctcgatgccatttacgggcgattcgagcgacgactccagtgacggggaggaccatgcggttatgctcacccaccactcgcacaactcctcaagcacggataatacggagacctcaacctccggcagcgcatcgagcccctcgaagagcctaaagacttcctcaagtttgagtccggctaagcgaagtggttcagagagtccgaagaatgcgaaggcgcgtgtccacatccaatcacgcacatccaccacgccctccagccgcattaaccagcatctccaaccatcgcaacaccaacaccacacactgtccaaccaaaatcatggccaccagctgggggcctacacggtgacgccttcgagtggacagttgagtctaccacgctatcacgccaatgcccttcagcccggcagccttccctcccctctccagcacatgcgaggcacagtaatttcagatctctcctttgaatcaggcctctcggatgactacgctttgccccccgacgccgtatcagagtccacatgcatggatgcctcgatgccatcgctgcttatgcgacagtcctacgtggattcgcccagcaagaagatcgagtcgctggagaagatgggtcacttggcgaagctaggtggcaagttgaagacttggcgcaagcgctggttcgttttgaaaaacggctccctcaactactggaagagtcagcacgacgtgcagcgaaagccacagggtcaaattcaactagatgaggtttgtcgaatcaatcgtgcggagggagcctccaccttcgagatagacacgggcaaaaaggtctactacctcaccgcggactcgcacgccactatggacgattggatccgggtgctccagaacgtgcagcggaggaatgccaccaagctgctgctcagtcgcgacgaccagaagcccaccgtgcaaggctgggtgaccaaggtgaaaaacggtcatcccaagaagtgttggtgtgtgctgctaggcaagatgtttctctacttcaaggctccggcagagacgaatccccttggccaaatcaatatgcgagatgcccgagttgaggaggttgaacacgtttctgactctgattccgaggagcgagaggacgccgcacaagatcaggctagactcacagttgccatctatccagcgcaccagggaccaacttacctgatcctttccggcaaaccggagcgagataactggctctatcacctaactgtcgtttctggcggcggcccaagtgctggcacacagtacgaacagcttgtccagaagctcatggagaccgacggcgatcctaactgtgttctgtggcgccatcccatactactgcacaccaaagacaccattacggccccgctttcctctatgcacacggaaaccatgcagcctgaggccatcaagctcttcaagagcattcagctgtttatgtcggtggctgtcaaccagccgggcatcgactaccatgtggtgctcgcccagaatgccctgcaacatgcgttggatatgcccgagctacagacggaaatgatctgcatcctgatcaagcagacctcccgccacttgggccagaagctcagtgtgggcgtccaggtaaacaagaagctgggcaagcaaacgcgccaactactgttgtgcgccacccaaagcctattcacctgtgatacccaacaggcgggccatgcccaagccaacggcagttcacccacctccatacaggccccttccgccacgcccataatcgactgcaagagcaacccgcccgtatacagctttgtccagggctggcaactcctagccctggccgtttccctatttgttccgcgttcgagccgccttttgtggtacctcaagcttcatctgtcccggaatgccgataccaaaactgagacgggcaagtatgctgcctactgcgagcgtgctttagaaaggaccttaaagaatggaggccgcgagacgaagccttcgcggatggaagtgttgtcgattctgctgaaaaatccgtatcaccactccttgccgcacgctattccagtgcatatgatgaacagcacgtaccaggttgtctcctttgatggatccaccaccatcgaggagttccaggccactttggctcacgaactgggcacaagggatgcgaccaacgggttttgtctgttcagcgacgatcctatcgagaaggatttggagcactacctggaaccgctggccaagctgtgcgacgtgatcagcaagtgggagacggcgctgcgggaaaagggatcaggcaagttcgagaactctcgggtgattcaacttagctacaagaaccgtctgtactggaagcataccatcaagtgcgagacagataaggagcgtttgctcctctgctatcagaccaattcccagattgtccagggcagattccctctatccagagagctagctttggagctggcctcgctaatgtctcagatcgacatgggcgattattcgctcgagaagtcgagggatgtgggtgtgggccttaagggtctggacaagttttacccgtaccgctatagggacgccctaggtgccgagcagctgaaagatgtgcaagagctgctggtctccaagtggatgctccttaagggccgctcgaccttggattgcgaagcccagacagagtccagaatccaacaccgcctcgggagctaccccggtagcttggttggctgtcgcagaagatgctctcaatgtcctcgagctgtccacaatggctccggtggccaggtatccgtatagctccgttatgacctttggcggctgccaggacgactttatgctagtggtttcccacgatgacggcggaggcggtgagcaaaagcttctcttcgcaatgagcaagccgaaaatattggaaatcacactgctgatagcagactacatgaatgcgctgggacacacggtgcccgggactccgcagatgaactccctgacgaggaatgggtcgcatcgctcgctaagaacctcccagcggccaaacttgggtggtggctcagcggtggccaccgggttctctacaaatgccaccacaacggcccacaatacgctcaattcgcatgcgacacacacgcttaactccaaccattcgcacacgctgagcagctcccatcacgccggcgggggaagtcaaccgggcactctgagctcgggtcatcatcagcaccaccatatccagcagcaccaccagcctgatatcctgaagagcacaccggatcaccagaggattaaatag

SEQ ID NO: 30993 - protein, 1376 aa, DROSOPHILA
MVSTICLLITQVPARTRAPLNGGIPDNRTPFAGVLMVRAMEQRLSEWPKPPPQQAQHPHSHSHPHQPIPSHPQEQQAKNHCSPSHQASGGATAGAAGSGLPPTQETEKTITSLEIQVEEQRQLRLHDARQIEAKAAKIKEWVNNKLRDLEEQNQLLREQNVKCNQQLELLKNHIANQSQRHSIVGPVRNSLSLDVQDFTGSGSNPEHRRRSESLDPQEIIGRPLTSSYPHHQHRRNLSMEPQELERNLVAAVDGLTLAPLSSISNKAPGGVPTESGVVTRPDSSDTDTAHDYAEIYTPSCEKLPAWMKNNPALMASGGNSSTTTTTTSELGVPRPPTPPLHRFPSWEAKIYQVANDGLAGAGTGTSTAESTASQEPDIQDGMGTNLSNGRRHGHGHGSGTGIGTGDGHGTLGSTPGTPLPPSRQQQTASGGFCDISVPVYATVKGRASQIRSMPFTGDSSDDSSDGEDHAVMLTHHSHNSSSTDNTETSTSGSASSPSKSLKTSSSLSPAKRSGSESPKNAKARVHIQSRTSTTPSSRINQHLQPSQHQHHTLSNQNHGHQLGAYTVTPSSGQLSLPRYHANALQPGSLPSPLQHMRGTVISDLSFESGLSDDYALPPDAVSESTCMDASMPSLLMRQSYVDSPSKKIESLEKMGHLAKLGGKLKTWRKRWFVLKNGSLNYWKSQHDVQRKPQGQIQLDEVCRINRAEGASTFEIDTGKKVYYLTADSHATMDDWIRVLQNVQRRNATKLLLSRDDQKPTVQGWVTKVKNGHPKKCWCVLLGKMFLYFKAPAETNPLGQINMRDARVEEVEHVSDSDSEEREDAAQDQARLTVAIYPAHQGPTYLILSGKPERDNWLYHLTVVSGGGPSAGTQYEQLVQKLMETDGDPNCVLWRHPILLHTKDTITAPLSSMHTETMQPEAIKLFKSIQLFMSVAVNQPGIDYHVVLAQNALQHALDMPELQTEMICILIKQTSRHLGQKLSVGVQVNKKLGKQTRQLLLCATQSLFTCDTQQAGHAQANGSSPTSIQAPSATPIIDCKSNPPVYSFVQGWQLLALAVSLFVPRSSRLLWYLKLHLSRNADTKTETGKYAAYCERALERTLKNGGRETKPSRMEVLSILLKNPYHHSLPHAIPVHMMNSTYQVVSFDGSTTIEEFQATLAHELGTRDATNGFCLFSDDPIEKDLEHYLEPLAKLCDVISKWETALREKGSGKFENSRVIQLSYKNRLYWKHTIKCETDKERLLLCYQTNSQIVQGRFPLSRELALELASLMSQIDMGDYSLEKSRDVGVGLKGLDKFYPYRYRDALGAEQLKDVQELLVSKWMLLKGRSTLDCEAQTESRIQHRLGSYPGSLVGCRRRCSQCPRAVHNGSGGQVSV

SEQ ID NO: 30994 - DNA, 2977 bp, DROSOPHILA
tgcacctcaacgcgatccacaagattcttggccgccttctgatcagctaaattcatctctgcacgcaccttgcggagagcaaggcagtcaatgatgctatgactctgccaagtgacctccaggtcggcggggattggtgttccctctgacgccaagcagccctgactcgtcattacttgtttctggcaaatgtccatgaacttgtctcgccggctaagcaacgcgtgaggcgccaggtccacatcccccagtttccggtgattaaagtgggtgattagttttccggtatgcgaatttacccccacgacggttgcgacatcgaagtgctctggacagcgtatgcgcatctcgctgagcgagcaggccaaatccagatttgaccggcaccacactaccatatcctcctcgtcgtcctgttgcggctcgacatagggaattaaccgctgcaagttcggacgcggcgttcccacgtcgcagagggcattaaaagatgcagagcatttcatttctaaatataaaatttatatttttttgtacaaaaacttcaggccaacttataaaactgtgtgaggggaaactgcatacatattcgattgaactgaatattccaatcttaggattcgaaaaatactataaattgttatggctaaatactcgggctgatcgctatctttatatgtactcttcagactgctctttgttttaaaagctgagcgatttcagaggacatacaaatagatgtacatatatggcttcacatggccattggagcagaaaaagtgcctacttcaattcgaaagcagttagtatgtcgctaatctatgactgattgcatattctatttggacacaaaaaaaaaaaaaaaaattattattcaataaaaaataaaatacataagcaacagtggaaacagcctagcaagacagcctccttcaaaagctcgatcctggttggttcgccggaaggtactccgttttggtcagtcaagtgatgcacaggctcacacccgccagtcgccgatgatttgggaagagggcaccagctcgaatcgagcgttggccagactcggtggcacaccaaatctagagcaaaaatggagggaaatgagccggctgcccagatgaccacctctagcgctttcgtttctgcttacctgggacggaagaagggagttgggtggccagggaacttgggaatggaaggcggagcagtcgccttgggctggacttccggtttaatctgctgcctgacaggggcagtgcccgcatccacgctgtccagggtgttcctcaccacaaattgctgcctgggctgtgaattggattgcggtctcgttcgagctcctggcatgggcaaaaagcgaaagagccgggtagagacgccgtcatcatctgtcacgtcatcggtggacaaatcatctcctccagcccctccgactccgttggcagacggaacagcactatcagcttgtccaccggcaagcggagtaaacacggcagccagacgcacaggcacaaaggctgggagccgcactgtaatgggagtgccggagggcggaacagccggtgacgggattgcaacggagactggtatgggtgtgggtcgtggcggaggaggtggtggtggtggcagtggaggcggaggaggtctacgtgtgctggcatccgctggcgacgcagtcgttgttgtggccgattcctcctcgacctccttccaggcctccagcagggtcagcagctcatccttgctcatgtggccgagaccaacggggctgtagggccactcgcccactccgagtccactaccaacactattccagcctaaagagggcacttgttccacttgctctacgtgacccagcggagtctcgaacaggctcctttggggacgtgtgaggagcagctgctgaccagccagcccattgcacaggatctgcatgaggagacccaggagcgtcgcacgaactgacccggccatgactgactttgtattgtggagcctctaggtggagcagtggcttatatatacatacctgctttcaacggaacgaggaaggaggccaagccgagcaaaacggaagcgcacgcattccgctgcgggtgatccgatcacacgatgagaaaataggttgaccgcagtcctcgatgggctcagagttaattgaaatgcattcgatttaagatcacagtacaagcattttaaataatgtcataagctttcccgctttgatcacaaacttgtgtatatcttagcattcttcggtatgagcagaaatgggaatggttattcgcattcgcttgcagggcttcaattcataatatacatagatgaataagtcgcattcgatatgaattattttcccagtgcaaagatttttccggtggtcgcttgaaacgcacattcgcacgcagctccatcgccaagtaccacaggtagtccatatagttgggtccctgcctcaagtccaagtccggtttcgcgggcgaaccacttttccttctggggatggatgtggatgtccatgcagaggatggtcttcgcgggcgaaccggttgggcttggtcatcgacttttggggggtccaacccacttccggcatctgcgccagcggatttgagtctgcgaaagcggcgcgacgtgccagggatttcgatttatgttggttaataatttaaataaatatttatttatatttaaatatttgaaataatatattcgcaactcgattgccaatataaaaaataaaaataccaaagaccaattggtcggattgggactcaaaacagctatagaacaatgcatctgggcgccaggttcatgggtgaatcgaagtattgtacttctattgaacttctggggatccttaatccgcatcctgtgtacaacacacgcatacaaaaagcaaactccacattacagcagagcgcaagctgtcaaagctgtagacctgggaaaatagctttgcgggaaagcccgg

SEQ ID NO: 30995 - DNA, 906 bp, DROSOPHILA
atggccgggtcagttcgtgcgacgctcctgggtctcctcatgcagatcctgtgcaatgggctggctggtcagcagctgctcctcacacgtccccaaaggagcctgttcgagactccgctgggtcacgtagagcaagtggaacaagtgccctctttaggctggaatagtgttggtagtggactcggagtgggcgagtggccctacagccccgttggtctcggccacatgagcaaggatgagctgctgaccctgctggaggcctggaaggaggtcgaggaggaatcggccacaacaacgactgcgtcgccagcggatgccagcacacgtagacctcctccgcctccactgccaccaccaccacctcctccgccacgacccacacccataccagtctccgttgcaatcccgtcaccggctgttccgccctccggcactcccattacagtgcggctcccagcctttgtgcctgtgcgtctggctgccgtgtttactccgcttgccggtggacaagctgatagtgctgttccgtctgccaacggagtcggaggggctggaggagatgatttgtccaccgatgacgtgacagatgatgacggcgtctctacccggctctttcgctttttgcccatgccaggagctcgaacgagaccgcaatccaattcacagcccaggcagcaatttgtggtgaggaacaccctggacagcgtggatgcgggcactgcccctgtcaggcagcagattaaaccggaagtccagcccaaggcgactgctccgccttccattcccaagttccctggccacccaactcccttcttccgtcccagatttggtgtgccaccgagtctggccaacgctcgattcgagctggtgccctcttcccaaatcatcggcgactggcgggtgtga

SEQ ID NO: 30996 - protein, 301 aa, DROSOPHILA
MAGSVRATLLGLLMQILCNGLAGQQLLLTRPQRSLFETPLGHVEQVEQVPSLGWNSVGSGLGVGEWPYSPVGLGHMSKDELLTLLEAWKEVEEESATTTTASPADASTRRPPPPPLPPPPPPPPRPTPIPVSVAIPSPAVPPSGTPITVRLPAFVPVRLAAVFTPLAGGQADSAVPSANGVGGAGGDDLSTDDVTDDDGVSTRLFRFLPMPGARTRPQSNSQPRQQFVVRNTLDSVDAGTAPVRQQIKPEVQPKATAPPSIPKFPGHPTPFFRPRFGVPPSLANARFELVPSSQIIGDWRV

SEQ ID NO: 30997 - DNA, 3482 bp, DROSOPHILA
ctagtggcctggcgcctagtggctgccggtgtatgctgcgcttgccgccgcgctcctcgcggacatgtaactgcgagagcttacacttaattacagaaataatgaagtttcccgccgaaatgatttgggcgtgtgtgtttgtgtgcgagtgtttgtcgcgtgtgtgtgtgttcgcgatacacccttttctgaggaacacaacaaaagagcaggcgaggggacagaacaaacagcgctgggatgctgcgattagccaggaccacaccacggccacggttgttggttaaaacacattaacaaaataactatttcacaacttaatcgccatggaaaacgcgggaaacttgactagttgcggcgggcaggtgcgtgtgatccactccgcgttcgaactatccacttctagggctgcgcggacgatgtggccctagggatggacttgtgcagaaggaaaactaatttattgccactacttaaagattttgcaattgcgattgcatagtcagagtctgacacgttaatacaagttaatggatttttagttgggcggccggtatttcgccagcaaagccatgcggtcacaccgacgcgcgcattcggccagtttaaacgtggtggggtggtattactacagtgcttggcgagttatgcagtgactgcaagcagtatgtcgtgttgcatacatacctaaattgggggaccctaaaatgaattagaacgaaataattgacaaaaatatgtgtacacatataatttatttgcaatgcacaatgctatttgcatgtgtgcggtaaactgacagtgttggttagcgttcaagagcattgcacatcggcgatatagctagttgtaatcgatagccgcaaatttaaatactgctttgaactttatggaaattcgcgggaattcttcgcgattcagctactaacatacatacatatacactatacaatttagagaacttgctgtcgcagcacatacgacccgagctacgacgtggctaacgtagataccgtcttctgaacctcctggccaggaggtggaatagcatgtgtcgccgcataaaggccgccgtcagacctgccgccgtggacagctcgtggttttcttgagaatcgctggccagactggagctctcgaaggaattggaggaattgaaagagtcagaactctctgcctgcgtattctgatccgcaccagttctagcacttctccaaatgggtgttgaagagccgtcggacttacagccactggtgttggttctggagttcgggatctgggttctgtcgggatgcttctccagcacaaggcaatgctgtcttttgaacggttgactagcagacacaccgtacttggctatcgcgcggttgagctcaggatcggggatgtatgcaccgcgcgacaaagactccgtttttccgatcgattttcttttggaaatatacccgctgacatatctttttggtctagagaaacgtctcgcggaggttgccttctcaatagtcaatttcctcgcggaggttgcattgtcaatggtcaagttcctcgtggattttgccttgtcaatagtcattttcctcgcggaggttgccttctcaatagtcaatttcctcgcggaggttgcattgtcaatggtcaagttcctcgtggattttgccttgtcaatagtcattttcctcgcggaggttgccttgtcaatagtcaatttcctcgcggaggttgccttgtcaatagtcaatttcctcgcggaggttcccttgtcaatagtcaatttcctcgcgttggttgccttgtctatagtcaatgtccccgcggaggttgagttgtcaatagtcaatttcctagcggaggttgccttgtcaatagccaagatcctcgcagagtttgccttgtcaatagtcaagttcctcgcagaatttgccttgtcaataatcaatttccttcgctccgcctcctccgtctgcaaagtcttgtggtgcacctcaacgcgatccacaagattcttggccgccttctgatcagctaaattcatctctgcacgcaccttgcggagagcaaggcagtcaatgatgctatgactctgccaagtgacctccaggtcggcggggattggtgttccctctgacgccaagcagccctgactcgtcattacttgtttctggcaaatgtccatgaacttgtctcgccggctaagcaacgcgtgaggcgccaggtccacatcccccagtttccggtgattaaagtgggtgattagttttccggtatgcgaatttacccccacgacggttgcgacatcgaagtgctctggacagcgtatgcgcatctcgctgagcgagcaggccaaatccagatttgaccggcaccacactaccatatcctcctcgtcgtcctgttgcggctcgacatagggaattaaccgctgcaagttcggacgcggcgttcccacgtcgcagagggcattaaaagatgcagagcatttcatttctaaatataaaatttatatttttttgtacaaaaacttcaggccaacttataaaactgtgtgaggggaaactgcatacatattcgattgaactgaatattccaatcttaggattcgaaaaatactataaattgttatggctaaatactcgggctgatcgctatctttatatgtactcttcagactgctctttgttttaaaagctgagcgatttcagaggacatacaaatagatgtacatatatggcttcacatggccattggagcagaaaaagtgcctacttcaattcgaaagcagttagtatgtcgctaatctatgactgattgcatattctatttggacacaaaaaaaaaaaaaaaaattattattcaataaaaaataaaatacataagcaacagtggaaacagcctagcaagacagcctccttcaaaagctcgatcctggttggttcgccggaaggtactccgttttggtcagtcaagtgatgcacaggctcacacccgccagtcgccgatgatttgggaagagggcaccagctcgaatcgagcgttggccagactcggtggcacaccaaatctagagcaaaaatggagggaaatgagccggctgcccagatgaccacctctagcgctttcgtttctgcttacctgggacggaagaagggagttgggtggccagggaacttgggaatggaaggcggagcagtcgccttgggctggacttccggtttaatctgctgcctgacaggggcagtgcccgcatccacgctgtccagggtgttcctcaccacaaattgctgcctgggctgtgaattggattgcggtctcgttcgagctcctggcatgggcaaaaagcgaaagagccgggtagagacgccgtcatcatctgtcacgtcatcggtggacaaatcatctcctccagcccctccgactccgttggcagacggaacagcactatcagcttgtccaccggcaagcggagtaaacacggcagccagacg

SEQ ID NO: 30998 - DNA, 1482 bp, DROSOPHILA
atgaaatgctctgcatcttttaatgccctctgcgacgtgggaacgccgcgtccgaacttgcagcggttaattccctatgtcgagccgcaacaggacgacgaggaggatatggtagtgtggtgccggtcaaatctggatttggcctgctcgctcagcgagatgcgcatacgctgtccagagcacttcgatgtcgcaaccgtcgtgggggtaaattcgcataccggaaaactaatcacccactttaatcaccggaaactgggggatgtggacctggcgcctcacgcgttgcttagccggcgagacaagttcatggacatttgccagaaacaagtaatgacgagtcagggctgcttggcgtcagagggaacaccaatccccgccgacctggaggtcacttggcagagtcatagcatcattgactgccttgctctccgcaaggtgcgtgcagagatgaatttagctgatcagaaggcggccaagaatcttgtggatcgcgttgaggtgcaccacaagactttgcagacggaggaggcggagcgaaggaaattgattattgacaaggcaaattctgcgaggaacttgactattgacaaggcaaactctgcgaggatcttggctattgacaaggcaacctccgctaggaaattgactattgacaactcaacctccgcggggacattgactatagacaaggcaaccaacgcgaggaaattgactattgacaagggaacctccgcgaggaaattgactattgacaaggcaacctccgcgaggaaattgactattgacaaggcaacctccgcgaggaaaatgactattgacaaggcaaaatccacgaggaacttgaccattgacaatgcaacctccgcgaggaaattgactattgagaaggcaacctccgcgaggaaaatgactattgacaaggcaaaatccacgaggaacttgaccattgacaatgcaacctccgcgaggaaattgactattgagaaggcaacctccgcgagacgtttctctagaccaaaaagatatgtcagcgggtatatttccaaaagaaaatcgatcggaaaaacggagtctttgtcgcgcggtgcatacatccccgatcctgagctcaaccgcgcgatagccaagtacggtgtgtctgctagtcaaccgttcaaaagacagcattgccttgtgctggagaagcatcccgacagaacccagatcccgaactccagaaccaacaccagtggctgtaagtccgacggctcttcaacacccatttggagaagtgctagaactggtgcggatcagaatacgcaggcagagagttctgactctttcaattcctccaattccttcgagagctccagtctggccagcgattctcaagaaaaccacgagctgtccacggcggcaggtctgacggcggcctttatgcggcgacacatgctattccacctcctggccaggaggttcagaagacggtatctacgttag

SEQ ID NO: 30999 - protein, 493 aa, DROSOPHILA
MKCSASFNALCDVGTPRPNLQRLIPYVEPQQDDEEDMVVWCRSNLDLACSLSEMRIRCPEHFDVATVVGVNSHTGKLITHFNHRKLGDVDLAPHALLSRRDKFMDICQKQVMTSQGCLASEGTPIPADLEVTWQSHSIIDCLALRKVRAEMNLADQKAAKNLVDRVEVHHKTLQTEEAERRKLIIDKANSARNLTIDKANSARILAIDKATSARKLTIDNSTSAGTLTIDKATNARKLTIDKGTSARKLTIDKATSARKLTIDKATSARKMTIDKAKSTRNLTIDNATSARKLTIEKATSARKMTIDKAKSTRNLTIDNATSARKLTIEKATSARRFSRPKRYVSGYISKRKSIGKTESLSRGAYIPDPELNRAIAKYGVSASQPFKRQHCLVLEKHPDRTQIPNSRTNTSGCKSDGSSTPIWRSARTGADQNTQAESSDSFNSSNSFESSSLASDSQENHELSTAAGLTAAFMRRHMLFHLLARRFRRRYLR

SEQ ID NO: 31000 - DNA, 3974 bp, DROSOPHILA
tctacttgctgggaaacccgttgatttggtggagtaatctggttttcctggcccttttcgtcacggttttcctgtgcaacgcagttgttcagcaaagaagagctggcttcgcccgatcggcggcccaaaatcaagcccaagttcccgattcggaaacagtggcccaggacgaggagagtgagcactccaccacggacatctgcagttgttgtactccggcgaaggagatagtcccaaaggcagttcccagtgggtccccggaggcacccaacccggcgcagtccttaagggcggccgcctggctttttctgggctggatgctccactatttgcccttctgggcgatgggacgggtgctctacttccaccactattttccggccttgatcttcaactccttgctgacgggtaagcagatagaagctgtgtcaaacttcatctttgtttaaaagcaaattaatagtgcctaataattcctttaccgtttgtcattttaaactgtttttaaataatttcacacaggcgttatgtacaactacattttgagggttctgcccaaatggattcaccacgttatcctcggactggttctctcgatcctggtgtatagttttgccgccttctcgccacttgcttacggaatgagtggtcctctagccaacgagccgaactctacaatgtacaatctcaagtggctttctacctgggagttctagttaatataaccttaagcattttgtggttcaataagtgttttaataatcctttaaagctccagaacataactcatatgcatctttgtgaaaatgaaaaccccaaataggcaactatttattatttatgagtaggtataatgattaatttatagaatacgcttaactctacgtactgtttacaaacaaaaacaaaaaaaaaaccattggtaaaagtagcaaaattctcgataagcctaagtattaaaggatctggggatccgtgtcccacggtcctgcgctacccatcaatcgaatattcccaggtcatcgaagcgacgcagggcgtagcgcaaggtgtccgtggtgcggggattggaggagaacatcagctggaccttcttcttggcgaagtcctggtccgacagcgcctctatgctgatgtcgtacgagtcctccttcttcatggtcaccatcggcagaaaggcgtaggacgagaagaagccgtacagttctctggcccggatctcctgttgaatatccgcgtagctgggcacaaacgccgagtgcatccgctccaggctgtcccttagggaagcgtagtacgtctggataaggaactcgcgccggtggatcaacacgtccagctggacgctgctgtttaggaagaagtttatgtcgcagcctgggctgccgaagaagctgttttggaaatccacctggaattgcatagagcccacagttagtgtccagaattacaaatgatggagtctagacactcacgaatatggcatcgatgggcttcgtgggctgctcgtcgtcgtatttatacatgaagttgtttacccacaggtcgccatgattaagcacagtgatctctccgggcagcggccgcccggtggtcacgaggttctccttgatgttgtcgcagtggcggtgcagcttctctgccagcagctcgtagccgggccacttggagacgacgttggccaaagtccggcactggagggtcatgaagttgatgaatcgctcgttggttctgatgtagttttcgtccagcataccggtggtgaagtgctcgcgaacacttggttcctgcaagagagtccaagccaataaaataaacatgaaatcaaaaaactaagaaattcctgccaactttacccatttctgattttgatttgatatttgctttaagatggcaaagagagagtgaaaatgtttgattgttaaatgtgtttttataaactgaaaagtacataatgagtatagttattaaccatgttatacatatatttcaaaggttcactgtaaacgtataattaatcatttatttgactgtatttgacgtaatcacttgatcagcaaaaatcccattgatagggagcatttttttttttttttttttttttgttaggtaatgcccattaataattccattattaaaataaaatcgcatgaattgcggatgattaacatatcaatgcgagggaaacgaaaaaccattcattcgtattactgggacttgaaataatctcttgatcttcatgttgctaaaggattttatcgaaattgttctactccaaatttctcttctcaataggttgttcaatttgatatgattgatacaagtaagcaattcaagctctcaacttagcactcaccttctcggccagcaccattgagctggcgtggaacttgcccagcttcttgaggatgaccacgcagtgctcctcgttaagcccgctctgcctgctggctagcttgtagccgtactgggtgaggtcgtcgaagacgatcgtctggatgggctcgcgggttgtgtacaggcacttggctccaaacttggacccgtcgccgatcaagacttccagtttgccgaggacgtcgaagtagaatatcttctcgcgcagatacacggccagctcctcgaggaactgggtggccggcgtgatggcaatactcttgacaatcagggccagctcctcgtccagctgcctcttgctgctgcggtaaagtgccttggccctatagattttgctgcagtagttctcaccgccgccaccgctcgactcggaaaagatgatcttcttgatgtccacccgcatgtctcgaagtccgtcctcaagcgccgccttgaagaagtcctcgttgaggtacttgggaggctcgtggcccagtcgcttctgcttgtcgtccagcttcatctatccagctgtcctttctggctgcgaaattataccacgatctctggatttcaggaggagggtcacctgcttcggcggtttcttcgactgggaaactgccgccccgccagcgcacttatatatattaagcccttatcagcaacaggtgctgtccgcggcgcagtcggcttcgaccgcaccgatatttgtcgccacaccatatctctattgacgactacatagtatagaccagaccaagtgctccatagatgcaattccagtgggggtgggaggcttcaggctcactcccatggagtaagaagtaaaataaagaacacccaatatagagctccagaacctggtttaagttaaagtgaggctacaactgtattccaagggttattccaccggctttcaatgactgtgtgccggcttgaattacagtcctaggcgcccccttgtattttgtcaatccctttggccacacagcccctggatttgtcgctcgactagatcccattccgatccgaaaacctctcggactctcaattctgaaatgctgtacagatcggtatcatcgcctaggcgagcgacgtggtcgacatacctcgaatgccttcgcaaacaatatatgtagcggacgcacacctacatctgggcaccaagccaacaccaagcaccaagccgtattgcacataccacaaaacgacaaatcagatttagataaaacagatctcggggccctgggtactcgtacttcaccaaactcgaagatatgggtaaaatgcttaactccaaacctgactttgagagagtttctgggtccacaattgtaggggacggttgataatcggtgcacctggcatggggcatccgtggaatactaactacacagattacagtgctcagcacgtggttgaatattaatctagtcggggagtgctaatcgattgtaattgcaattaattaccaggtgcggcaatatttgtagcgccagcaatccaaaaagtatgctaggcctaatatttttaactggacgtactatcatacgcagactaacgaacatttcgaattccgggaatcataggcgaagttc

SEQ ID NO: 31001 - DNA, 1341 bp, DROSOPHILA
ccgaagcaggtgaccctcctcctgaaatccagagatcgtggtataatttcgcagccagaaaggacagctggatagatgaagctggacgacaagcagaagcgactgggccacgagcctcccaagtacctcaacgaggacttcttcaaggcggcgcttgaggacggacttcgagacatgcgggtggacatcaagaagatcatcttttccgagtcgagcggtggcggcggtgagaactactgcagcaaaatctatagggccaaggcactttaccgcagcagcaagaggcagctggacgaggagctggccctgattgtcaagagtattgccatcacgccggccacccagttcctcgaggagctggccgtgtatctgcgcgagaagatattctacttcgacgtcctcggcaaactggaagtcttgatcggcgacgggtccaagtttggagccaagtgcctgtacacaacccgcgagcccatccagacgatcgtcttcgacgacctcacccagtacggctacaagctagccagcaggcagagcgggcttaacgaggagcactgcgtggtcatcctcaagaagctgggcaagttccacgccagctcaatggtgctggccgagaaggaaccaagtgttcgcgagcacttcaccaccggtatgctggacgaaaactacatcagaaccaacgagcgattcatcaacttcatgaccctccagtgccggactttggccaacgtcgtctccaagtggcccggctacgagctgctggcagagaagctgcaccgccactgcgacaacatcaaggagaacctcgtgaccaccgggcggccgctgcccggagagatcactgtgcttaatcatggcgacctgtgggtaaacaacttcatgtataaatacgacgacgagcagcccacgaagcccatcgatgccatattcgtggatttccaaaacagcttcttcggcagcccaggctgcgacataaacttcttcctaaacagcagcgtccagctggacgtgttgatccaccggcgcgagttccttatccagacgtactacgcttccctaagggacagcctggagcggatgcactcggcgtttgtgcccagctacgcggatattcaacaggagatccgggccagagaactgtacggcttcttctcgtcctacgcctttctgccgatggtgaccatgaagaaggaggactcgtacgacatcagcatagaggcgctgtcggaccaggacttcgccaagaagaaggtccagctgatgttctcctccaatccccgcaccacggacaccttgcgctacgccctgcgtcgcttcgatgacctgggaatattcgattga

SEQ ID NO: 31002 - protein, 421 aa, DROSOPHILA
MKLDDKQKRLGHEPPKYLNEDFFKAALEDGLRDMRVDIKKIIFSESSGGGGENYCSKIYRAKALYRSSKRQLDEELALIVKSIAITPATQFLEELAVYLREKIFYFDVLGKLEVLIGDGSKFGAKCLYTTREPIQTIVFDDLTQYGYKLASRQSGLNEEHCVVILKKLGKFHASSMVLAEKEPSVREHFTTGMLDENYIRTNERFINFMTLQCRTLANVVSKWPGYELLAEKLHRHCDNIKENLVTTGRPLPGEITVLNHGDLWVNNFMYKYDDEQPTKPIDAIFVDFQNSFFGSPGCDINFFLNSSVQLDVLIHRREFLIQTYYASLRDSLERMHSAFVPSYADIQQEIRARELYGFFSSYAFLPMVTMKKEDSYDISIEALSDQDFAKKKVQLMFSSNPRTTDTLRYALRRFDDLGIFD

SEQ ID NO: 31003 - DNA, 3464 bp, DROSOPHILA
attgaccatgagcaaattttttaaaattttttttattgcatttatcaccgataacattcacttgtatcacaaaaaaaaaaaaaaaattttaaaccaaaaaattttctttatatgtaggcaagtaaatccttttttcacataccacaaaacttagcctcatatctatgtccaaaatacgattttctgagggaatttccctttatccttgggaagcaatgaacaaatttatgaagaattgagcaaacttatataaaccactcgcgtgcgcagtcgcctttgttctaagcccaaaaagagtgacggtccgagcttttatagcccaaaacagattggggaatcgcttgggatcgattgtgtggcccatggcaatgctggtcagaacagaaacgccgacatcgagcaggtttttccccagccaagaaaacggtggaatggggagctctaagttcggagtgggatatatagttccccttgtagaacaacgagaaaattaattgcagtctgcaaagcgaaaactaagctgggaaatctataataataatgacggggcgaacaaccgggagaggcacatcattgataaagtgattgaatgaatgatggatccaccgacgtggaaaggagggctgcgtttttgaaagagccgcatctattccaatggccgtaaacatttgttgatgacttttcttctttgccctgccttgctttttaacacattcaaattttgttttcctttctgattttccgtgtattggactctggaatttgggtcaggcgatggctttagctcacccgtccgatttgcacgttgggttatgcaactatagatcgctcaataaagtggtccctattcttcactttccaatttacgaccgccttttcagagctcgggttctcttttgaccccaaacatgaatgactgccctttatcggtcgtaaaacggttccacaaggcaacctagctaggcattacaatctaaattgtctcatgactttttctgaaggctttatttatggagagaggcattaatgatcatctcggagcactgtgatctgtaatctcttggacaaagaatgtcaccccaaaaactattcttaatcaattttagttattaacatataattatttgtgctatctccgaggtctgaagccgttctctatgtacttggatgtgtagtatttggtctgattgtccgttccatgtgaccgatggtagggtcccttgtagctgaaattcaagagggataaaataagtaaaaaatatataaattaaatatttaagacgaagcagcgagcaccaactaaccgtgaatttagtataaaccaggtactaggctccctttccaaggagcttcttgccgagcgatcacttttctctagtagattcttggatggattctgtgtttgtggctggagcagtttacccagggtatacactggaaatgcatagtacttctttttcagggcataccgagagctctgtcgcaatggcgttggcggcgtagtgggactcagagtatcgacggctggtcgttccaaactctcatcgatgtagacgatctggaagggctcactgctgctggcggtagacgtttctgttggctcgggaggtagttccacctctgtttcggcttcatgtgctgttagccagtcttgttcatcaagctcctcctctacaccatcgcttagatcccccaactccttctgctcgtccggctccacttcctcgctggagtgatgacgatgattgtcgttgtgaccagtggatcgtcgcaggactgtctgccattgcatcacttcttgaggggaatgaaaggcctcatattgcttggccttctttctctttcgctttcccagcgttagcattccctcaattctgggcagctgtgtctcgtagggtgatgtcatgggcgtggtggaagtggtgggtgcttgagtggatgtgctagttagggctggatcattgatggcctcttgggcataaaagggaattaaagtcaggttcatgatctcccgttgtcctggaaagcggaatcgctctacaatcggttttggacgaaacatgggcgtcgatggtggatagagaacttggcctggaactggttcctgcatgggataacgcctcctgctcagcatggtgttgagaatcagttctcccctggttccattgtacacgaaaacggggtagttgcccatacccagttgcagggaattctcccctggcccattatcgaaaacgggcagctgacgacgttctcccctccggtgacttctggttttttgaacaggttgtacgtaccgatggggcagctggagacggtggggcatcataaagcgtcgtttaggtaaggagggctgttttgggggcggcgcagaaggagcatcccgatcgtcatgtctaacaagaaaagtaatggagccggattccgcctcctgaccaccacctcttccctgccttctgaccattagcgcagcaggaatcctagtggtggtttcatagtcagcttctgggcgattctgtctgtgcctttttgctagcccatcctctaggatccaaagtggacgatgctcgtccgccaaataatggggtagctgtccccagacagccctagtccaaagtgaaacaataatccaaggcacctccatttagtgcgacaaatgactgtgaaatggtcagctagccactccaagtccgtcactttatagcgttgatgttgagcacttggaatcgggttgcggcgatggtgtaactaactttcgttttgggcgaaaatcgcacaactcgttctgagtgggccactaaggtagccgagcatgttgtgggtcacttaatgtaggtccaaaatatcataagtactatgtacatacgttcttataaaaaaattggttcgatttaaacaattcgagaacattattgtaaagatattgacaaaataattaagcatgatggcgtcggatagtttttagcattctaggtgtttgtgggcattagtcggaatgaaccgagtatacgcttttactctaggagggacggggaaaaggcatctcaatagtctgatcacttgtcaaaccctgagggtctggttagacagctgccagctgggcttcagcatcaatggagccagctattttccatctccaccatcatgtcctatcagctgtcaaaactggcattaatcaaaacactcttagccgattcccatttttgtggcggtctgcatcctccgggtctcgggaagagcatcgcagtggtagtgctttttcgggtattcttctgagctggcagagaagaccttgccttcgcggggctccacggataaaaatgctgacgatcaagtgaaattacattggagatatctgaacactttcggtgctattaaaaatataaaattccctaataacgaaattaatttttgatattgatgtgaaattcaatttttttcctgtgcagagctcagtttttgtt

SEQ ID NO: 31004 - DNA, 1386 bp, DROSOPHILA
atggtcagaaggcagggaagaggtggtggtcaggaggcggaatccggctccattacttttcttgttagacatgacgatcgggatgctccttctgcgccgcccccaaaacagccctccttacctaaacgacgctttatgatgccccaccgtctccagctgccccatcggtacgtacaacctgttcaaaaaaccagaagtcaccggaggggagaacgtcgtcagctgcccgttttcgataatgggccaggggagaattccctgcaactgggtatgggcaactaccccgttttcgtgtacaatggaaccaggggagaactgattctcaacaccatgctgagcaggaggcgttatcccatgcaggaaccagttccaggccaagttctctatccaccatcgacgcccatgtttcgtccaaaaccgattgtagagcgattccgctttccaggacaacgggagatcatgaacctgactttaattcccttttatgcccaagaggccatcaatgatccagccctaactagcacatccactcaagcacccaccacttccaccacgcccatgacatcaccctacgagacacagctgcccagaattgagggaatgctaacgctgggaaagcgaaagagaaagaaggccaagcaatatgaggcctttcattcccctcaagaagtgatgcaatggcagacagtcctgcgacgatccactggtcacaacgacaatcatcgtcatcactccagcgaggaagtggagccggacgagcagaaggagttgggggatctaagcgatggtgtagaggaggagcttgatgaacaagactggctaacagcacatgaagccgaaacagaggtggaactacctcccgagccaacagaaacgtctaccgccagcagcagtgagcccttccagatcgtctacatcgatgagagtttggaacgaccagccgtcgatactctgagtcccactacgccgccaacgccattgcgacagagctctcggtatgccctgaaaaagaagtactatgcatttccagtgtataccctgggtaaactgctccagccacaaacacagaatccatccaagaatctactagagaaaagtgatcgctcggcaagaagctccttggaaagggagcctagtacctggtttatactaaattcacgctacaagggaccctaccatcggtcacatggaacggacaatcagaccaaatactacacatccaagtacatagagaacggcttcagacctcggagatagcacaaataattatatgttaataactaaaattgattaagaatagtttttggggtgacattctttgtccaagagattacagatcacagtgctccgagatgatcattaatgcctctctccataaataaagcc

SEQ ID NO: 31005 - protein, 418 aa, DROSOPHILA
MVRRQGRGGGQEAESGSITFLVRHDDRDAPSAPPPKQPSLPKRRFMMPHRLQLPHRYVQPVQKTRSHRRGERRQLPVFDNGPGENSLQLGMGNYPVFVYNGTRGELILNTMLSRRRYPMQEPVPGQVLYPPSTPMFRPKPIVERFRFPGQREIMNLTLIPFYAQEAINDPALTSTSTQAPTTSTTPMTSPYETQLPRIEGMLTLGKRKRKKAKQYEAFHSPQEVMQWQTVLRRSTGHNDNHRHHSSEEVEPDEQKELGDLSDGVEEELDEQDWLTAHEAETEVELPPEPTETSTASSSEPFQIVYIDESLERPAVDTLSPTTPPTPLRQSSRYALKKKYYAFPVYTLGKLLQPQTQNPSKNLLEKSDRSARSSLEREPSTWFILNSRYKGPYHRSHGTDNQTKYYTSKYIENGFRPRR

SEQ ID NO: 31006 - DNA, 2768 bp, DROSOPHILA
gatttagcattaagtacgatcttctagaggtaagatgcattttttttttgttagttgggggccagtctctacggggagactttgccctgatactctagatcgtaattttcgattgtttaatccccgaagcttagagataattgtactcgtgtttgtatttgaatgcggtttatatttatgactatatttatatatcgatgtatacatgtatatctaaaaacttaaacgactgattatatattttcccctgattagttgtatacttaactccttttttgtaatacctatgcattaactatgctaagaccactttggcactttggcgaccgttgaaatgaaaacggagtggataactttctgcgttttccccaaatcgcaagctaatttcaacttcaaagactcaaagcacaagttcatctagttaagtaaatgtatttgtaattgttgaattgatgattaaaggatagttctccactaattgaggaggcacgtttgatgtggaggaactatggagatgaaaaaggtggagcttagggatcttcgctcgttgctagttgaaattcgtgcaacaagcgcaaagtattaaaatattgataaatacaatttaaatgtgtaaatgtaattgatcgagcatccgaatatgaatcaataaaagaacatgaaatcaatggaatcccattatcggcattttttttgtaataccgtactctaattaagattacttactttcttgcaggctctcggtatttatggctacttttatttaataatttctttattattatatttattaaatattgaaaaaaaattctttcagcagacgcttacttttatatgctggagtatccctgaattgacattcttactaaatattatatttaatcgttctttcatttgtttttaatatttgttttaagatctctagggcacccctttagtgacaagtcagtcgtggattggctttataccagaaaggctgttgctgcaccatccaattgaactagacaggactgtctgaagttatatcctgtctttctgtctgggccttgatggcaatgccttccagactgtgactctggctctggccctgatcctgttcctgcccctgcccctgttcctcatcctcgtcctcttcctctccctcgttatctgtctcgccatcaacttccgcttccaattcctgtccctcgatgtgacgagccgccggctgggacacgaacgatgtggaggaagtggacagctgcgaaggcaatgtggccgctgtcgaggatgagacgaaactgggcatactgaccgggcacatgcagggaacaaattgaatgcgactgttactggagaccccttgctccgatactacggtctgctgctgcggctgatagttgaagtaatccggatatggatactgaggcctggcgttatagaggttgtttacccggcgattgtacgcgggatattcaccaaagcgcagcaagctagaagtgggtccttcggagaaactactactggtggactggggcggaggtggtactggtggtggggttgtactggtggtagtagtactaggtcttgttgttggtgccggagtggtggttgtggtggtggtagttgttgtcgttggcgcgggagtggtgctggttgtccgagagctactcggcgcgttgctcaagtccgtcggagcagtaacttcttgcctggaaacggagtcatgtcgtctgccagcagcgtaactggtcatcccatatggatcgtactgagcaccaggcagcataggcgtctgagcagctccaaatccaaaaaacccaggagctaatggctgataagtgtatgtgcggaaataggtgagcggaatttgctggaggatttggccgccactcggctccctggtttccctatggatacgatgaaggtgagacttaattgagcagttatacagcttaatttacttacgttgttgtctttggccaccagaaagcgttggacagtcgggaacctgtcaggataagagtaatctagcgggaaaaggagaatgggtgagtttttcaattccttaacaaatgccattggctaggtattacaattaaaaaacaatattcgttcaaaagtcgaaattagatttactcaaattgtttagattcatatgtacatatattgtactagcttcgtccatacaattattttttcaaaattgaccatgagcaaattttttaaaattttttttattgcatttatcaccgataacattcacttgtatcacaaaaaaaaaaaaaaaattttaaaccaaaaaattttctttatatgtaggcaagtaaatccttttttcacataccacaaaacttagcctcatatctatgtccaaaatacgattttctgagggaatttccctttatccttgggaagcaatgaacaaatttatgaagaattgagcaaacttatataaaccactcgcgtgcgcagtcgcctttgttctaagcccaaaaagagtgacggtccgagcttttatagcccaaaacagattggggaatcgcttgggatcgattgtgtggcccatggcaatgctggtcagaacagaaacgccgacatcgagcaggtttttccccagccaagaaaacggtggaatggggagctctaagttcggagtgggatatatagttccccttgtagaacaacgagaaaattaattgcagtctgcaaagcgaaaactaagctgggaaatctataataataatgacggggcgaacaaccgggagaggcacatcattgataaagtg

SEQ ID NO: 31007 - DNA, 768 bp, DROSOPHILA
atgctgcctggtgctcagtacgatccatatgggatgaccagttacgctgctggcagacgacatgactccgtttccaggcaagaagttactgctccgacggacttgagcaacgcgccgagtagctctcggacaaccagcaccactcccgcgccaacgacaacaactaccaccaccacaaccaccactccggcaccaacaacaagacctagtactactaccaccagtacaaccccaccaccagtaccacctccgccccagtccaccagtagtagtttctccgaaggacccacttctagcttgctgcgctttggtgaatatcccgcgtacaatcgccgggtaaacaacctctataacgccaggcctcagtatccatatccggattacttcaactatcagccgcagcagcagaccgtagtatcggagcaaggggtctccagtaacagtcgcattcaatttgttccctgcatgtgcccggtcagtatgcccagtttcgtctcatcctcgacagcggccacattgccttcgcagctgtccacttcctccacatcgttcgtgtcccagccggcggctcgtcacatcgagggacaggaattggaagcggaagttgatggcgagacagataacgagggagaggaagaggacgaggatgaggaacaggggcaggggcaggaacaggatcagggccagagccagagtcacagtctggaaggcattgccatcaaggcccagacagaaagacaggatataacttcagacagtcctgtctag

SEQ ID NO: 31008 - protein, 255 aa, DROSOPHILA
MLPGAQYDPYGMTSYAAGRRHDSVSRQEVTAPTDLSNAPSSSRTTSTTPAPTTTTTTTTTTTPAPTTRPSTTTTSTTPPPVPPPPQSTSSSFSEGPTSSLLRFGEYPAYNRRVNNLYNARPQYPYPDYFNYQPQQQTVVSEQGVSSNSRIQFVPCMCPVSMPSFVSSSTAATLPSQLSTSSTSFVSQPAARHIEGQELEAEVDGETDNEGEEEDEDEEQGQGQEQDQGQSQSHSLEGIAIKAQTERQDITSDSPV

SEQ ID NO: 31009 - DNA, 5138 bp, DROSOPHILA
aactcgctggccacgacgatgtagtggaaacaatagaagcaatctgtgtaaacattgattctattcccagccgatcctatctgaagatcgaaactcgacatacctcgatagataaacgtcgcgattacctgtgcattcactacaaggcttgataacttgataattgggcctgtttccctatgtgtacaccgttcatgaggaacttaagccgtgttgaagttgttggctctcatttggtaccgccccctcggtacagactagagagtgtttgaaaagcaaaagttttttatatacagacatggttacgacttgagtgctcggtcctttgacgcaacagacgtagggagttttgcgatcgcattgagcggaaccgaaccacttgcagtcctcgaattgtgtcaaaactcaagtagcaacaaagtgtttacttggcttttcatgccatatctgctgctgttccagagccagtgccagagccagagcgggaagggtagtggggtcggaaagagagggcgcgatggcggcacgccaccaaagtcagcgattgcgatagaaatactgatgagatagtccgtccggccattcgaaaatttgctgctgcgcaaaaaattgcatcaaacacaatcccaattcttgcattgctctgaaaaaacgatccaaagcacagatgtcccgtatttcgcatctagatgtgtcgttagatatccggataccggcaaaggctccaacgcaaatctgtcggatctgtgtagtaagctgctcaggagtagtgtgcgttgggcgagctgtcttttactacaacattttacttctctgcgaggaacttaccctgtgattcctcactttttatcgaatacaaggaagccttttagtttaaaagtaacggacattcatgtgattggcgcctttatcgatgcacttagtgccgcctggtcacacttgtcgcagtgacatttcgggtaatcgttatcgcttgaagtaaacattcgatagagtagaaatggatctgcgccgtgagcttctggaggcggagtctagaacggatcaggaagaagcggatcgcgactcgcacttacagctcgtccgagaagtggaccacaatgttggcgtgcccgtgggcgtggcggcatatcgtctgcagcaactaatcgcgggtgtacgagcgagaggccaccacgacttgttgcgtctttggcagctgtggctcaacgagctaatcttggccaagaaaataattctggtaaggtcgcacctactcatagaggagctattggcaggaacagagttgaagccgtccgtcgaaactgtcaacttgatgttgactgtgcttaaatccaccccgaaggagaacctggctgggttttggccccgattgagcgcattaactcatgccaaagatatggacgtcgctctgttgctgctgcaatgccaagatcgtgtgctggccgagctggaggaatcgccggaggtggccgagcacaaccagggactggttaactccctcatcaacatgcactttgagggacgctggctggtcgccaaggagcagttgcccctgctgctggcgcagagcctgcaactgattcagaagctggtgaccaggcagcccgactacgccgcgcaaagagtccccgaactgatggggctagtccaatgctatctgcagtatggagctgaaggagaaacccacctaaagccccggaagttgccgcccgcacaacagtcggctgcctatgggcaggagaaggaagaggaagaccagctgctggcccagatgtcccgcccttgtggtcgcaagaacaaagtgcgcaagatgcgttcgcttgccaaacagcgcaaccaggcggtcaatgaacaccatgagccgaatccgcgagagcgtctggtactgatgggtaaccaggactacggctgcttaactggagactcgggcgagaacgggctgccctctgattcggatcagcagcagacagaaaacaagcaccatcggcaccaagaggccaaggtgaggatctccgcattacatttgctcagcaccctgaccaaccaactgccgcgccgctcgttttatggctactggcacgtcctgttccctgacggagacgcgggtggtactccccacctactgctccttggtctgaaagacacaaatttccgttgtcgagctctggccctgcaggtgggagcgcagctgttgtacggttcaaaggcattcctcagccaggcatgctcgctcggacccagcaactttacgccatttgccgtcagcctggccagctctgtattgaccgcttatcgcatcttgatcgctatcctcgagagagagtatacaccgcctgtgctgacccagtgcctcaagtgcttagccgttttggtgcaagccacgccctttcatcagctggaaatgggatttgtctacgagtttgtgggccacgtgaaaaaactgataaagagtagtgaccctccggtcgccgtgtccgccttactggtcatggaaatgctggtgggcacatccaagcttacaccggagattgccagctccataggactggctccaagtcagagaaaccttcaaatggaacacgcgagtacggcggaaacataccaggagttgtgcgactcggatgcggagatggaactcgaggagggggatgagcagcagcagccatcgcagaacaatgtggtgaatcccgtccacacagtgtccccaaccattccgcgcaattcatggctgctaaggcaggtcctccgctgtctggagggcatgagaattccatccgccgtgcgcttggagtgtttccaggtgcttcaggccatggccacacacataggcctgctgcgaggacatcaggtgcgtttgtcaagggtgatatccgctgggctgactgatcccgctacagatgtaaagctgtacgccgcacgctgcttggattcagttggctaccagttgggcagactgttaccggaaccggcagaacgggagctgcagatgtcgttttggcttaccctgctgccggccacctatgaagcctacgattccgccgggttctccttgaagtgcgcgctctgcgacgccctgtccaacatgggtgctattagctttgagagactaccggatggccagaggaccgccctgttggccttcctaagcggttgcgccagcgacgatcatgaggaaacactggtcagggtagccgctttgcgggctatggccgtctacgtgctgcatccctcgctaaggacggatcttggatttgtggagaatgcagcggagctgacattgcgtatcttaggtgattcccagctcttggctagaatcaaggccgcatgggccctggggaacatcagtgacgcactggtggccggtattcccaaccagaccgaacgaatttccgccgaacttttagaacgcctcatccaggcagccaccaagagctgtgccgataacgacaaggtcagggccaacgcggtgcgtgccctgggaaatctcttgcagatcttgcaggtccagcccttaggaaacggtgaactgatgcaagtggccatgtctaagctgctagactgtgtaacattgccaggcaacgctaaggtgaagtggaatgcatgctatgtcatcggaaacctagtgaagcacagggctttctttgccaacaaccgcctggctggtatcttatttcccaccctgtgtcagttggtggtgcagcacgctaacttcaaggtacgcaccaatgcagccggagttctgctgcaggtcaagcagcgtgaggacttcagtgcccactttcctctgctatggcgttcgctcctggacgctctggtgcgctctaatgtattggaaagctttgaagagtacaaccaccgggatgcacttcagcaacagttgtgcctagccattgcccacctactgttgctggccaggagctcggatctgccgatgatgcgagagtccctagaggaggatcgcctagaggaggtgcaggccacgtggcggcgcgtcgcattccgcattgttcctgagcagtcggatccgctcttcacctgcagtcctctgctgcagcagcgtctccaaggggatgtcaacaatctgcagcgctgcgccttggcgttcatcactagcacactccgcctggacccatagaagcctcctgctttaatctacctaacaaaacaaaaataaattaattttaaatgttaactcctctagcgcaacaacattattgcatcatttctcgatcttagaaacccggcgagcagaaatatgaccacgtgcaaaacagtcagctgatcagtctaataagcgctttcatagtgatgcccgcgtgcctcttaatttcggcatccacccatgtaacaagggactttcgtgcctatcttgctcattcgtgacacgaacatcaagaacaactcggctgctcatcactggtgtgcgctctgttccgaattaacggttgtgctgctttcctattggtcaattggtaactggaaagatcgaaagggctgccagctgcagcttgctagggattctgttggcctagtgtctgggacccgacagttgtctgcgaaaaatgttgccccgtcgtaaattttgtcaaaaatttgtgaattctcagtggctgaacaccaggcaaacaaaaattgccacatagggcagacatcataaagtaactaacggtttctccccatctttggcttcctattggtcgaatgggctgactggaaaagcgtaaggcgcagccatcttgaaaaggatcagctgttttagttaatttgagcggccagctagcacctgttactgtttctgttcgcctggtgcctgaaacttgtaaaggtggcaatttcgaccagagaaattacgattttaaacatcccatcctttgtacgacgacgtagatcgactacgaaaatgtttaaataaatacaattaacatcaatttgtaaaaagtatatttgtatataagcttttatatataatgtggattgcattaatttgatttgtttttttgttagtgatttttaaatcgcggggagtcgcgaccgatggatgtgtgtgtgtgtggtgatcaagtatttagtacaactatttcaaagtattgggttagcatatgaattatatggttggctggcgttgagcaaaatta

SEQ ID NO: 31010 - DNA, 3138 bp, DROSOPHILA
atggatctgcgccgtgagcttctggaggcggagtctagaacggatcaggaagaagcggatcgcgactcgcacttacagctcgtccgagaagtggaccacaatgttggcgtgcccgtgggcgtggcggcatatcgtctgcagcaactaatcgcgggtgtacgagcgagaggccaccacgacttgttgcgtctttggcagctgtggctcaacgagctaatcttggccaagaaaataattctggtaaggtcgcacctactcatagaggagctattggcaggaacagagttgaagccgtccgtcgaaactgtcaacttgatgttgactgtgcttaaatccaccccgaaggagaacctggctgggttttggccccgattgagcgcattaactcatgccaaagatatggacgtcgctctgttgctgctgcaatgccaagatcgtgtgctggccgagctggaggaatcgccggaggtggccgagcacaaccagggactggttaactccctcatcaacatgcactttgagggacgctggctggtcgccaaggagcagttgcccctgctgctggcgcagagcctgcaactgattcagaagctggtgaccaggcagcccgactacgccgcgcaaagagtccccgaactgatggggctagtccaatgctatctgcagtatggagctgaaggagaaacccacctaaagccccggaagttgccgcccgcacaacagtcggctgcctatgggcaggagaaggaagaggaagaccagctgctggcccagatgtcccgcccttgtggtcgcaagaacaaagtgcgcaagatgcgttcgcttgccaaacagcgcaaccaggcggtcaatgaacaccatgagccgaatccgcgagagcgtctggtactgatgggtaaccaggactacggctgcttaactggagactcgggcgagaacgggctgccctctgattcggatcagcagcagacagaaaacaagcaccatcggcaccaagaggccaaggtgaggatctccgcattacatttgctcagcaccctgaccaaccaactgccgcgccgctcgttttatggctactggcacgtcctgttccctgacggagacgcgggtggtactccccacctactgctccttggtctgaaagacacaaatttccgttgtcgagctctggccctgcaggtgggagcgcagctgttgtacggttcaaaggcattcctcagccaggcatgctcgctcggacccagcaactttacgccatttgccgtcagcctggccagctctgtattgaccgcttatcgcatcttgatcgctatcctcgagagagagtatacaccgcctgtgctgacccagtgcctcaagtgcttagccgttttggtgcaagccacgccctttcatcagctggaaatgggatttgtctacgagtttgtgggccacgtgaaaaaactgataaagagtagtgaccctccggtcgccgtgtccgccttactggtcatggaaatgctggtgggcacatccaagcttacaccggagattgccagctccataggactggctccaagtcagagaaaccttcaaatggaacacgcgagtacggcggaaacataccaggagttgtgcgactcggatgcggagatggaactcgaggagggggatgagcagcagcagccatcgcagaacaatgtggtgaatcccgtccacacagtgtccccaaccattccgcgcaattcatggctgctaaggcaggtcctccgctgtctggagggcatgagaattccatccgccgtgcgcttggagtgtttccaggtgcttcaggccatggccacacacataggcctgctgcgaggacatcaggtgcgtttgtcaagggtgatatccgctgggctgactgatcccgctacagatgtaaagctgtacgccgcacgctgcttggattcagttggctaccagttgggcagactgttaccggaaccggcagaacgggagctgcagatgtcgttttggcttaccctgctgccggccacctatgaagcctacgattccgccgggttctccttgaagtgcgcgctctgcgacgccctgtccaacatgggtgctattagctttgagagactaccggatggccagaggaccgccctgttggccttcctaagcggttgcgccagcgacgatcatgaggaaacactggtcagggtagccgctttgcgggctatggccgtctacgtgctgcatccctcgctaaggacggatcttggatttgtggagaatgcagcggagctgacattgcgtatcttaggtgattcccagctcttggctagaatcaaggccgcatgggccctggggaacatcagtgacgcactggtggccggtattcccaaccagaccgaacgaatttccgccgaacttttagaacgcctcatccaggcagccaccaagagctgtgccgataacgacaaggtcagggccaacgcggtgcgtgccctgggaaatctcttgcagatcttgcaggtccagcccttaggaaacggtgaactgatgcaagtggccatgtctaagctgctagactgtgtaacattgccaggcaacgctaaggtgaagtggaatgcatgctatgtcatcggaaacctagtgaagcacagggctttctttgccaacaaccgcctggctggtatcttatttcccaccctgtgtcagttggtggtgcagcacgctaacttcaaggtacgcaccaatgcagccggagttctgctgcaggtcaagcagcgtgaggacttcagtgcccactttcctctgctatggcgttcgctcctggacgctctggtgcgctctaatgtattggaaagctttgaagagtacaaccaccgggatgcacttcagcaacagttgtgcctagccattgcccacctactgttgctggccaggagctcggatctgccgatgatgcgagagtccctagaggaggatcgcctagaggaggtgcaggccacgtggcggcgcgtcgcattccgcattgttcctgagcagtcggatccgctcttcacctgcagtcctctgctgcagcagcgtctccaaggggatgtcaacaatctgcagcgctgcgccttggcgttcatcactagcacactccgcctggacccatag

SEQ ID NO: 31011 - protein, 1045 aa, DROSOPHILA
MDLRRELLEAESRTDQEEADRDSHLQLVREVDHNVGVPVGVAAYRLQQLIAGVRARGHHDLLRLWQLWLNELILAKKIILVRSHLLIEELLAGTELKPSVETVNLMLTVLKSTPKENLAGFWPRLSALTHAKDMDVALLLLQCQDRVLAELEESPEVAEHNQGLVNSLINMHFEGRWLVAKEQLPLLLAQSLQLIQKLVTRQPDYAAQRVPELMGLVQCYLQYGAEGETHLKPRKLPPAQQSAAYGQEKEEEDQLLAQMSRPCGRKNKVRKMRSLAKQRNQAVNEHHEPNPRERLVLMGNQDYGCLTGDSGENGLPSDSDQQQTENKHHRHQEAKVRISALHLLSTLTNQLPRRSFYGYWHVLFPDGDAGGTPHLLLLGLKDTNFRCRALALQVGAQLLYGSKAFLSQACSLGPSNFTPFAVSLASSVLTAYRILIAILEREYTPPVLTQCLKCLAVLVQATPFHQLEMGFVYEFVGHVKKLIKSSDPPVAVSALLVMEMLVGTSKLTPEIASSIGLAPSQRNLQMEHASTAETYQELCDSDAEMELEEGDEQQQPSQNNVVNPVHTVSPTIPRNSWLLRQVLRCLEGMRIPSAVRLECFQVLQAMATHIGLLRGHQVRLSRVISAGLTDPATDVKLYAARCLDSVGYQLGRLLPEPAERELQMSFWLTLLPATYEAYDSAGFSLKCALCDALSNMGAISFERLPDGQRTALLAFLSGCASDDHEETLVRVAALRAMAVYVLHPSLRTDLGFVENAAELTLRILGDSQLLARIKAAWALGNISDALVAGIPNQTERISAELLERLIQAATKSCADNDKVRANAVRALGNLLQILQVQPLGNGELMQVAMSKLLDCVTLPGNAKVKWNACYVIGNLVKHRAFFANNRLAGILFPTLCQLVVQHANFKVRTNAAGVLLQVKQREDFSAHFPLLWRSLLDALVRSNVLESFEEYNHRDALQQQLCLAIAHLLLLARSSDLPMMRESLEEDRLEEVQATWRRVAFRIVPEQSDPLFTCSPLLQQRLQGDVNNLQRCALAFITSTLRLDP

SEQ ID NO: 31012 - DNA, 15275 bp, DROSOPHILA
tagctgcgatgacaattgagagatctgaaggtctgcgataggggatcggtgatcagggagggggatcggaccggcactgaatgctaagtggttgtagcgatagttttcttgtgtgtgctttactctggaatattagctctagactcggaagagcaccatctcaacgtgcaaaagcttgtctctggcatcgcaaattttagcaaaggatatcgatatcactcattagtggttcccatgacgtcccacttaagtacacacattaaccgtgttttgatcattataatgcaaaagcggtttgttcaaatttgaagaagtaaaaccgaacaggtggttacctatccgatctaatgccacagatagggccctagctccacaagatcaaggatccgcagcgaacaacaatatttgcaaaacccgttccgatctgcgattttctaagcggcacccgggaaaaagccacaaaagagggccgaaaggcgcggcactctggaggggcaaaaatcttatctggctgccggaaatcaaagcacacatcaaagagccccgacgccgccgtttgcaacgtgtggaggtcccggtgttcaattgcatccaccgtcccctcgcaccccccgtcatcactcttatcctgcctgacccgccttctgcaggcagccctctacccctccgccaacagccacactcccgcagtcattcagttttgtttgttgctgatgcggttggtcgacgtaccgatccagtttcctcgccttacactcgaaaaaatagccatggctaagttaggcctgaaagtgtcgaagtaggcaggtaacacttcgaaatgcgcaaatatcatgcgaacaacttgcaaaattaaatctctcaaattaaaaagatctaattgtaattgtgtttctgcccgcccatatattcatatcgatacctggctgctctatcgataaactgccgctccacctatcggccacctcatagcgtagcattcgttgagtgtcggtggttcagtttgttggaaacagtgaagagtagtggtcgcgtttcgcagttcttggagtggagactttccaaaccggagaaatacgtaaaccactgagagtcgcacagtaatataaacacaaacattttttttacgtgccgcgagtgacgtttgaacagaaaccctggagtggcaaacatgacctcctgaaacccactaagcatcgcaatgtatgccgcctcgatcctgatcctgcacctgacttgggccgtggccacgatcgcggccaacggtgccggccataatggcccggtggcatccggagcagggcctaacggattgcagtgccagcccatcgccgtgtccgcctgccaaggcctcggctacaacatgaccgcactgcccaacctggcaggtcacaccaatcagctggaggctgagctccaggtaagcggagccacagccgtgagccagaaggcaggcacgtcccggaccctcgcgatcccacgttcttgataggccgactgtggtgtggctcctcgaagtgtttccgtcgcttacgtgcgaaaacaaaagcttaaacagcggctaaaaataaaataagcaatggccaatatgccctatgccaggcaggtaaattgttagcaagcttcagtctcaaaacatcaggcagaaagcaatgaaagtccttctagatcccacactttgagaatcacttaaagcatttcaaccgaactgctgatgaaccccaacggaacacattctatattagcatacatagttagcataattagttatactaaggtcaatggttgtgtagtataccctgaaaaagtaaggccagcaatcgcagcaaatgatacaatgttgtttaagagtccaaactctttccaaacattcggaattgtgagtgacgggcttgtggagggcggcagcgcatcaaagagggaccgacagacagcccacactcccactgttttttggcttttcagttttacttgttttactatcgcagcagagatgttggaaatacgcactgccgtggaggtagagtaaataataaacaaaaatgttgaaagacacaccaatatggaagatagaagtcattttgcgggatttttgtatattttaatatatagttcgcattcataagccacagatccgaaacgcccatagaaaccgtagtgtcccgtcatcgtacgccccccgctgctctgatcgtattttttgtatctgtatctttcggggtttcatttccattagcaacgctctgaggaacaagacaaagcggcaaaaacaaggagaaggttcttcgactcgaaagttttttggatacttgtgaaaaagagaccccaaacagacgcaaacgagctattatcactaaaacaagtcaaagggcaacacctaattgacgttcaataatgtcgtctttgagtaaatggggcaataaaccatcagcagtgatcttttgggaaaagcgtttgtaattctgaaataattcactgctactgcatgtccaagtcaactgcgacttaagaatttgaggtcatctcgctctcgcttcgtaattaaccatgaaaatggcccatgaaaatcgccgctttgcagagtgcgtggaatgagcggcggaggaaaagcaggcagaatgggcaggccatttggtggtaagaacaggcacaaaagacgctagtggcttggggagacctgagcgattgtgcagacattacaaatggacacgaaaaaagggctgccgattagggaaactgtgcggcacgccaacactaaaagaaatgattatcgaatatatttcaatcactattgtttcgacagttcggcactcgctttaaaaccaactctcagtggactaaacctattcaccaatcattaacagatcacatacatcacactagttgaacaatgttagtactgatctgcgggtactatccctttttttttcgtcgtgtacacgcattatcatcggttcggcttcggttttttttttgagcttagcttggagagcgtctgtacacatatgtatacatacatatgtgcgcagtcagatccattaacacctttattccggacttcggtttcctttgagcgtatctagctagcattttatgcacatgcccttttttggacgaagaaagtcaaatgtcgatgtcggtgacgtagtgctatcacttttgctgttgctccgatgtcgatgcaaagtgcaggaagcagaccaatcgcgatccgtttgggggcctgagtggctatacttcagttcaattcaactgtttttaactgtgggtcagtgcgagatgcttctccaggctatagaagctgcttgctaaccattcgctatccactgatttctatctggctgcagctcggaaatatctttgttcttttttttttttttgtatttttaagggactcagtggtgcgcgttgccgcctactttgtttcatcgtggcgctgaaaagaggaaagtaaaaggcatagtctgaccagggagtgggcttccatagttttcatgcttttcatatttttctcggttttctttggtttcttctttgttgttcagacgagatagggcagtaaacgaatcgcggccaaaactcaaggggcaattaagcatccatcctgactctgaagaaattacaaacacaccgaatgatttgaatgggaaccatgttaaactgatcaaagcatctggaagccatataaaacacagaaatcaaagagatttctacggccgccccaccaagcgtcaataaaaagcatcaaaagctgcagagggtttgtacatagaggggcgtatttacacaaatgctcggactcaataacaaagatcgcattgaacgaaatgagaggcaaaggcgaaacgaatttgaatatggaagtttacatatgcgtagatccctagagccctgttcaatgtttcgacttggtgaggtgttaaggaatgctgaagtgggactgcaatacatacataaatatggttcttatcagtcggcgattgtaaaaacatacataggcaccgtaaaacggcggcatgccacgtgaaatgaaatccgaataatggtattttgggtgcaaataaaactagtcaaatggagaacagaccgagaaggtcggttgtagttccaatttttccgtccgtgtccaagatcgagagtgtatttctcctttgtcagtttgtcagtatatcttttgttcgttgggcggtgtgtttgcttgtttgtttgtctgtctgtgtgcctgttaggcgagtgggcgtcgcaatcaagtgccaacaaagtgcttgtcgagcgttaattacaagtgaattaattgaaggtgcgtcttcgcactgagttgattccatagataaccatcatgcgactgccagcgttgcctcaactatgaacggggaaaaaactcaccaatctcgtaggtttcataatgctaattaattaaatttccaataatataaaacaactttcatagcgttaaacacctgcgaacagtacgtcgcattctttgctactacattcataaagcccaatgaaatttgtggcgtggtaacccacatcttatcccattttttactgaacacttaacaaaacagcattttatgtaaagtaattgtaaatatttgagcaaggaattacccgacgagcgagagttctctgtggaaaaaacgaaaacaatacttcaacaaggccgaaaccaaatagatggcagctattaagcaacaacagcaacgctgacgatggcgacaataaaattgtttgattttgaaaatcaaaacccattaagaatgctcagccaccaattctaggtgaaacggggtttgaaaagggacttttgatatcaagaacagtgcggtgcccacagaaatgccgtaaaccttactttttatgacaattgcctatggcttatcgctcgctaaaggcccgtatcagccgcatatatttaggccgtatgacttaaacttagcagggcaaagtacacatatcaagccgataccacactatcaatatctaaccgatattaatttgattaaagaaattaagtaaaaaggccatttcgtaaacatccatcccaccccaagaacttacctaccggcaaatgtgacctcaagcttagttcatagagcttcctacgtttctcccatcgccttgccagttaaatgggccgctgtgactgtttgaaaatccgaaaaggcattatgtcgcggcttacgtgtcatctagcgtttatctagcaactgtcataatagctagcattataaattcccgtttcttctctgttcttccgataaataaaaaccacaactaatgtgtttgcatttgtctggctatcagctttttctatcggctggaaaaatcataaaaatgtgctcgaagaaaatatgaaatccacagagttaatccgccggacgtttctgataagaaaagcaccctagcaaacgttcttatcggaacacagtctgcaaacgccaagcgccaggttgttgttgttgctatttcagctacctggcttacgtccgtcccctagagcgagatagcactgcagtgggagcgggacggtgtatcgctctgttttgtctgcattgtaattatggcaaggggtgcagaggcgtgaggaatcatcatcagggcggtattgaaaacgacttaacgctgatagtgtcaaacaaagtgcagaaagctgctgccattacttttgttgttcctgctcagcgatcagtgactttgaattccggcgagaatatggcgagaatgcacacaacactaaaccaaaggcttgcgcgatattcaagacatataaacatgaagaatacttgaaaattgatggatgatgaaaacatatatccaaatagttttttaagtaattgttattcatgcgaacggatcaattcgctggaacttgggacctgtccttattctattcccataatgatgagtagggcagttgcaatgttggcaaaaaccgttggcaaaaaatcagacgctccccagataaacacacagaaaatacatacaacataaaaaccaaaaacaattagttcattcctttgcagcagaggcggcttatgtgttattttttattttctgctgcttcggctgctggcacacgcaaaaaatgcggcaacgttttccaaatgccttcaaatgccactcagcgaatgagaagcgtaagtgggaaacaggaggaggaggagtgagttgctggcgaagaacaaaagaagaagaagaagaagcaggctagccaactggaatgtcagagtcactggggaagtggaagattagtggagaatatgctaactatcaaatacacactatcttcctgaatataaaaaaaaactaaactttagtttagtattaaactttagttaaatattcacttaatttgatacaaactaatatttgagccatgaaagtcgaaagggtatcagaaaggtgctaacgaaaaaagcgtccagcaagcgacgagcctcaaaagcaggtttgtgtcctaagtcttttgtttcggctttatgcagcgcagcaggatgttggagatgactttgggatgtggttatttctggcgtggtattacgcacttttgctgttcttgttgttcctcgtaattacatggcaattaacataattgaactgcgcgcctgcgcacgtgtgaattgacccgtatactcttccccctcgccgtccaactctgtgatctctttcttcgaatctaaataattaaaaagagagggaatgaagtaaaaacagacggcacgttgcatgtagagtcggcaaagtgcagcttatttcggtaatgcctcctgacaaaatgtcagatcagcagacggcagcgtatacattaccttccgcaaagccaatacaattccacggcctgtcaggtctccctgttcccgatcgccaaactctaaatccctccagagaccgtcgaagtatctttagacgaggacaggactggtcaaacatgtgccaattgtattgccaacgtagctgcagaacctcaccgagccccagagatctgggccagctgtagtgcatttgggcctttagaagcccccggcccgcagatcgctgctgcagataatctagcttggcaacggatcgaaacagccgtagtcagcgacttaaaagcattatgtacagagaatacagcacggagaaaatttagtatagtagtcttaccccctcaaaatatgtttggtaactgataaaaagtattcggaatagtatctcaaaatatgttacggcaaatgaaatatattatgcatctaaatgaatctgttaaatttttcggacaactcgcatttcaaaccaaacaaacaattccttagctaaaaaaaaagtagttattggtgtgcttttcggtgttcggcggatgccttcccatcctcaggcaattggcgaggagctcctttggtgcattccgctcgacgaagtctgcctttgaatgacaatccacggcagtcaaaatgtcaattaattgtgagacgacagccgtacgtcgtcggcatctcttgacagttttggcagcgatcacgttgcgcggggaatgaaaaagtcggctaacacggctagctacaataactcgaatcgatacgtatctttggagtaaggactatctaagctagggctaatgaagaatgacagatccaaagtatgcctatctgcatattccggtgccaatggctcagaggaacatcaatacttcgggttgttttagggatctttgcatcgttggcaaatgaacaccgcaaataaagtcagcgatcttagcgaagtactactttatacaattcacagtcccctgccaacttttctgcgttttttgaacgcccagtcatgaatttaagttgctagctgtggtcaccgttcgctaattgcaaacgctttcgtagcgaattaaatctgtcgactttgaagttgtgccgccagtgagtctgtctgacagtcacctctgaacgccccagcaacctcaggcatctggcaaacagcagtcaattcgcatcaaaccgctcaagtccgccagagagcagccaaacggcagctaaatagaataaagtccaaaccaaataagccatcaaatgtaaaagagggaatcttaagaagataaccgagctcttagaacacctatttacgtattaaactacattcagtcgaaagatccgaccccatttaattcagcgacttatctctaagatgtggtatattcgcagcgaatgaactgaccaaacttgagtttgagacggcaagtggtgcgtcaagaggagatctcactgtctgttcaactatccacgagtctttgtcgtgtgtgcggccttttcagcggcatttcgcaacacttgtcccactgacagccggcaaattgtttgaggcctccagtccgcttgcaagttgaaacccaaaactagatgcatctggcagatacagatatcgcacttatccgggaggggagttccccaagtggcggcgtcattaaaaggggttggttggctgaaggggcgggggctacagatggaatgaaagaaatccgaatcttttcagctctctatttctatacccgttactcgtagagtaaaagggtatttaagatgcgttgaaaagtatgtaacagtccgtccgtatgaacgtcgagatcgcgggaactataaaagcttcaatattgagattaagcattcatcttagcatacatatgtcacatttgaaacaatcattcggaaaagctagagaaaaaggaacactttgaaataggaaaattttagacaatcattcaactgagtaaaaataaaataaaataaataaatgtctggaagcgatatcgcgggaattaaacttaccagtggaccgacgagtctgaggagcaggatccttgtgagaaacctaccgccttgcacccgtgaggagctgtctttcctctgctatcccttcggcacaatccttggctcgctggtgattgataaccacgggtttatccagtttgctacggagagagaggccacacgcgccattgaggcgctcaaccattctaccttcaaatcgaaggatatacttgtctcgaacgccagcttccgttccctcaaagccaattgctgtgtctatgctcccccgaaaaaaaagaggatgatcgcgtggtctgatgcggatgacgtttccatcgtggagcggaacgaagatgaggacgatgatgactacaaaagcgatgacgaaaaaggccaggtgacaagcacgaattgtgcacacacaaaagaaagagatatacgaacttcaaaaacgcgaagtaaaataagaatagtccgaagaggcaaatctctagaaaaataacacacaaacatcaactcttgtagaaaagaccacaccaactctctacaagagcacaaaagcggtctgcaagaagaacagtttaagtctttacaagaagaaagcaccagcaccaatatcctgcacgaacacaccaacataattcatctcctataatcgaccgaaatttgctctgaaataaaatggaagcattcatctttcgttttattgtttgtctagccaatttctattggtatacaaaaaacacttttgccacgcctctctttacacccacaaaatgctcacacttttgaacaacttttaaatgtttccgcaaatctatcgatatcccttaaaaattatgaattgcattctctcttgtttctaattgtttatatgatatataaattctagtaatacagacttaatgccgataagtccctacaaaaaagcacgtattcaagtcaaagtgcctctgagccattttggtcggcttttattttttgcgacgcaatcattaatcaaaatcgaacaatcattacgtttgcgtttaggttgtgaggtgtcaacttgaccattgttgttgctgttctgtgccttgtaattgaattttgaaaagaggcggtatcagggggtatcgaattgtttttgggactgacagacttcactgaaaaagtgtgaagcacgctgcgaacgaagccaaaagagataaaaagaagaaatcaaaatgaaaggaaatagccgcgagtcgaaaggcaataagaaactgaagggggagcgaaagaaacccccaaattgtaagtttttaagtgaattaacaaaattatatctgtggatcctatacagccgacaaaactcacattattcaaagtctctcctaagcccaagtttgtaatttgtaattttcgtcgggtggacgagaaccgcatcgaatcgctaacatttcgatgacttttgcgtcgccgaaaagaaaaaaagaataccgaacagctccgaaaaagagggaaaaatgcccaaagcgttgcagattgcattcgcttcgcagactggagagtcggaggagatatggggatcatcatgaccgaggggggtgaagaggcgggcagtgccctttcgcattaataatacattttagacacttggccagcttttaggcacattggttgggaagactatgttttgggaacgtggggtaaaaactatttgctcattgtgtccaatttatactaaccagtatacatatttgcactttcctacgtaataatgcatgaattggataatcttcaaattttttttacattcataagaacagacgtcagtttatatgtaattccagtttagttaaaacttgtcttacccatatcttgcactaattccgaattcgagaccactgttcgttcctcacctgtcttgccgccattacatggtctgcgcgtctctctccctccgagtcctgctctctcactcccactcgtgtagcagagcaggtctattaggctgattgccgcttcgttttttgttggtttcgactggctttcgggcaagagaatgattatggccaaggcgatgatgtggttcactagccggctgcatcattaaattattattgcgggcatgtattttccagagagctgcaaaagcctaaaaaattgtaaatcgcgtgtctaatgctccattcgagatgcccgccggttcttgaacgccggtttgtttctttctgtccatctttccatccttccttcctacctcttttatttatttttttttttttggcctaatgtggcttaattatacaacaacaatatggttactgttttgcagcaaacaaagagctcggcgaacggccatcaaatccttgtcaagagtcccagtccccccatgatcggtggtcggtgatcggtgctcggttcaccggctatcaaaaggagatggatatgcgacctgagtttctttcttgagaaaacgcagctcgataatttaatgcaccttttcctctccagatttcctgagttctttcttttccgtctgccacctttgtcttggggacctggttcttgttttttcctgccgcgctgccttgtctaaaattccacaaattcataaatgttgatctggttcgtcatcgtcatcaaagtcggcatttctcgctgatagacaatggacaaaaaaacgaaggagcgctgtgtcgagggcctcgactacctgataccggtgatcgaaaagagcgacatccgttgacatttagcatttcataaagtcgttttccatcgcacacatgcgacgcaatgatctacttaaattaaaaggaaccttttaggtacggcgtaagagttttcgcgtacacacacacatttattcacattcacattcacatttattataagacaacgtcaagaataaacacatttcagacttcttcgattagttggaggcgagtcaagtggaggaaacgtggcttcctatgaagttattagattgcatggctggcaattgacaattaattgccatcgacggctgctaatggaaatggaatgagctcgcaactcgcaactaagaaactggcggcattttcgccatgtgtgaagtctgacgcaagttttcacaccaaacaaagcaacttgtgagattagtaatgaaaaatatacaagaaaagatttaaagaacatccgcacacaaaaattacaccttaaagtttgtgtgaaaaaaacaaatcatcgactttttccaggcataaagaattcgtgaagataaaattattttttttccaaatactttgctaacataattagcaaaataattcccaccatcaacttgtttttcagatcgcaaatcagtaaatccagaatcattaccattacacaatctaatttggcaattttagctaatttaataccagacattagccggtgtaggcaaactgcaattgtgtaattttgctaatagcaaacatttgttagaacgcttgcgtgtcggcaaacatcaaaggaaggctaagtttttattgcatttttattagataaaataatagacctcaatcaacatacaagagtgtgaaccgaaatacgaattgtttagaatcgaactttgtatttaaaggagtagctaagagttcttcagaatattgtttcacttattttttcagaatcacattactcattattatatctcgttctattttttgcagattgccaaactggtgccactaatagaatccggctgctcgcgtcgcgcccgctttttgctctgctcgtctctgtttccgctgtgcacgccggatgtgccacgccccgttgccgcctgcaaattgctgtgcgagactgttaggggcgagtgtatggaaaacgctccgccggaactgatggagctgtggccttcgttccttaactgcgacggactgccgcagccggagaagcacgagttgtgcatgcagattccacaggaggtggctgtgccaggcgggagtccaagtggtccgcccaccactggttcacctggcgtcgaagatcacccgcagacgtaccgcttttggaaaagcggagcatctcccacctctgacttggctggcgtcttgtgcccgcaaaactttagcggcagtccctttaatccggaggagtgcgtgccccagtgtcagcgggacgccttccacacgagctctcagaagaagacgtctgagaccctcattctaggcctctcggccgtctgcttcgtcctgacactgttcgccttggtgaccttctgggcggagcccaccaggtttggctaccccgagagaccagtgctcttcctgtgcctgtgctacaacctcttcagcgtgtgctatctggagcgaatcgtgttccacaatcaagcaaggatgcatgacgtcgagctgcaatggcggctgatgcgaccgggttgcttgctgacgcccccttgcctggcctcctacataaccacctcctatttaagcctgtgtgcagccagctggtggctgatatttgccctgtgcttctacctgtcctcccacaaaaagtggtccagcgaggcgctggaaaagaggtccgggctgttccacgttctggcctgggtgccaccgctggcgccccccattgccgccctgctgctggagaaggtgcgtccgagtgagctgactgggatgtgctacgcaccgggatttgtggagctgccagcactggtcctgctcctgcttgggctgtacttcaccctgagagcctccaggtctctgctctccctgcagcaacagttgcagcccaccctggcccaccaccgattcgggcagatccggaagcgctttgtgctcttctccctgctgtacttcgcacccacgaccgccggcgtcgtggcggctctttgcgagcggtacgcggattcagtgcccagctgctccacacccgatgactgcctctcacccactccgctcagtgcctggccagcgttggtccggatcttcttccagctggtgggcggaacgttgacagggttgtgggtgtggtcgcgcaaaacctgcgagagctacagaaatcggctgggtgccagcggcacacccacctcatccctgatgaatcaaagcaaggcggccggggctttgcccaaaaagcatttgtatacgagtgggaaatccatgctgcccacggggggaatcactcctctatatgctggtattagttttcacaatgtgcccgtctacaaccccaaccaatcgagagtttaggggatcttttagcccacatggggggctctagaaaaatctcgaactctactattgtacatataacatatacatacatcatagaaggctttgagccgcggtgagagaacatgatcgaacatacgcctagtttttaagcccgaaaaggagaaactgaaatgtgttaatagctttatagatcgcgctcccccaagtacccatcacctccagtttttattagtagttctctagctagtcctaagcctgtaaatagtaaaacgttttattcatagtagaatgaattgtaaataaattatatgaatcaaaaatgaatgtcgttcaaagtgggctccaaatgcattaggaactcaagataagcaagataaccactgcgcgttctcacggcatctccgtcagccacaaggctcaacacttcgcaagccccatttactatatgtgggttaatgatgcaaaagttgtcgctgcaatgagctaagggatggatggtgggtaggaattccgacggatcgcttaattgcaacaaaatggctaatttagttatgctattgtctgcgctccgagccgtggcaattagaaggaaaatgcttaatgacagatctcgacgttggttgccatcggttgccgactggttatgctccgccgcacctccacctgtggctctgcgtattctttcccctgtatatgtttgtacattttgcggacactccaactctttcgtatgccattcaagtaccacctgtattcggaccaagcgaaatatggtggacctaaaattatcaaacatggtggtcatgtttataaatgagtaaattacctaaaaactaagattgttttttttacttagatgggatgtgacaccctaacacccgattctttagcacagacactttccctgctctctggatgtttgggctgcgtcagaacacgggtaattggtatcaaccgaggcacaattaatttgattgaagctgccacaccgcatgccgctccaacgaacaacgaatccatcctacaaattgccggccgtcgtggcaggcaacaagccgaaacactgcggcaacatcggcacaatagcaacagcaactgtgcagcaagcgtgcaattaactcttgtgcgccaagatcaaagcgattaatgcggccccaagttcccagacgaagggacggaggccagggcatttggagcagcgaagggcaaggaacggaaaccaagacagagacgagatgaggcgggcgtggatgggggaaaggtattccaagcctggtctggcttggtctgtatcgtcattttcattctcgtcttt

SEQ ID NO: 31013 - DNA, 2247 bp, DROSOPHILA
agtttgttggaaacagtgaagagtagtggtcgcgtttcgcagttcttggagtggagactttccaaaccggagaaatacgtaaaccactgagagtcgcacagtaatataaacacaaacattttttttacgtgccgcgagtgacgtttgaacagaaaccctggagtggcaaacatgacctcctgaaacccactaagcatcgcaatgtatgccgcctcgatcctgatcctgcacctgacttgggccgtggccacgatcgcggccaacggtgccggccataatggcccggtggcatccggagcagggcctaacggattgcagtgccagcccatcgccgtgtccgcctgccaaggcctcggctacaacatgaccgcactgcccaacctggcaggtcacaccaatcagctggaggctgagctccagattgccaaactggtgccactaatagaatccggctgctcgcgtcgcgcccgctttttgctctgctcgtctctgtttccgctgtgcacgccggatgtgccacgccccgttgccgcctgcaaattgctgtgcgagactgttaggggcgagtgtatggaaaacgctccgccggaactgatggagctgtggccttcgttccttaactgcgacggactgccgcagccggagaagcacgagttgtgcatgcagattccacaggaggtggctgtgccaggcgggagtccaagtggtccgcccaccactggttcacctggcgtcgaagatcacccgcagacgtaccgcttttggaaaagcggagcatctcccacctctgacttggctggcgtcttgtgcccgcaaaactttagcggcagtccctttaatccggaggagtgcgtgccccagtgtcagcgggacgccttccacacgagctctcagaagaagacgtctgagaccctcattctaggcctctcggccgtctgcttcgtcctgacactgttcgccttggtgaccttctgggcggagcccaccaggtttggctaccccgagagaccagtgctcttcctgtgcctgtgctacaacctcttcagcgtgtgctatctggagcgaatcgtgttccacaatcaagcaaggatgcatgacgtcgagctgcaatggcggctgatgcgaccgggttgcttgctgacgcccccttgcctggcctcctacataaccacctcctatttaagcctgtgtgcagccagctggtggctgatatttgccctgtgcttctacctgtcctcccacaaaaagtggtccagcgaggcgctggaaaagaggtccgggctgttccacgttctggcctgggtgccaccgctggcgccccccattgccgccctgctgctggagaaggtgcgtccgagtgagctgactgggatgtgctacgcaccgggatttgtggagctgccagcactggtcctgctcctgcttgggctgtacttcaccctgagagcctccaggtctctgctctccctgcagcaacagttgcagcccaccctggcccaccaccgattcgggcagatccggaagcgctttgtgctcttctccctgctgtacttcgcacccacgaccgccggcgtcgtggcggctctttgcgagcggtacgcggattcagtgcccagctgctccacacccgatgactgcctctcacccactccgctcagtgcctggccagcgttggtccggatcttcttccagctggtgggcggaacgttgacagggttgtgggtgtggtcgcgcaaaacctgcgagagctacagaaatcggctgggtgccagcggcacacccacctcatccctgatgaatcaaagcaaggcggccggggctttgcccaaaaagcatttgtatacgagtgggaaatccatgctgcccacggggggaatcactcctctatatgctggtattagttttcacaatgtgcccgtctacaaccccaaccaatcgagagtttaggggatcttttagcccacatggggggctctagaaaaatctcgaactctactattgtacatataacatatacatacatcatagaaggctttgagccgcggtgagagaacatgatcgaacatacgcctagtttttaagcccgaaaaggagaaactgaaatgtgttaatagctttatagatcgcgctcccccaagtacccatcacctccagtttttattagtagttctctagctagtcctaagcctgtaaatagtaaaacgttttattcatagtagaatgaattgtaaataaattatatgaatc

SEQ ID NO: 31014 - protein, 581 aa, DROSOPHILA
MYAASILILHLTWAVATIAANGAGHNGPVASGAGPNGLQCQPIAVSACQGLGYNMTALPNLAGHTNQLEAELQIAKLVPLIESGCSRRARFLLCSSLFPLCTPDVPRPVAACKLLCETVRGECMENAPPELMELWPSFLNCDGLPQPEKHELCMQIPQEVAVPGGSPSGPPTTGSPGVEDHPQTYRFWKSGASPTSDLAGVLCPQNFSGSPFNPEECVPQCQRDAFHTSSQKKTSETLILGLSAVCFVLTLFALVTFWAEPTRFGYPERPVLFLCLCYNLFSVCYLERIVFHNQARMHDVELQWRLMRPGCLLTPPCLASYITTSYLSLCAASWWLIFALCFYLSSHKKWSSEALEKRSGLFHVLAWVPPLAPPIAALLLEKVRPSELTGMCYAPGFVELPALVLLLLGLYFTLRASRSLLSLQQQLQPTLAHHRFGQIRKRFVLFSLLYFAPTTAGVVAALCERYADSVPSCSTPDDCLSPTPLSAWPALVRIFFQLVGGTLTGLWVWSRKTCESYRNRLGASGTPTSSLMNQSKAAGALPKKHLYTSGKSMLPTGGITPLYAGISFHNVPVYNPNQSRV

SEQ ID NO: 31015 - DNA, 6034 bp, DROSOPHILA
gtagtaattaacattaagtttgtctcgtatatcttgtatatacaccatgcatatatgttattatttatatattgctgttctggttgccgctgctgcgctattgttttcttgttggctattgtggggtgggagtcccaagtatcctcgaatatgtggttgtttcattatcttgcaacaaacagaggggcttgcttggtgtaaagctaagttgggtttcggatgcaaggcgtctaaaacctctgctaattgcgtcctaaatcctcccattctgattcacagtggctcctgggctgctcgtccgctgtttaggtcggttagttctcaactgtacatgatttgaatgcgatttaactctattcttagccgtttaactatcaaattgctggtggtggtggtggtggtggtgctgctgctgctgttgctgctgccgatgttgccgctgctccggttgctcccgctgctgcttttgttgtgattgcaacacgctgccctttgctgcgaccttttcctacttctacgattcagactgccacctgcaaaataaaagcacaccacacacacacgcgccacatgcaacgcggacacaaagtaaaagggttgggagaaacgggaagtgatcacaaagagaaagagagaaatggaaaagaaagcaaaaacaaaacaagttacaatctggtatatatccggattcgcattaacaaattggtcagcctgttgctttgcttcccgaatatgaaaacccagggcgggtatatcagggatcatctacttggactaagatctaagcctacggtttctataaggtgcttggaatcagcagcagcaaaggcaacgacgccagcagcgcagccattctcagtctccatcccttgttattcctgcttctctgcacctggtgcttcaccatgtcctcgcccggtactctccccctacgcgctcctcctcttctcatggaaatggcaactgtgcttagtcaatttgcttggagatcagtcgttggttatttctggccgtgatggttgtttgtatgatggtgagatgtaactgcgcccgttgaagtggaggtgggcaccactcctgctcctccgccgctgctggtcttctgctggctaatctgcggctgattctgtaggcaggcgaaactggtgggggccaggagagcacaggtgccgaatgtgtgcttgggcatgctcagaaagccagctccagatcctcctcctcctgacgaaccactgctgctgctcacgatggcctgaccctgtcccggacttggtgttccagcaaatttgcccagctggtagtagtgcatcgcataggagtcctcgccagcagctcgttgcttgccattgggaaagtagctgttgctgttggtggtcgatgtgcaggccgattgaaaggagctgctggtcgtcgatgaaggtgattgggcagcaatgggcggtccaaccgtggacgaatccactggctctgcagaggtggacgtagctcctcccactccactggatgagctggtactgcttgaggatgtattaactgtcagactggtgctgctggcgtaggaggcattgaaggactcgtcgccaccgcctccactgctgtttaggtcatccaagccgctgcccgatccctctgctgctgctggtggaatgtctatggtgtgggattcgttgccaaagatcaagcggagtcgcttcttctgcggtgttccatatacactgcttggggccggcgatctgcgttggctgctcctgctccggctgcgctgcttctttctctgcttcttgttcaccagctgcagctcctccttcggcggcggctcctcctcttcctcggcagctggctcttcatcatcttcttcctcgtcctcatcgtcatcgttgccgtgctctgaaataccctccatgcgcagtatctcgtattcaataccatttgagctgctgccggttaggtttagcgcacttctaactgacccctctcctgctgtcccttcccgatgggagcctggtgcacctcgaccagctcctccgttgctcagactcgttccgagctcaattacttcgtctaggattggtgagcgtttcatgcgcaacgttagcttcagcctgcgctcaggagtcttcagtaggggctcaacattgctgatggttgtagaggagcatgaggtggtaggttctccggcctgggccctctttcgctggctaccagttgaaccggtagggaatccgcccaacgcttcgcagtggatactttgcgctgccgccagagcagcggcccttctgctacgtttctgcttgaccggcgaataagtaactgattcgtcctttagctgctccttgattccttgggtggagggaggatcgggatcaaagctggccaaaaggttcttcttgtacgcgggagtcgggctgcagctgcgacgcgttgcctgctgctgctgattttctgatgatgtggatgagggtatggacgaggcctcacttggtgctggcttcctcgatttaacactaagtctactgctaagatttgaattatgattaattctactgctattattactattatgattattacaatttgtaatcgttgttgctttgttgctgctgctgctgctatttgttgtggttgcaatgttattgttatgggcagtggctaatctggctaccaatcctactcttcccgcactatttcgcgtcacacgcttctgctgctcctgttgcttctcctccgacttctctggttgtggttcctccgccaggctgaacattttttgcggcagttggtgatcctgctgcttctgctctttcttttgctgctcgctgctggtgtcgctgctctcgccgtccgtcagcttttccttctggcgttcgctacgtctaagctggcgctgctggctctggtgcagcgcagcaatggccatctgagctggcttgcaacgcggcataagaaccaccggtgccttgctgggcagcgaaatgctcgccgcgaccacgggtgcgatcacctcgtccgcggaggcggtggaaatgctgctgctggtgctgttaacgcgcatagacttgcgtagactggtggaacgaccaccattaacctcggagcccgctccggctgccacgctgctcactgtcgttgctccagcatttcctgcagctcctgttccgccaactcctggcttctgcatggccgccatttgctgtacagccgctgtagcctcggctccagtacttgcatgctggccatgattgtggtgatggtgatgatgatgatggtggtgatggaaatgatgctgatgatggtgctgctgctggtaagctgcgttggccatgatcatctcggcatcgtacttagtcattcccttttggcgcagctccttcatggtcagcggtgaaacaacaacattcggaagtttcttttcgagcaaagagacggcggctgtggcctccttgccgccagttgattgttgcgagggtgtgggcagcatcgcggcaccagtggctcctcctgctccgccagaagccaccaatccatttgtgctactagtctcgctagggccagtggaatcatttgtattactgttgctgtttgaggtgctgtttgtggagttggctcggctcttgatgcggttaatccgattgtctgtctccctcagacgatagccgccattattaccaggtccactgctggccaagccgagtcccatactgagccccagcatcaggccatcatctttcccggcgaaggctccagtcccacggcgttcgcacgtttcgcactcacaatagcgattggaatccccaaagaagtcctcgccgtagaagcaggttatctcctcccctacctcaatgtcgcgcaggacctttacacacgctgtgtccctgccggtggccaaaaacttgcagttggcgcgacaatcgtggttgatataggcagccggtcccagccacaattgggcgcagttcttgcgacaactgtacattactgagaagtcatttttgccagagtgcagcagagcggcctcctccgcctctgtcagctcggcgatgcagccaaccaggcattcgatcttgtcgttcttcgaccagcgcttcgtcgagctaatcttggcgccccgttgctcttccagtgtgtatctgtagcaggcctcgattgcaaagccgctatccttgtcaaagacgcgcaggtatcggacgatctggaagacattgggcagatggggatttcgattaatatgaattgcaattgaaattgtaccatgcaccacagaggcgagtaaccatgctttaaaataaataaaaattgttaaaacgggaagtttcggcttacatgatcgtggagccgcttggtggcaatcttgttcttgttcttgagatgacgcggtatccacggcccctcgtatatgcgctggatggctatatcgtagttctgcgtgtggataaagtcgtccacgatcgctttcagttgttgcgtgtccaccttaagaggccgaaagcgtatgttcatcttgtgggtctgaaatccaagatgcggatcgaggatcagcgatgtggccaggtcatcgttctcggacagttcccgcggcgacatcccagtggattgcgataggcggctgacggcgctgccgttgcaaccattgagtccactaaccaccgatccagatccagatcccgatccagcagatcctccgccactgccgttcgaagactgatgggactggtgatggtggctagggtgctggtttgtctgttggtaatgggtggcatgtggctggctgtgggccacctggtggtgctgctggttcgtctggtggtgtgcagatggaggtgcggatggcggagggccatggctcttgtgggacatggacgacaacagagccgcagccgtcgatgtcgacgtggaattggtggctagtgaagacgttacgctggtggtgctactggccgaagcggtggggccaccgcttgtgctgctggagctgctgctgtttgtaaatctgctgccagtttcaccgcgccgcgtgtggttagagccgacgaccattctgcacgacagtctgcaaggatgaacagcattacaagtatattcaaaacgatgtgcacactttttcactcaaatactaatacgatcttagatataccaattccaccaaacccaatcaacccggcaattgtcagctgttttggaatttgaatcactgacaggtataagctcttttattacatctggcaacgccgctgttgtctgcgaacacgacaaagagcgagatggacataagctttcaggacaagactaggacaaaggcaaacgtcctgcacccatacatacacactctctcacaggattggatgacttgcaataatcctcaatccgcaaaccatatgttccggcattttgccaatatattcgctccgttgaaaatggccctaatttagtttttattcctacggcttcgcgtttgaaagagagagagagagaccgagaaagagggggcttgtaactgatgtcgtcgacagccatccctctcgctcgcacttattccaagcccttttagcccatgcacacacacgtttaacaaaaatcaattaacttgaaagcacatgtaaaaaaaagtattgatccacaaaaaacaaaaggcacttcggtaatcctggaatacacacacttactgccgaaaatatttaaaatgaatgggtacgcgtatatatttatatgctggtgaacaaaaggcgagcataacaaaaatgtcttatcgatttgcatgcgcagcagacagtaattgcaaatcttgtattttcttgagtctgtgcaacaactgaaatacctttctgggcataaactatcataaacacaagtgggtggtgctgggaaacatcgctggaattgaatatttgtttgttggtcgatttgttctgaatggaaacgaatgtcgtttgcaaattgctctctcagctgtttacaaacgcataccacataacgcaggtgagagagagagggaggcatatgcgcagtgagaatggaagatgaagggttgccaagtgcg

SEQ ID NO: 31016 - DNA, 3903 bp, DROSOPHILA
atggtcgtcggctctaaccacacgcggcgcggtgaaactggcagcagatttacaaacagcagcagctccagcagcacaagcggtggccccaccgcttcggccagtagcaccaccagcgtaacgtcttcactagccaccaattccacgtcgacatcgacggctgcggctctgttgtcgtccatgtcccacaagagccatggccctccgccatccgcacctccatctgcacaccaccagacgaaccagcagcaccaccaggtggcccacagccagccacatgccacccattaccaacagacaaaccagcaccctagccaccatcaccagtcccatcagtcttcgaacggcagtggcggaggatctgctggatcgggatctggatctggatcggtggttagtggactcaatggttgcaacggcagcgccgtcagccgcctatcgcaatccactgggatgtcgccgcgggaactgtccgagaacgatgacctggccacatcgctgatcctcgatccgcatcttggatttcagacccacaagatgaacatacgctttcggcctcttaaggtggacacgcaacaactgaaagcgatcgtggacgactttatccacacgcagaactacgatatagccatccagcgcatatacgaggggccgtggataccgcgtcatctcaagaacaagaacaagattgccaccaagcggctccacgatcatatcgtccgatacctgcgcgtctttgacaaggatagcggctttgcaatcgaggcctgctacagatacacactggaagagcaacggggcgccaagattagctcgacgaagcgctggtcgaagaacgacaagatcgaatgcctggttggctgcatcgccgagctgacagaggcggaggaggccgctctgctgcactctggcaaaaatgacttctcagtaatgtacagttgtcgcaagaactgcgcccaattgtggctgggaccggctgcctatatcaaccacgattgtcgcgccaactgcaagtttttggccaccggcagggacacagcgtgtgtaaaggtcctgcgcgacattgaggtaggggaggagataacctgcttctacggcgaggacttctttggggattccaatcgctattgtgagtgcgaaacgtgcgaacgccgtgggactggagccttcgccgggaaagatgatggcctgatgctggggctcagtatgggactcggcttggccagcagtggacctggtaataatggcggctatcgtctgagggagacagacaatcggattaaccgcatcaagagccgagccaactccacaaacagcacctcaaacagcaacagtaatacaaatgattccactggccctagcgagactagtagcacaaatggattggtggcttctggcggagcaggaggagccactggtgccgcgatgctgcccacaccctcgcaacaatcaactggcggcaaggaggccacagccgccgtctctttgctcgaaaagaaacttccgaatgttgttgtttcaccgctgaccatgaaggagctgcgccaaaagggaatgactaagtacgatgccgagatgatcatggccaacgcagcttaccagcagcagcaccatcatcagcatcatttccatcaccaccatcatcatcatcaccatcaccacaatcatggccagcatgcaagtactggagccgaggctacagcggctgtacagcaaatggcggccatgcagaagccaggagttggcggaacaggagctgcaggaaatgctggagcaacgacagtgagcagcgtggcagccggagcgggctccgaggttaatggtggtcgttccaccagtctacgcaagtctatgcgcgttaacagcaccagcagcagcatttccaccgcctccgcggacgaggtgatcgcacccgtggtcgcggcgagcatttcgctgcccagcaaggcaccggtggttcttatgccgcgttgcaagccagctcagatggccattgctgcgctgcaccagagccagcagcgccagcttagacgtagcgaacgccagaaggaaaagctgacggacggcgagagcagcgacaccagcagcgagcagcaaaagaaagagcagaagcagcaggatcaccaactgccgcaaaaaatgttcagcctggcggaggaaccacaaccagagaagtcggaggagaagcaacaggagcagcagaagcgtgtgacgcgaaatagtgcgggaagagtaggattggtagccagattagccactgcccataacaataacattgcaaccacaacaaatagcagcagcagcagcaacaaagcaacaacgattacaaattgtaataatcataatagtaataatagcagtagaattaatcataattcaaatcttagcagtagacttagtgttaaatcgaggaagccagcaccaagtgaggcctcgtccataccctcatccacatcatcagaaaatcagcagcagcaggcaacgcgtcgcagctgcagcccgactcccgcgtacaagaagaaccttttggccagctttgatcccgatcctccctccacccaaggaatcaaggagcagctaaaggacgaatcagttacttattcgccggtcaagcagaaacgtagcagaagggccgctgctctggcggcagcgcaaagtatccactgcgaagcgttgggcggattccctaccggttcaactggtagccagcgaaagagggcccaggccggagaacctaccacctcatgctcctctacaaccatcagcaatgttgagcccctactgaagactcctgagcgcaggctgaagctaacgttgcgcatgaaacgctcaccaatcctagacgaagtaattgagctcggaacgagtctgagcaacggaggagctggtcgaggtgcaccaggctcccatcgggaagggacagcaggagaggggtcagttagaagtgcgctaaacctaaccggcagcagctcaaatggtattgaatacgagatactgcgcatggagggtatttcagagcacggcaacgatgacgatgaggacgaggaagaagatgatgaagagccagctgccgaggaagaggaggagccgccgccgaaggaggagctgcagctggtgaacaagaagcagagaaagaagcagcgcagccggagcaggagcagccaacgcagatcgccggccccaagcagtgtatatggaacaccgcagaagaagcgactccgcttgatctttggcaacgaatcccacaccatagacattccaccagcagcagcagagggatcgggcagcggcttggatgacctaaacagcagtggaggcggtggcgacgagtccttcaatgcctcctacgccagcagcaccagtctgacagttaatacatcctcaagcagtaccagctcatccagtggagtgggaggagctacgtccacctctgcagagccagtggattcgtccacggttggaccgcccattgctgcccaatcaccttcatcgacgaccagcagctcctttcaatcggcctgcacatcgaccaccaacagcaacagctactttcccaatggcaagcaacgagctgctggcgaggactcctatgcgatgcactactaccagctgggcaaatttgctggaacaccaagtccgggacagggtcaggccatcgtgagcagcagcagtggttcgtcaggaggaggaggatctggagctggctttctgagcatgcccaagcacacattcggcacctgtgctctcctggcccccaccagtttcgcctgcctacagaatcagccgcagattagccagcagaagaccagcagcggcggaggagcaggagtggtgcccacctccacttcaacgggcgcagttacatctcaccatcatacaaacaaccatcacggccagaaataa

SEQ ID NO: 31017 - protein, 1300 aa, DROSOPHILA
MVVGSNHTRRGETGSRFTNSSSSSSTSGGPTASASSTTSVTSSLATNSTSTSTAAALLSSMSHKSHGPPPSAPPSAHHQTNQQHHQVAHSQPHATHYQQTNQHPSHHHQSHQSSNGSGGGSAGSGSGSGSVVSGLNGCNGSAVSRLSQSTGMSPRELSENDDLATSLILDPHLGFQTHKMNIRFRPLKVDTQQLKAIVDDFIHTQNYDIAIQRIYEGPWIPRHLKNKNKIATKRLHDHIVRYLRVFDKDSGFAIEACYRYTLEEQRGAKISSTKRWSKNDKIECLVGCIAELTEAEEAALLHSGKNDFSVMYSCRKNCAQLWLGPAAYINHDCRANCKFLATGRDTACVKVLRDIEVGEEITCFYGEDFFGDSNRYCECETCERRGTGAFAGKDDGLMLGLSMGLGLASSGPGNNGGYRLRETDNRINRIKSRANSTNSTSNSNSNTNDSTGPSETSSTNGLVASGGAGGATGAAMLPTPSQQSTGGKEATAAVSLLEKKLPNVVVSPLTMKELRQKGMTKYDAEMIMANAAYQQQHHHQHHFHHHHHHHHHHHNHGQHASTGAEATAAVQQMAAMQKPGVGGTGAAGNAGATTVSSVAAGAGSEVNGGRSTSLRKSMRVNSTSSSISTASADEVIAPVVAASISLPSKAPVVLMPRCKPAQMAIAALHQSQQRQLRRSERQKEKLTDGESSDTSSEQQKKEQKQQDHQLPQKMFSLAEEPQPEKSEEKQQEQQKRVTRNSAGRVGLVARLATAHNNNIATTTNSSSSSNKATTITNCNNHNSNNSSRINHNSNLSSRLSVKSRKPAPSEASSIPSSTSSENQQQQATRRSCSPTPAYKKNLLASFDPDPPSTQGIKEQLKDESVTYSPVKQKRSRRAAALAAAQSIHCEALGGFPTGSTGSQRKRAQAGEPTTSCSSTTISNVEPLLKTPERRLKLTLRMKRSPILDEVIELGTSLSNGGAGRGAPGSHREGTAGEGSVRSALNLTGSSSNGIEYEILRMEGISEHGNDDDEDEEEDDEEPAAEEEEEPPPKEELQLVNKKQRKKQRSRSRSSQRRSPAPSSVYGTPQKKRLRLIFGNESHTIDIPPAAAEGSGSGLDDLNSSGGGGDESFNASYASSTSLTVNTSSSSTSSSSGVGGATSTSAEPVDSSTVGPPIAAQSPSSTTSSSFQSACTSTTNSNSYFPNGKQRAAGEDSYAMHYYQLGKFAGTPSPGQGQAIVSSSSGSSGGGGSGAGFLSMPKHTFGTCALLAPTSFACLQNQPQISQQKTSSGGGAGVVPTSTSTGAVTSHHHTNNHHGQK

SEQ ID NO: 31018 - DNA, 2340 bp, DROSOPHILA
gatcccaaggagaatcttacaaatacaacaccttttccagctacacgacccgtctaccgaaagccggagaaacgctccatgggcatcgctttcagattggctacggcggcaagggcgccaatcagtgtgtggctgccgcgcgccagggatcccgaacagctctggtggccaaactgggggcagacacattcggcagcgactacctgagacatctgcgcgaggagcgcgtcaatgtaaaccacgtcgagcagctggcggaggaaacgacgggcgtggcccagatagccgtgtcagatggcggcgagaacaacatcatcattgtggtgggcgccaacaatcgactgagctcgtgtgacgtttcctcggcgaaggcgctcttccaggaagccaaagttctggtgtgccagctggagacgcccgttgaggccaccctgaccgctctgagagccttccggggcgtgtccatcgtcaatgcggctccggccatggccgacacaccccccgaacttcttcagttggccagcatcttctgtgtgaacgaaagcgaggcggcactgatgactcagatgcccgacattggcaacatagagtaagtgcgagtaagcgtaaaccagtcgtactgccaactaaatcgggtcccacttctgccaggcacgccgaagatgcggttggaaagctgatagcggcaggtgccaacacggtgatcataactctgggcaaactaggagccgttttcggttccgccgactccaagggcgtgtgccagcatgtggctgcgccgagtgtgccgcccgaaaaagtggtggacacgacgggggctggagacgccttcattggggccttggcccacaacttggcccgtcatccaacgaggaaactggaggagcacatagccgccgcctgtgccgtggcctcgcaatccgttcagctacccgggacgcagtcgagcttcccacacgcttagagggaaatccccaaaagaatgcaacgcaacaataaatctctatcctgacgtacaatgatctatttaatggtaatcgtaagtataaaaagattatggtccacatgggtgtgcttcggctggcaattcagcgtccagaatccagtgggttgcggactacagatggaggcgtggcagcttcacttctttcccgacttcttgatgccgcctcctacgagaggacccttctttgaggcgttcgccttggccgcctccagagccttctgctgctccttctgcttttgcttgaaggccatgtcgtcctcgtccaggtctttggagtccttcttcggcgccttcagaggcttcttcttaccgccctcgcgtccagacatacttgctcgcttatactgcgtgggaggaaaaatctatgaaaatcgggttggattccacaacaaaaagtcacgcacctttttcacacgtttttccgatttccgctgcacgataaccacgagaacaatcgatagcttcgcgctttcgattggctgtgcgtgttatcggaactggacatatatttcaattaattgatgaaattataagaacaaatttatatgaaattataattatgttgtttctaaaaatcgcttctcgaagcgaacttaaagtcatccttaacagcaatgtgtaccagccaaaataaaaaaatgtcgattttgtcgatggaattttaatgacttttcggaaaaaaaaacatagataagttgaaaaatattaaaccactaactattcaactaattcaaaaggaagaggaatttaccatcgatttcttgagcgacctttacaaaagcgatgtatcgatgaaaaatcgattggaccagctcgtcgataaagttgttgtttgctccaggtttacttttaatttcaaattcaactaatatccgggattaagagtgtaaatcctgtcaggaaaaccatgctaaggccccagtcatcagtgcctgcgcctcagccgcctggcaagcgaaagaagcccgcggaactggaactgacctgcggatggcgcgactgccaggagatctgcactggcgagtggagcctgaacgggcatattggggatcatctggagcactatgcgaaggcccaggacgatcggggggcgcatgcggagcacacggagcatcaatgcacatggaactcctgcgatttccgcaccgaaaaccaggtggagtttgaacggcattcgtactaccacggctactacttgaacctgctcctgcaggggaagctggagtgcgatctgcatccggaaatccccgcctgcactgctccggcccgcctcatggagaagctgcccgctctgggccagaactttcgatgtggttggaccgactgtgagaggg

SEQ ID NO: 31019 - DNA, 340 bp, DROSOPHILA
caagtatgtctggacgcgagggcggtaagaagaagcctctgaaggcgccgaagaaggactccaaagacctggacgaggacgacatggccttcaagcaaaagcagaaggagcagcagaaggctctggaggcggccaaggcgaacgcctcaaagaagggtcctctcgtaggaggcggcatcaagaagtcgggaaagaagtgaagctgccacgcctccatctgtagtccgcaacccactggattctggacgctgaattgccagccgaagcacacccatgtggaccataatctttttatacttacgattaccattaaatagatcattgtacgtcaggatagaga

SEQ ID NO: 31020 - protein, 64 aa, DROSOPHILA
MSGREGGKKKPLKAPKKDSKDLDEDDMAFKQKQKEQQKALEAAKANASKKGPLVGGGIKKSGKK

SEQ ID NO: 31021 - DNA, 2494 bp, DROSOPHILA
cgatgcggcggcagccatctgcaaatgcaatttgttgttgagtcccgttatttcgcagacagagcaagtgcagttataggcgaaactgggggagcggacgagcgaaagaaatagccaatgacctccccttgatgacgggctattaatattcatttacatgtctcttcttgttttgttatgtgcgcaatggaacagatgactccgcataggaggatgctgcttgctgctcttcgatttgttgctttattaatagaagtcaccgaatgccaatctccgattggaatcacagccgctcgcggggacaccgattaccggagttgttacttggttagttagccagcgccaatagccgtgattaatcccgttgcagcctgccaatatgttacgcttttgcttttgttattgtgttcgcttgttatcgcttaacgatacgatttgtccgcggtcaacgtcgcgtcgctgcttattgttgttgcgttttgttattgttgttattgctggcgatgggagatcttcgattagtttaacttttgcagtagtgtggctgtcgcttgagtgtctgcaaataccacagcgacgcacaccaaagactaaatgtttgaaaacattttaatttcttacgaaatttaaaagtagaactctacaagaaatttaaaagcgttcttctattttatcaatcggtatgtgctggtgggaactacagctactccttgaacccctccacctcgctggcttcgaagggcacctcctctaccttgtggaatccggagaacttgatgattttgccgttgccttccaccttcaggtgcttggcgaactattgggccggtgaaagggccagctcctcctccgtcttgtagccgtagtacttggcccagtcgttgtagaactttacaagaaatttaatagtgtctttctatcccattaaccggtatccgatgcggaaggacgcgaatccattttgaatccgcatcggtttcccattgacgccacaacatagttaagtcctatttgtaagctttaatggcaataaacatacgatggctaaaaaaaaataatggttcactgagctggtgggaactacagttactccttgacccgctccacctcgctggcgtcgaagggcacctcctccaccttgtggaatccagagaacctgatgatcttgccggtcccctcgaccttcaggtgcttggcgaactgttgggccggcgaaagggccatctcctcctccgtcttgtagccgtagtacttggcccagtcgttgcgtccggtgtagaccatatagcaaacgaggccgaatgcctgccaggccagaacggcgtacccgatgctcaggcgccgcttccacagctccgcccggtgctccggtatgggattcgtgttgcgccgcacccagcggcgcagccacttcatctcgaacagtgccattgtgtgcttatgtgctgctataactaagttcgttatgtaaagatgcaaaatgtaaacaagcgactgcagctggcagccaaagttgccacactgttcaaatccaccaaatggttcgaaccaaggatgcaagaaactaattatttgaaaacaaaataaagttaagcttattttacaagccaaagcgaagtcacttctaatatgtgttttgcagatgcgataatgccctgtgcctcatttccacgtttttaattcaggaaaagtgcacgttaaagctaaatgaaaaccaagacgtatgagaatcattattgtagcgaaatctttggacgaaagcgcgagcgacttgaattcccgctgaccgcctcagacggtagccgaatttggcggcaagctagccaaggtggcagcactgaaatggtcacagaacgaaaatgcaacttcgatcggggcatataaaaccagtgcttccaatccgaaggcaaagcataaaagatcagaacatcagtagccgaagattggctgagtagcacggacagcgggcaagtcctttgaaacgttggtagtttgcaaccgggtttgccaacttcctttggagttcagtggtgctcaactatcgacacaactatcctcggctttcgcaaaactcagtaaaccggtaaacttccgttcatacagttcacaattctaaatttaaaatagatctaacgcagacacattgacattcgaaaattgggattgaaaactcaagatgccgactacaccacaggatcttgcccttgcccactctcttgctcaaagacctccgaccgatagcagtgaggccaaggagcaggaggccggcgaatcggacaacctgcccaacctgtgcactttgtcgctggacgaactgaaacagctggacagggatcccgagttcttcgaggacttcatcgaggagatgtccgtggtgcagtacctgaacgaggagctcgattcaatgatggaccaggtggagattatatcaagtgagtaggtcacggcccgaggctggcaaatctacctaacccttctgtattccaatccagga

SEQ ID NO: 31022 - DNA, 494 bp, DROSOPHILA
tcgcttgtttacattttgcatctttacataacgaacttagttatagcagcacataagcacacaatggcactgttcgagatgaagtggctgcgccgctgggtgcggcgcaacacgaatcccataccggagcaccgggcggagctgtggaagcggcgcctgagcatcgggtacgccgttctggcctggcaggcattcggcctcgtttgctatatggtctacaccggacgcaacgactgggccaagtactacggctacaagacggaggaggagatggccctttcgccggcccaacagttcgccaagcacctgaaggtcgaggggaccggcaagatcatcaggttctctggattccacaaggtggaggaggtgcccttcgacgccagcgaggtggagcgggtcaaggagtaactgtagttcccaccagctcagtgaaccattatttttttttagccatcgtatgtttattgccattaaagcttacaaataggacttaa

SEQ ID NO: 31023 - protein, 114 aa, DROSOPHILA
MALFEMKWLRRWVRRNTNPIPEHRAELWKRRLSIGYAVLAWQAFGLVCYMVYTGRNDWAKYYGYKTEEEMALSPAQQFAKHLKVEGTGKIIRFSGFHKVEEVPFDASEVERVKE

SEQ ID NO: 31024 - DNA, 6321 bp, DROSOPHILA
ccaagggctcaagttttactttttgtgcgcctgccaagattgatttattttaataagcggcggctcagaaatttttgattacaagaaatgcaaatttcggacgcagaagattttatagcaattttaatttgcttcccgcagcttatcctattttaataatggcattaaagctaaagaaaacaaccggggattacttgacttactgccttttgcagcatattgttctttatgatagatcgtagaattaatcgtttaaaaatacattttgtttatgtttaaattagtgttttgaattagttgaaataaatagttatatatacgctaaagctagtccatctccttattatctgtatagtaatgtttcgtcgtcaagctaatcatcgtccagctcaatcgtcgatttacgcattaaaataaaatctgtaccacgcaataaaaaaaaacacctatataaacacccatgtacagtgggaacaggctgggatagtcatcgttgtccttggtatgatcggtccaacaaactttgaagcttcataaaaaaaatgtaacttttgcttatacttaatactaggctttttctttaaaacccaaaaacaatgatatttaaaagtagcgatgtctgaatatggggcgctgcatcggacgaccattatacatgggcaaggatatggaatcagacgcactaaagcagaagaggctttacaggaaaaaagtgtacaagctagaggaattggagaaaacattagattgctctccttcgtgaactgaatatacacaacaccaaagaaatatgtatgcgaaagaacaaacatatattgaaagcaaagggaaccccacgaatactgcacaaaagagctcaagtggagggcagcagatggtccttaaattccctcgtctaggtctcaaagtatttgtagactgccgtcacataggacatcacctgcatccagtccggtcgttcgatctgacacatatcattgatattctggtagcgaaattttcagataagaataagaataaacaagttgagcttctgttggccatggaaacttaccagtgttgtgccgattcccacggactcggcagccgcaaatgccagcgaaaagttgcgccgcttgttggcgggagtcagctgatcgtacggaatgcgatccggcaaatacgagtgtaagatagcacaaaaagctaacccatcgttccacgacgagctgaagttggtgatgtcgatgttacggtagcccactgttttgttttggcaccacttcaacaaggcgttgcgcttcgaacccccgttcttggccagcatgttaagcgggtccttgcgttcgcctggtaaacacggaaaagttaactttaagatcacgaatacatctacgccagttaaaacttcctaccgctgataaatgactttgagacgttaccaaatggcaacccgccgctactgctgctgcccgcgctgctgggcgtggccggcgtagaaggttgggagacgttctgtacctggctttgggtagatgttatcgcaagctgttgttgatcgcgcagcggcaaagtggctttggtagtgctagctaaatctcctccgctgccagatgaagtattggttccctgtccggcaccaacttcgttgccgacgtttacgtgcaagttggtgctctgcagcacaggcaaccgaatctgtggaaaattcaaagccattacgagcactcaaattcacttccgattgaatactcacgctctcatgccagtcactggagggaggaaagatgatgggcgtagtgcccaggtcaggagtcccgctgtttaggctggacgtcgagctgtagtgggattccgactcgtcggctttgccctgctgtaggaccaaaggagtttgggcacagaaattaatggtttgggcaagattaatgcttcacaggccttaccgctttgttattctcaatactctcaatgagcgttttgacggagagccgcgaatcctgtcggctgaagctaagcttgctgcgtcgtgtggccatctccatctcacgctgaactgtggacagcacggactgcggagtctccgactgttgcatttctacaagggttaagaaaagcattaaacattaccggttgaccgcagacgtcaactgggcttacgctgtttggtaagtttttcaagctgctgctccaacagtctgatcttttctttctgcgtcttgttgtcgagaactagctgctcccgggcgctgagcgcctcagtcttaaagtcgttggccactcgcacagtcatgagaaggtcggcctggaactgctgccactcctcggcctccttgcgccgcagctgcgtctcctggtcgagtctacactctgcctcacccagcttcagttgaacgtcgcccagatggcgctgagtttcagctagcagagattgcaactgggccttgtcttcctgatggcatttgcactgaacctgcagttcggccacgcgttcctctagggcctgccattcgccagctattttgtccttgtcacgttggagctgctctaagcggtattcaaggtgggagaccgcacacttggcgttattcttaactactttgcattcctcagttagcccggatagctgatcacgtagtcttctcagctcagcttggctgcgagagcactgatcttgtaactcagccacacgctcttctagggcatccttctcctttctggccacatccagcacttcgctcaggtctgtcttgtctcctctggacaaatctgcttctagctcctcgatttttgagcgcgcattctccagaagagtgctcaatcgactgatttcgatggccctctgcgaaatctcttccatggcctgcgaaaattgagcctctccttgccgccgctctgcgtttgctgcatccaactgagaatccaggagggcaattcgttccctctggcgctgcagttccagttggccagcttcccgggcctgtttcatttccgccagctcagctcccagttcctcctgcttgagcaaaactgcctcgcgctcctcctgtgatgtcttgatcaggtccagaagcttctgctccctctccgaagcacttacttcgggtgcaggctgtttggtatcccgaagtaacagctcttgcagcgtgctgatctgcgtacgcgattcatttagcttttccgtctgtcggcatagcgactggaagagcacatccttctcctcggccagacgctcgttctccgtctgcgtatccgtcagctgggtttgcaagtccgccagctcctgcaacgtagcctgtagctcctcgttagtggagtagtgtgtctcctccatttgaatgatcttgtcttgcaggcaggctacagagatctcgctggaggatgactgtttatcccagtcgggagtgaggcagggtgtgccatcatgcgcatcgtgtgtctggatatgaaaaggacatggggatagtgttaggggcttttgaatcactagaaatcgtctgaaagtacttacactgggcagggctattgaagcgggcgctgaactgtgcagccgctgcgagtcttgaatgatctggtgcttctccgcatccgacagcggtgagtttactacgtcccgcagtcgattgcgcagagattcattctcgtatttcaaattgccgatttccatctgggacttttcctgtagactctgtaagcacaagtatcagactgatcagttttgcttccctctggtctgcgttaatgtggctgctgttgcattacgacgcaaaagcagactactacacccaattaaaggagcgcaatatcgaattaaacatgcgcggataagtgagggtagcgaagcgcagcgtccgaaaacccggctttgcctataataccccttactatcgctttttaacaccggtataacttcgttatttaaaggcttgcttacatagattaaattctttacggacttattcaaagaataaaagattactatggaactatgctaatattttagctagtaaattaaaatagctaactttcttactaaaaaatctagcccaccccctttgtgcaagtgtgaatctaaatttaccaatgcgggagagccaacaaatacatcaatcagccgtgacaacacagcagcaacttgtggttagccaacgtccccgtttttgctgacagcccacccccgtaagccaacccaaaccatttttcaccatttacacccccctggcgaacttttgcgcacctgcatcttaaccagatcgcccttcagcttggccacctcgctttggtatggcaacagctccgtgatgcgtgtctccagttgcatttgctcgcttctgaatctctccatctgtttgtgcagctcctgcattttattgttagcctgtgtggttgagtttcgattactatactaatgaaaacagggcaacgaatgcggacttacctctaggagttgctgttgctgctgttcgttgttgaggagttgctgttgctgctgctgttgctggtagctgcttgctgccacagcggcaacagcaacggcagctgctgctgcgggaaaagagctgaccggactatcagcactggtgttgctgccgttcgccgacgttgctgttgcagtggccgttgctgctgctgctagttgctggtagaaatctgcagcagcggcggcagcagcgccaccatcttgtagtgcggccaatgcgttgttgttattgatgttgctattgctggagctcccagtcgctgaagcctgcggcactgctgccagggaagtcatcagtggttgctgtggatcatgtggctcaggtgcattgctgtgtggctgctgcactggcaacagcttgggctgcttttgtcccttgagcttggactttttttgaggcaaggtgttgctttggggctgctgcagtagttgctgctgctggcgtctctgctcctgctgctggttagtcagcagtagcgccccctcgtcccccacatccacgcccctttcgtaactggccgtctcctggtgggcgtagaactttgtagttgctgcggtgatgctgtgctgctgctgctgctcgtgggcggtattcaatgaagtgctcgattgcgacttctgccgattgttgttggaggagttctgctgctgcttgtgtgacgagttggaggaatgggagctggagttgccctgtcctctgcggaacaaggatttcagtttgatcatcttgctgccagtctttccttgctcgttgcaaaacgtgaaccatcaaccatatacttgcttttaaacttatttaatagcaaccatcatttattgtggcttgcgtactaattgcaggttagcttgtttaatttgatcttttatcgttcgttgcgcttttaatgtttttaatgtgtaattttagaaatttagcttacatattcgtctttttttgtttgtcaattaatatcacatattttatttcttatgttcttgttataaacttatttcgttgggagtcaatggatgaatagagaaaagcgggcttgaaattggatttcacaagcaacaaatgctcgtgttgcatgcaacatcagccagagtatacaacaatataacccgcttgtggcgacgaacaatcacactgcattgttattgtcattgggagagcgactaagagggagataaagatagaaaccgaaacaaacgcacaaacgcgtttgcattcacacccgattatcaattaaaggcactccgtgatttctgtctctccacttctaccagctcggattcagtcccggaatgtttaaattgaagacgcacggtattctggccgggcccaggtacaacgtcaacgattcgacagccgcactcggacacactgaaagtcacacgtacgcttctggacaaacggggccaagccaccagcatcagaagttaaatcaaataaaatgaacatgtaggcttgcgagaccggtggcgcacaaattgatcgcatttcccatggataattcacgtggaatcaccatatccttgacctctgctgtaggcgttgggtttctaagcaaaggagaggactctttattttcacccactgggcacagagaccaccccgctctccacagcccagagcagtatgcgtgtgtgctttcacatgcatgccgaattactcatgtcacgacggagcgaaaagacaacaggagaacaaatttagtggaactgagcaaatggcattgccagctgaccccagcggagctgcacttacaagttgcaacacgccgaacagaagtgttgcaaaacagtcagatcttaggatttagctagtttaccatgtatggcctcgaatgattttcattcggatttcttttttgtgacagcga

SEQ ID NO: 31025 - DNA, 3385 bp, DROSOPHILA
agatcaaattaaacaagctaacctgcaattagtacgcaagccacaataaatgatggttgctattaaataagtttaaaagcaagtatatggttgatggttcacgttttgcaacgagcaaggaaagactggcagcaagatgatcaaactgaaatccttgttccgcagaggacagggcaactccagctcccattcctccaactcgtcacacaagcagcagcagaactcctccaacaacaatcggcagaagtcgcaatcgagcacttcattgaataccgcccacgagcagcagcagcagcacagcatcaccgcagcaactacaaagttctacgcccaccaggagacggccagttacgaaaggggcgtggatgtgggggacgagggggcgctactgctgactaaccagcagcaggagcagagacgccagcagcagcaactactgcagcagccccaaagcaacaccttgcctcaaaaaaagtccaagctcaagggacaaaagcagcccaagctgttgccagtgcagcagccacacagcaatgcacctgagccacatgatccacagcaaccactgatgacttccctggcagcagtgccgcaggcttcagcgactgggagctccagcaatagcaacatcaataacaacaacgcattggccgcactacaagatggtggcgctgctgccgccgctgctgcagatttctaccagcaactagcagcagcagcaacggccactgcaacagcaacgtcggcgaacggcagcaacaccagtgctgatagtccggtcagctcttttcccgcagcagcagctgccgttgctgttgccgctgtggcagcaagcagctaccagcaacagcagcagcaacagcaactcctcaacaacgaacagcagcaacagcaactcctagaggctaacaataaaatgcaggagctgcacaaacagatggagagattcagaagcgagcaaatgcaactggagacacgcatcacggagctgttgccataccaaagcgaggtggccaagctgaagggcgatctggttaagatgcagagtctacaggaaaagtcccagatggaaatcggcaatttgaaatacgagaatgaatctctgcgcaatcgactgcgggacgtagtaaactcaccgctgtcggatgcggagaagcaccagatcattcaagactcgcagcggctgcacagttcagcgcccgcttcaatagccctgcccagtacacacgatgcgcatgatggcacaccctgcctcactcccgactgggataaacagtcatcctccagcgagatctctgtagcctgcctgcaagacaagatcattcaaatggaggagacacactactccactaacgaggagctacaggctacgttgcaggagctggcggacttgcaaacccagctgacggatacgcagacggagaacgagcgtctggccgaggagaaggatgtgctcttccagtcgctatgccgacagacggaaaagctaaatgaatcgcgtacgcagatcagcacgctgcaagagctgttacttcgggataccaaacagcctgcacccgaagtaagtgcttcggagagggagcagaagcttctggacctgatcaagacatcacaggaggagcgcgaggcagttttgctcaagcaggaggaactgggagctgagctggcggaaatgaaacaggcccgggaagctggccaactggaactgcagcgccagagggaacgaattgccctcctggattctcagttggatgcagcaaacgcagagcggcggcaaggagaggctcaattttcgcaggccatggaagagatttcgcagagggccatcgaaatcagtcgattgagcactcttctggagaatgcgcgctcaaaaatcgaggagctagaagcagatttgtccagaggagacaagacagacctgagcgaagtgctggatgtggccagaaaggagaaggatgccctagaagagcgtgtggctgagttacaagatcagtgctctcgcagccaagctgagctgagaagactacgtgatcagctatccgggctaactgaggaatgcaaagtagttaagaataacgccaagtgtgcggtctcccaccttgaataccgcttagagcagctccaacgtgacaaggacaaaatagctggcgaatggcaggccctagaggaacgcgtggccgaactgcaggttcagtgcaaatgccatcaggaagacaaggcccagttgcaatctctgctagctgaaactcagcgccatctgggcgacgttcaactgaagctgggtgaggcagagtgtagactcgaccaggagacgcagctgcggcgcaaggaggccgaggagtggcagcagttccaggccgaccttctcatgactgtgcgagtggccaacgactttaagactgaggcgctcagcgcccgggagcagctagttctcgacaacaagacgcagaaagaaaagatcagactgttggagcagcagcttgaaaaacttaccaaacagcaaatgcaacagtcggagactccgcagtccgtgctgtccacagttcagcgtgagatggagatggccacacgacgcagcaagcttagcttcagccgacaggattcgcggctctccgtcaaaacgctcattgagagtattgagaataacaaagcgcagggcaaagccgacgagtcggaatcccactacagctcgacgtccagcctaaacagcgggactcctgacctgggcactacgcccatcatctttcctccctccagtgactggcatgagagcattcggttgcctgtgctgcagagcaccaacttgcacgtaaacgtcggcaacgaagttggtgccggacagggaaccaatacttcatctggcagcggaggagatttagctagcactaccaaagccactttgccgctgcgcgatcaacaacagcttgcgataacatctacccaaagccaggtacagaacgtctcccaaccttctacgccggccacgcccagcagcgcgggcagcagcagtagcggcgggttgccatttggtaacgtctcaaagtcatttatcagcggcgaacgcaaggacccgcttaacatgctggccaagaacgggggttcgaagcgcaacgccttgttgaagtggtgccaaaacaaaacagtgggctaccgtaacatcgacatcaccaacttcagctcgtcgtggaacgatgggttagctttttgtgctatcttacactcgtatttgccggatcgcattccgtacgatcagctgactcccgccaacaagcggcgcaacttttcgctggcatttgcggctgccgagtccgtgggaatcggcacaacactggtaagtttccatggccaacagaagctcaacttgtttattcttattcttatctga

SEQ ID NO: 31026 - protein, 1082 aa, DROSOPHILA
MIKLKSLFRRGQGNSSSHSSNSSHKQQQNSSNNNRQKSQSSTSLNTAHEQQQQHSITAATTKFYAHQETASYERGVDVGDEGALLLTNQQQEQRRQQQQLLQQPQSNTLPQKKSKLKGQKQPKLLPVQQPHSNAPEPHDPQQPLMTSLAAVPQASATGSSSNSNINNNNALAALQDGGAAAAAAADFYQQLAAAATATATATSANGSNTSADSPVSSFPAAAAAVAVAAVAASSYQQQQQQQQLLNNEQQQQQLLEANNKMQELHKQMERFRSEQMQLETRITELLPYQSEVAKLKGDLVKMQSLQEKSQMEIGNLKYENESLRNRLRDVVNSPLSDAEKHQIIQDSQRLHSSAPASIALPSTHDAHDGTPCLTPDWDKQSSSSEISVACLQDKIIQMEETHYSTNEELQATLQELADLQTQLTDTQTENERLAEEKDVLFQSLCRQTEKLNESRTQISTLQELLLRDTKQPAPEVSASEREQKLLDLIKTSQEEREAVLLKQEELGAELAEMKQAREAGQLELQRQRERIALLDSQLDAANAERRQGEAQFSQAMEEISQRAIEISRLSTLLENARSKIEELEADLSRGDKTDLSEVLDVARKEKDALEERVAELQDQCSRSQAELRRLRDQLSGLTEECKVVKNNAKCAVSHLEYRLEQLQRDKDKIAGEWQALEERVAELQVQCKCHQEDKAQLQSLLAETQRHLGDVQLKLGEAECRLDQETQLRRKEAEEWQQFQADLLMTVRVANDFKTEALSAREQLVLDNKTQKEKIRLLEQQLEKLTKQQMQQSETPQSVLSTVQREMEMATRRSKLSFSRQDSRLSVKTLIESIENNKAQGKADESESHYSSTSSLNSGTPDLGTTPIIFPPSSDWHESIRLPVLQSTNLHVNVGNEVGAGQGTNTSSGSGGDLASTTKATLPLRDQQQLAITSTQSQVQNVSQPSTPATPSSAGSSSSGGLPFGNVSKSFISGERKDPLNMLAKNGGSKRNALLKWCQNKTVGYRNIDITNFSSSWNDGLAFCAILHSYLPDRIPYDQLTPANKRRNFSLAFAAAESVGIGTTLVSFHGQQKLNLFILILI

SEQ ID NO: 31027 - DNA, 3769 bp, DROSOPHILA
cgggtgtttacaataaatttcgctgggtggatgtagctttgtaatttgagttcgccaattttttttgttgttaacagcatttcgaagcggttgccaaccctagacgctggctggttgcatggtaacgaaaaatggcggcgcctgttacacacactcacacacacatgcacgcacagtctgctgtgtttatgcacttcatgctgttccgattttttttttgcactttttcgatttgttgtctgcatttaccttaaatgaatttattaactaaggcgatattgtgcctctcgctcaatctcgcaaaacgatgctttgtctgctgcttctctgtgcgtgtgtccgtctctttccacggcttttcgtcgagactcacatatacaaacggcgacacactggattggagctggactccgttttggatggcttggctttggctgcgtacccaaaataaatcgcgcttgcagtcccaaatcattttagttcttgacgcctttgttccacaaaaacttccaaccgccgtccatggctcgtgctttctctttcgctcgcgagacgctccaaaagtcgcgagtatgggaagagaatgtatccctcgctctttcacgcctagaagcggctgtagcacacacaagcacacgtaaacccagccgtatgcatatacatatattccctctactagcgagacgtgtgtacgtgcgtatgtatgtatgcttttttcacttctttctcctctgcgttctttgcaccaagtgtcgctgttgctatttgctaccgccgctcctcttgacgaataagtcgggacttgtatcagctctaattcggacttagtttacaaaatgcggctgctttttttccgcgatactcggattagtgatgtaaaaagacgttgatgcttcgaccactgaagtcagtgcgatatgtatcgataattgaatgccatcgattgctacgattaaaactgccaccgcagttagcggagacgctcaccattctctattcgccatttgaaagtatcggtgtaatttgttttcagagaaattaatttccgtttactgtgcaattcggtgtgaaagtgttcagatttatcaatgcgtattctgctttcgacttcgccaccaatctgtgctgcaagttaccattaccaggtccacctggttcccgccagttttctttcattgtggctagttgttgttcgtgccttcgataaagacgtttagaggtgtttttagagtttcgccatctggtcactatagccgtttcgttttttacgtgagtattgtgaatttggtgtgttgatttatatctcagttggagcctgcgtggaaatagtgtcagtacgtttaaaggcatcatcgtaaggttagtcggaaaacaaataaaaagcctacaaatagcaagcaagaacgctttcgcaaccacaagaaaaacgaacatacgcacgcatccatctgtggtagagtcggcttgtgtgggggtgagtggatgtgtgggtgagcatttctggaaagtgccgttctctatgtttcgattctacttatcccttcatcaccatttcatcgttgaatcatcacgaaagaaacatcgaaagtgcacaatcgtttgttatctttgtacgaaaacaacggtgatttccacacaggcataacctgcaagagtaatacgatacaaattttgatctgatatgacctcattttagtcggtttgaattttaaagagagcgactctgcaaactgcagggatatgaacatacaaaattcacaaatgattgtttgcatcctagttgcttatattcatttacacgcatgcttatatgcttacatctgttatcaataattgacgacttggtgcatgcgaagcaaacgcattgaaatgactattgggatccacacactgttaaaaaacacactgattgcactgccacacatttctcaactagaacctaatgttttatactgaacttaactgcaggaaagcccaaaatgcccagcatcaagttgcaatcttcggatgaggagatctttgacacggatatccagatcgccaagtgctccggcactatcaagaccatgctggaggactgcggcatggaggacgatgagaatgccattgtgccgttgcccaatgtgaattcgacgattcttcgcaaggtgcttacctgggctcactaccacaaggacgacccccagccaacggaggatgatgagagcaaggagaagcgcacagacgacattatctcatgggatgcagatttcctaaaagtcgaccagggcacactgtttgagctgatattggcagcgaactatctggacattaagggccttctggagctcacctgcaagactgttgcaaacatgattaagggaaagactcccgaggaaatacgcaagaccttcaacattaagaaggacttttcgcccgccgaggaggagcaggtgcgcaaggagaacgagtggtgcgaggagaagtaaagcgcggcatttcgcgggaccaacattaagttgaaacagctaggggattcgggaacgaattggatttgcagcattgcaactttacttagttgctactttcatttacatttttttttatttttaaccccagcagagactcgatttaaattgtgtataaatgatctgttgctgatttgattcgcggggttcattttttgtcgtaaatatatctcatatacatacatatgcgagattgtaacactctctttaacctattggagtaacacttgatttcactttaataaatataactacccaacacaaagacacagcctattttgtgggcttcccggaggggttagggtccaaggacttctcaaattaagaagtgctctttattcgttatcttgtgtttagaaacgtttgcaagcgtttgaaatggatacgcatgccatttatggtccagtcggtaaaattttacgtgttcccaagaaggtacatatatatcttagattatcttatctatagaaactacattcataagatcacgctttcggcgaatagcgagtaatactgtagctgccactttgccacttagtgtgcaattgaaatgcgcgccaacgcatgttctcatatgcggagcgtttagcagcccttaaaaagcttttcatgttgcttttaaaaagctacgacgggtgtggaaattagatttgtgacgctttatatatcttttttttatatcgtctggggtacagcatggttttaggattttagaagaaagcagtaattttgtaagaatcgaagaacggggggatatttataattttcatattaaccttgtctttgtttgcttttgaaattatgaatacttcgaaagataattatcttgtgcgcattccattctggcttagactgggttgagctaaaaatgatttgaaatacaaatttttaggtgtccgctgatatataaacagtatgatgtttttgcacttttttccctgaagttttccttgttgtctcgcttgccaatgctgaacaaagtagccaaaggacctttacttgaagctttgagagcggaaaatatattcggggacaattgctttaagtgtgcactaggcttggctagatgcccgtgccaaactttctttggaattgatcgctggccttagccaaaagtggaaaaaagaaaggataggatagtgccgcacgtattaagggtcttcttacaaaaggtaactgatattaattcatttgcatactaagcaagctaactcatctgtttattgcaaacaagcgccaattgaagttttatcgaagctcag

SEQ ID NO: 31028 - DNA, 1059 bp, DROSOPHILA
ccatttgaaagtatcggtgtaatttgttttcagagaaattaatttccgtttactgtgcaattcggtgtgaaagtgttcagatttatcaatgcgtattctgctttcgacttcgccaccaatctgtgctgcaagttaccattaccaggtccacctggttcccgccagttttctttcattgtggctagttgttgttcgtgccttcgataaagacgtttagaggtgtttttagagtttcgccatctggtcactatagccgtttcgttttttacatgcccagcatcaagttgcaatcttcggatgaggagatctttgacacggatatccagatcgccaagtgctccggcactatcaagaccatgctggaggactgcggcatggaggacgatgagaatgccattgtgccgttgcccaatgtgaattcgacgattcttcgcaaggtgcttacctgggctcactaccacaaggacgacccccagccaacggaggatgatgagagcaaggagaagcgcacagacgacattatctcatgggatgcagatttcctaaaagtcgaccagggcacactgtttgagctgatattggcagcgaactatctggacattaagggccttctggagctcacctgcaagactgttgcaaacatgattaagggaaagactcccgaggaaatacgcaagaccttcaacattaagaaggacttttcgcccgccgaggaggagcaggtgcgcaaggagaacgagtggtgcgaggagaagtaaagcgcggcatttcgcgggaccaacattaagttgaaacagctaggggattcgggaacgaattggatttgcagcattgcaactttacttagttgctactttcatttacatttttttttatttttaaccccagcagagactcgatttaaattgtgtataaatgatctgttgctgatttgattcgcggggttcattttttgtcgtaaatatatctcatatacatacatatgcgagattgtaacactctctttaacctattggagtaacacttgatttcactttaataaatataactacccaacac

SEQ ID NO: 31029 - protein, 162 aa, DROSOPHILA; identical to SEQ ID NO: 26646

SEQ ID NO: 31030 - DNA, 2841 bp, DROSOPHILA
aaaatacaattttgtaattatggataacgaagcgtttccgacctataaagtatacatgtataaacatatgttcttgatcaggatcaatagccgagtcgaactggccatgtccgtctgaccgtatgaacgcctcaatctcaggaactataaaacagacagtcgcagcgcaagtttgttgacccatgtggcccagtttagtgtcgtccaacgctacgcgcgcacttttgaaaaatgttttgatatttttaaaattttgttataagtcctgtttgaattgcaaaaaactaattcccacgcccacaaaccgcccaaaactgccacgcatatacttttgaaaaatgttttgatttttcttcgattttacttttttgcaatttgatcggtataccataaacaaaacattaaaaattttgattaagataccaaaaggttatcgacacgaatcggaatcgttattgaattagacgagaaaatagtggtggagaaacatcgatgtttccgatttggcgaaaaatatcaaagtcttaaacatattctttaaacatgttgttctaaacatcgatgttttaaataaaaacaaaaaaattatctgtttaatttaaatattattttcttttttaatattgactaaataaaaaaggcagtattttaactaaacataaacttattgtcgtctacgtcttcatccctccttattcaggagttaaaaacttaaatttcagatatttatccacgtctttcaggacatcagccaacaccaccagcaagtcacactaaatttgcgatatgttattaataattctattaaaaaatatggaacttacaatttatacttacaatatatacacatatcttctccgatgtgcagtaaataccatcgataccatcgacgccatcgatgttggcatcgatgtttcgccacctttacgagaaaaagcggcggtcacactgcttgagcctcactgcgagtggttttctattaaaacgaaaaggatagggacagaaaagccaaaactacgttagttgtgaaaattgcatttgtgttgcgagagttttgtcaggataaataggtgtatttccaccatggaagtcgacgaggatggatacgaggttccctccagcagcagcaagggcgataagaagcgctttgaggtgaagaaggtaagtggtcagcaaaaaagcagggtcattgtcaatgaatgtactgatggtaacacttcatcctttccgcttcgccgaaaacagtggaacgccgtggctctgtgggcctggggtaagtagtaatgcgaattgtagtgctccgagtcgggggattaaccgcattccatttcgatgcagacatcgtggtggacaactgcgccatctgccgcaaccacatcatggacttgtgcatcgagtgtcaggcgaaccaggcgtccgccactagcgaggagtgcaccgtggcctggggcgtctgcaaccacgccttccatttccactgcatctctcgctggctaaagacgcgccaggtatgcccactggacaaccgcgagtgggatttccagaagtacggccactaaaatctacaaaacccccaagacccaccagatggagggagcagcacttcccgcaagctagatgatggaggcctgcttcatctggacatttgaatacctttttagatcttaagctagtggggcgattcgagtgaactggtagcctttaggagcacagttaccgatttccgagactccccgggaagcgcacctttttgtaacgcgttaaataaaagctgtagaagatggagaagactagacggatgtttctacctttcaccctttggagtctatattcactgtgacgatggcatcttaccgcgaaatccactagctagtcgtgcctaaattttcagagtatataactcatgactggcaaaaaatatgattgggtcattgggttccataaatgtagctctgcttagttatccttggatggcatttgaagaggatctggctagttcaaactagtttagttttgcttaactatatgcgtcatgaccagctccagatcaggttgttcagatatatgaaagtagtttcgtaaaaacaaatcaaaatcagtcgatgcaaagaaagagctgcgtttgtaaaaactaaatgttctttttagtttattatgaatgttttgcggccgcggcagcttagaaaataatacacattagttacagatatgaataaagtatatggtatatatcaaatatgattaatgtttaattgcataagctactaactaaacttataggtaaacaaaaaataattatgtcgttaaaaaatcatcgaatttgcttcgtgtgtgtgtgtggttgtgatggtttagttgtagttttctatctgtcgccttttaaaaaccaaatttcacagagaacaaaataaacaataagctggcaataaaacgaagggcagggagtgcgagttgttttggattcagattcatgtgaattaaaccagattgcatggtccgtcgaaccacttgaaccaccacttgtatcgagttgtatttagcgttttatttgaatcttctgttcaattgttttcgcttgctttataattaaatttcccgctttttggtttatatacattgttattgttatatgtatgtgaaagtgtaagctcctcctcctttcggtctcttcaaccagctcgctttgtagtaattaacattaagtttgtctcgtatatcttgtatatacaccatgcatatatgttattatttatatattgctgttctggttgccgctgctgcgctattgttttcttgttggctattgtggggtgggagtcccaagtatcctcgaatatgtgg

SEQ ID NO: 31031 - DNA, 692 bp, DROSOPHILA
cagaaaagccaaaactacgttagttgtgaaaattgcatttgtgttgcgagagttttgtcaggataaataggtgtatttccaccatggaagtcgacgaggatggatacgaggttccctccagcagcagcaagggcgataagaagcgctttgaggtgaagaagtggaacgccgtggctctgtgggcctgggacatcgtggtggacaactgcgccatctgccgcaaccacatcatggacttgtgcatcgagtgtcaggcgaaccaggcgtccgccactagcgaggagtgcaccgtggcctggggcgtctgcaaccacgccttccatttccactgcatctctcgctggctaaagacgcgccaggtatgcccactggacaaccgcgagtgggatttccagaagtacggccactaaaatctacaaaacccccaagacccaccagatggagggagcagcacttcccgcaagctagatgatggaggcctgcttcatctggacatttgaatacctttttagatcttaagctagtggggcgattcgagtgaactggtagcctttaggagcacagttaccgatttccgagactccccgggaagcgcacctttttgtaacgcgttaaataaaagctgtagaagatggagaagactagacggatgtttctacctttcaccctttggagtctatattcactgtgac

SEQ ID NO: 31032 - protein, 108 aa, DROSOPHILA
MEVDEDGYEVPSSSSKGDKKRFEVKKWNAVALWAWDIVVDNCAICRNHIMDLCIECQANQASATSEECTVAWGVCNHAFHFHCISRWLKTRQVCPLDNREWDFQKYGH

SEQ ID NO: 31033 - DNA, 3837 bp, DROSOPHILA
cacaaacgcaaaaggagcccttttgccccaatgatcttaaagcgatgctatgccacatgaccctttcccccaaccataccatacgtcgtggaaaactcgtggttttccgcgcaccttccccgaaaatccaggcatgactccttgtaaatgtattttattcccgaatccccattattgtcactatttttttcgctaggtgtaaggatcttattagctatacgagtagtaaagagtaaataacaaaacaatccggagtaagaacgaaaagtgaagcagaatggtatgcgcagccctttttaacaaacttttttaaattatataggataatttgttcaatagcgcgagtactacattgattaactagacgtacgaactcaaaataaatgacatcttttaagtaatgtgccatgcttaggttgctgggccgtcccggaggagcagaaagaaatgaatagctcttgaaagcgtgcgaaactacacctaaactctttagaaagcttttgcgtacttatcgatgctaaattctgaattggcttctcgaccatttttaatttagttcctacaaggtatatgtttacgtttacgcttaaattatgacatcttctgcgaattcgaactaaaaatagcagtatagcgcaattctaccttatatacacacttgccatcgaatctaatgtactaataatataaacggtcgaagaaataccggtggagattccatattcaatttctcgccagtggcgttttgttagatttccctatcaatttcgttggtaaaagaacgttgaccgttgaacgtttttgaattcctaaaaaaaccagggctgcattagtcagagcacagttggctacctggcagcccccgccgatccggtctggcaacactggtttaacaaaaacatactacacaaattacgttgttttgcatagcagaacaagcacattgaagcatttattgttttaaaaatcactacgacctgaataagggcatggattagccatgtcaaccgacgccgacctaaacaagtgcgtcagtcccatgtaccaggtgtcaaccgcaggcgacggcctccaagcagaagccgctggagatctggcgttggcctccattgtcgcagctccctcctattcctgcgagccacagaaggactccaccgacatggacgtggacatggagatagacaacgatcttaccactagcgaacggatgccaacggtggccgaacgttcaacggtcaacgttcttttaccaacgaaattgatagggaaatctaacaaaacgccactggcgagaaattgaatatggaatctccaccggtatttcttctttctattttgaattcctaaaaaaaccagggctgcattagtcagagcacagttggctacctggcagcccccgccgatccggtctggcaacactggtttaacaaaaacatactacacaaattacgttgttttgcatagcagaacaagcacattgaagcatttattgttttaaaaatcactacgacctgaataagggcatggattagccatgtcaaccgacgccgacctaaacaagtgcgtcagtcccatgtaccaggtgtcaaccgcaggcgacggcctccaagcagaagccgctggagatctggcgttggcctccattgtcgcagctccctcctattcctgcgagccacagaaggactccaccgacatggacgtggacatggagatagacaacgatcttaccactagcgaacggatgccaacggtggccgagctggagcagccgatggattccaaaacgaaacgggagaaaaaagaggaggaggagcagaaggacgcgcaggaccagaagccactggaggacggctccgtgcaaccgcccagcaatccgacagccatcaaaatcgaggaggaggacaagccagtgaagccgccgccgcagccgcaggctcaggaggaagtcgcgcccagttcgccggagacagcagcgaatcccagccagagaactgcgggcaagatcacccgtagcagtctaaatggcacagccaaccaggcgcccacccgctccccaacgataataaagcgtctgcgaaagagcacgcgcttcaaggccaagcaaacgggcaagggcactcccggaagcggcagtagccagtcaaatggccacaatagcggggcgaatggttccaccggcagctccgtgcacctcgcgggcgctggcgcccatcccagtaataccaacaagcatgggaagtccggtccagcgggcacaggcggggccactggagcccgtaatcgccgcgctctcttcaagaaaccagcacagaaaactcccaaggtgcaggcgagcaccaggttcgtgagaagccttttccacaagggcagctatatacaaatcggggatatcgtcagcattgtggacagcgagcagaatctgtactacgcccagatacgcggtctgcttgtggacgcctattgcgagaagtccgccttcctcacctggctgattcccacgcaggacagtccggatccccaggagggcttcgatccccctacctacctaatcggtatgtcagtcctgtcctcctgcctgctacccaaagttttttaaattgtatttttgcttaactcccgtgcctgcaggacccgatgaggagctgtcccggaagctctgctacctagagttcgtgatgcatgctcccagcaactactacttcgaccggagcaccccgtttcccctgccggacgtggatgagtacactgcccagagatcgggcggctacatctggacgcggctgccgatagtcaagcgggaaaagggcagtggccacaaagcgggcggtgcctcctagcagaagaggtggctcaagggcaggatggccggagccctgaatttgaaaaatctaatttattgcaacttttactcttcgtaaacgggctacttgccgaacagaaaataattcaaaaagtacttgatgtactgtagtaccaactgaactcaatcagcaattaatgaataaaatacaattttgtaattatggataacgaagcgtttccgacctataaagtatacatgtataaacatatgttcttgatcaggatcaatagccgagtcgaactggccatgtccgtctgaccgtatgaacgcctcaatctcaggaactataaaacagacagtcgcagcgcaagtttgttgacccatgtggcccagtttagtgtcgtccaacgctacgcgcgcacttttgaaaaatgttttgatatttttaaaattttgttataagtcctgtttgaattgcaaaaaactaattcccacgcccacaaaccgcccaaaactgccacgcatatacttttgaaaaatgttttgatttttcttcgattttacttttttgcaatttgatcggtataccataaacaaaacattaaaaattttgattaagataccaaaaggttatcgacacgaatcggaatcgttattgaattagacgagaaaatagtggtggagaaacatcgatgtttccgatttggcgaaaaatatcaaagtcttaaacatattctttaaacatgttgttctaaacatcgatgttttaaataaaaacaaaaaaattatctgtttaatttaaatattattttcttttttaatattgactaaataaaaaaggcagtattttaactaaacataaacttattgtcgtctacgtcttcatccctccttattcaggagttaaaaacttaaatttcagatatttatccacgtctttcaggacatcagccaacaccaccagcaagtcacactaaatttgcgatatgttattaataattctattaaaaaatatggaacttacaatttatact

SEQ ID NO: 31034 - DNA, 1467 bp, DROSOPHILA
atgtcaaccgacgccgacctaaacaagtgcgtcagtcccatgtaccaggtgtcaaccgcaggcgacggcctccaagcagaagccgctggagatctggcgttggcctccattgtcgcagctccctcctattcctgcgagccacagaaggactccaccgacatggacgtggacatggagatagacaacgatcttaccactagcgaacggatgccaacggtggccgaacggcatggattagccatgtcaaccgacgccgacctaaacaagtgcgtcagtcccatgtaccaggtgtcaaccgcaggcgacggcctccaagcagaagccgctggagatctggcgttggcctccattgtcgcagctccctcctattcctgcgagccacagaaggactccaccgacatggacgtggacatggagatagacaacgatcttaccactagcgaacggatgccaacggtggccgagctggagcagccgatggattccaaaacgaaacgggagaaaaaagaggaggaggagcagaaggacgcgcaggaccagaagccactggaggacggctccgtgcaaccgcccagcaatccgacagccatcaaaatcgaggaggaggacaagccagtgaagccgccgccgcagccgcaggctcaggaggaagtcgcgcccagttcgccggagacagcagcgaatcccagccagagaactgcgggcaagatcacccgtagcagtctaaatggcacagccaaccaggcgcccacccgctccccaacgataataaagcgtctgcgaaagagcacgcgcttcaaggccaagcaaacgggcaagggcactcccggaagcggcagtagccagtcaaatggccacaatagcggggcgaatggttccaccggcagctccgtgcacctcgcgggcgctggcgcccatcccagtaataccaacaagcatgggaagtccggtccagcgggcacaggcggggccactggagcccgtaatcgccgcgctctcttcaagaaaccagcacagaaaactcccaaggtgcaggcgagcaccaggttcgtgagaagccttttccacaagggcagctatatacaaatcggggatatcgtcagcattgtggacagcgagcagaatctgtactacgcccagatacgcggtctgcttgtggacgcctattgcgagaagtccgccttcctcacctggctgattcccacgcaggacagtccggatccccaggagggcttcgatccccctacctacctaatcggacccgatgaggagctgtcccggaagctctgctacctagagttcgtgatgcatgctcccagcaactactacttcgaccggagcaccccgtttcccctgccggacgtggatgagtacactgcccagagatcgggcggctacatctggacgcggctgccgatagtcaagcgggaaaagggcagtggccacaaagcgggcggtgcctcctag

SEQ ID NO: 31035 - protein, 488 aa, DROSOPHILA
MSTDADLNKCVSPMYQVSTAGDGLQAEAAGDLALASIVAAPSYSCEPQKDSTDMDVDMEIDNDLTTSERMPTVAERHGLAMSTDADLNKCVSPMYQVSTAGDGLQAEAAGDLALASIVAAPSYSCEPQKDSTDMDVDMEIDNDLTTSERMPTVAELEQPMDSKTKREKKEEEEQKDAQDQKPLEDGSVQPPSNPTAIKIEEEDKPVKPPPQPQAQEEVAPSSPETAANPSQRTAGKITRSSLNGTANQAPTRSPTIIKRLRKSTRFKAKQTGKGTPGSGSSQSNGHNSGANGSTGSSVHLAGAGAHPSNTNKHGKSGPAGTGGATGARNRRALFKKPAQKTPKVQASTRFVRSLFHKGSYIQIGDIVSIVDSEQNLYYAQIRGLLVDAYCEKSAFLTWLIPTQDSPDPQEGFDPPTYLIGPDEELSRKLCYLEFVMHAPSNYYFDRSTPFPLPDVDEYTAQRSGGYIWTRLPIVKREKGSGHKAGGAS

SEQ ID NO: 31036 - DNA, 3256 bp, DROSOPHILA
gatggcgactgcgatcgtcacgtggagcacttcctgaacggaaagaccgacgtgcagactttcctcaacacgtaccagtggtcgaagaagatcagtaccgagcgcaaggccaaagaggagcgcctgggcacccagctcagtgctctggagcgggccggtatctaggattgccgtgacactccctggccgtgccatccagagcacggtcctcccactcctcgcactcctcccacaccgccacgatccgcgtcgcaatagtagagaatatcaatgttagtaaatagagaagttaagccagagatggggcgacataatcatggcacacacggccacgcattcccagaacagaaagcaaaaccttgttgaagtaataagaaggtgcactagttgttcgtttcccaagatcgtttacttgggaagagggtcttgttattctatccgtaccccgaaacgaagcactatgtgcaacagaacgcagtccggaatcgcatgtattacctatttactttttttccttttggttaatcgtgagccccatccatatattctctccatatatacatatatattaaaaaaaaactatgctttaaatgatgccgtctctttctatttaagggaaaggtttttcaaaacaatggtttttggaatgatttttgttttgatttgaataaaatcgaaccgcaaaggataacacaaccttattagtttgaaataattttattatattgaagaataataatgcttaataacagatatataaaatttcttttttcaacagtggcttgtgctagtatcttaatttagtttgcataagctaaaagcaattaaacaaacataactacgttttctccattattattcatatgtacatatattactaagcattccaattgttaaaatcgaaaacaatcgaaagtttcgttctacatcattcgttcgaaatatgaatgatccggttatcatggtatttttttggtattttagctatatagttcgccgatttatcggccgtacctcttccccgatctcggccagaagcggactgggccagttggctgatagtgctcgttcggctgccccgctgtcgcccttcccctcctccaccgaggtcaagtaatctcgagtgataagcggcagtgaactctcgtctctgcttctccattccacaagaaactataaataacagactacccacaagagactagtgcaattgcagcaatggcccaaacggaagtgctggtgttcggctcggccatcattgactttataaggtaggtgggcagagaaggctcgatcccaaggagaatcttacaaatacaacaccttttccagctacacgacccgtctaccgaaagccggagaaacgctccatgggcatcgctttcagattggctacggcggcaagggcgccaatcagtgtgtggctgccgcgcgccagggatcccgaacagctctggtggccaaactgggggcagacacattcggcagcgactacctgagacatctgcgcgaggagcgcgtcaatgtaaaccacgtcgagcagctggcggaggaaacgacgggcgtggcccagatagccgtgtcagatggcggcgagaacaacatcatcattgtggtgggcgccaacaatcgactgagctcgtgtgacgtttcctcggcgaaggcgctcttccaggaagccaaagttctggtgtgccagctggagacgcccgttgaggccaccctgaccgctctgagagccttccggggcgtgtccatcgtcaatgcggctccggccatggccgacacaccccccgaacttcttcagttggccagcatcttctgtgtgaacgaaagcgaggcggcactgatgactcagatgcccgacattggcaacatagagtaagtgcgagtaagcgtaaaccagtcgtactgccaactaaatcgggtcccacttctgccaggcacgccgaagatgcggttggaaagctgatagcggcaggtgccaacacggtgatcataactctgggcaaactaggagccgttttcggttccgccgactccaagggcgtgtgccagcatgtggctgcgccgagtgtgccgcccgaaaaagtggtggacacgacgggggctggagacgccttcattggggccttggcccacaacttggcccgtcatccaacgaggaaactggaggagcacatagccgccgcctgtgccgtggcctcgcaatccgttcagctacccgggacgcagtcgagcttcccacacgcttagagggaaatccccaaaagaatgcaacgcaacaataaatctctatcctgacgtacaatgatctatttaatggtaatcgtaagtataaaaagattatggtccacatgggtgtgcttcggctggcaattcagcgtccagaatccagtgggttgcggactacagatggaggcgtggcagcttcacttctttcccgacttcttgatgccgcctcctacgagaggacccttctttgaggcgttcgccttggccgcctccagagccttctgctgctccttctgcttttgcttgaaggccatgtcgtcctcgtccaggtctttggagtccttcttcggcgccttcagaggcttcttcttaccgccctcgcgtccagacatacttgctcgcttatactgcgtgggaggaaaaatctatgaaaatcgggttggattccacaacaaaaagtcacgcacctttttcacacgtttttccgatttccgctgcacgataaccacgagaacaatcgatagcttcgcgctttcgattggctgtgcgtgttatcggaactggacatatatttcaattaattgatgaaattataagaacaaatttatatgaaattataattatgttgtttctaaaaatcgcttctcgaagcgaacttaaagtcatccttaacagcaatgtgtaccagccaaaataaaaaaatgtcgattttgtcgatggaattttaatgacttttcggaaaaaaaaacatagataagttgaaaaatattaaaccactaactattcaactaattcaaaaggaagaggaatttaccatcgatttcttgagcgacctttacaaaagcgatgtatcgatgaaaaatcgattggaccagctcgtcgataaagttgttgtttgctccaggtttacttttaatttcaaattcaactaatatccgggattaagagtgtaaatcctgtcaggaaaaccatgctaaggccccagtcatcagtgcctgcgcctcagccgcctggcaagcga

SEQ ID NO: 31037 - DNA, 1133 bp, DROSOPHILA
tttatcggccgtacctcttccccgatctcggccagaagcggactgggccagttggctgatagtgctcgttcggctgccccgctgtcgcccttcccctcctccaccgaggtcaagtaatctcgagtgataagcggcagtgaactctcgtctctgcttctccattccacaagaaactataaataacagactacccacaagagactagtgcaattgcagcaatggcccaaacggaagtgctggtgttcggctcggccatcattgactttataagctacacgacccgtctaccgaaagccggagaaacgctccatgggcatcgctttcagattggctacggcggcaagggcgccaatcagtgtgtggctgccgcgcgccagggatcccgaacagctctggtggccaaactgggggcagacacattcggcagcgactacctgagacatctgcgcgaggagcgcgtcaatgtaaaccacgtcgagcagctggcggaggaaacgacgggcgtggcccagatagccgtgtcagatggcggcgagaacaacatcatcattgtggtgggcgccaacaatcgactgagctcgtgtgacgtttcctcggcgaaggcgctcttccaggaagccaaagttctggtgtgccagctggagacgcccgttgaggccaccctgaccgctctgagagccttccggggcgtgtccatcgtcaatgcggctccggccatggccgacacaccccccgaacttcttcagttggccagcatcttctgtgtgaacgaaagcgaggcggcactgatgactcagatgcccgacattggcaacatagagcacgccgaagatgcggttggaaagctgatagcggcaggtgccaacacggtgatcataactctgggcaaactaggagccgttttcggttccgccgactccaagggcgtgtgccagcatgtggctgcgccgagtgtgccgcccgaaaaagtggtggacacgacgggggctggagacgccttcattggggccttggcccacaacttggcccgtcatccaacgaggaaactggaggagcacatagccgccgcctgtgccgtggcctcgcaatccgttcagctacccgggacgcagtcgagcttcccacacgcttag

SEQ ID NO: 31038 - protein, 304 aa, DROSOPHILA
MAQTEVLVFGSAIIDFISYTTRLPKAGETLHGHRFQIGYGGKGANQCVAAARQGSRTALVAKLGADTFGSDYLRHLREERVNVNHVEQLAEETTGVAQIAVSDGGENNIIIVVGANNRLSSCDVSSAKALFQEAKVLVCQLETPVEATLTALRAFRGVSIVNAAPAMADTPPELLQLASIFCVNESEAALMTQMPDIGNIEHAEDAVGKLIAAGANTVIITLGKLGAVFGSADSKGVCQHVAAPSVPPEKVVDTTGAGDAFIGALAHNLARHPTRKLEEHIAAACAVASQSVQLPGTQSSFPHA

SEQ ID NO: 31039 - DNA, 6320 bp, DROSOPHILA
gggcttgttgttgctcaatgcaaagatgagttcagtttaaaccgttaaacacgagaacaaaaaatggagcaaagcagcgaccacaaatttacgaggataaccccacgaagagattggcaataaactgctacagtgttcagaaattcgcaattgcaagtaagaatcgattggaaactaatcgattttgtgatttactgattttggcattttgaatagggtcaagtcagcttgtttcccgcgatcggtctcactattttactgtcattgcaatttggaaattttaagggttctgattgcacttctcgctgacctcaaacaaatcaagtaaatattcttttttttttgctgttatatgtcacgttccatcgaagctgatggaagagcggcgtccttgaggtgtctaaccctgaactggaaatctccgttttgctatttattttgcagagaagacaatcaaaatgcttttcgatggcgcaaccggcaatgggcacggtcagggccagaataccctgaatccattggggccaggccaggaggagcccgccctatgcgagcagtactatctgctgggcgatggttccatcattctgcgcaaccattccatcgacttgtcgaatccgcccctgaaatcgcgctgctgccagctcccaacactcatccacgacatatgccgtcaactgcgtgatggatctctgcgagggagtgtggctactcctgcggcgagtgcgccaagtttatttgccgcaactgcgtgactttattgtgagttaagtcccagaaggaagaagcatccccctagggaaacccgttagtttaaaaatcaatcgaccatcatcttatttccagtggtaatcgaattgaagaagaggaggctccgctgtgcgagcactgccagatgttcctcagctagggcatcaaacaatcaagcaaatgtcaaatgtattacgttttaaagaatatagagctatatagtatttaacattaagcaaaaatctttgatctattctttggaatgctagaaaacttaaatcatgaccttgagttggccaatggcgtttccttaacgtaaaacacaccttttcgaacagcgtcgtgggcctttcggttgctaccatttggcgaatggtgaagataagcaggaagggtgcgacttttcacggccagtgcctgcgtggcgcgcactgtggccattacagtggccagtttcagacccaagtccgccaaaccatccacctccgtttcacttatgtcctgtgtcagctttctttccgcgcgatagctaatgatggcctggattagatcctgccacaggacactgagctaggctgatcggggtgacatcaggttactgtgttgtgctgttacaatcaggttgtctgtgctgccaactgccgccgtggctgatcaaagtgcttgatgtctatatccaacatgctgctaagaaggcaatccagggactctcctgtgagagggaccgtacgattcccagccagattgcgctgggcctccaggagtcgaagggcatgaccagaatatgccaagtctttgggttccggtagacgcagtgcaacactcacactgatcacctcgagaatgctcattaagcatctaaagagaacattattaactatggaaccgaggacaaggtgctggagaagactcaccgctcccttcacgctgctcaacgagcatttggcaaagagagccaaaagggttagcacattctggagcgccgtgtgctccgtttgcgacgcagggcgtgccatttgctccacttgtgaggaaagacggtgcaggagcagtaggaaatcctcgttagtcttatagccaatgatcagcttaatggccggctccagacaatccagtgctgaactggaaaatgtgtcgcccacctcaatgtctgtattcaattgcctccaatagctgcttagcacgaactctatctcatccggatccaaatgcaaacgttgacgatgggtgagcgccacattcagcaagcgtgtcgcattagcatcgcgatagttcaactaaaaatatagcaatattgttgtttggtttgttcaatacttataaacacgaaaagcacccaccgagtgaccaatgtatatcttacagatacgtcgaaagttttcatctatgagtttcggctgcctctgctttccattgtcctccaactcctgaatcttcgctgtctctggatccctatttttcttcttgtggtctacttttggctcagccttcgttttttctgaactctccgactcatttctcttcttctgctcttcccgctcccacctgactacgctatttatgcaattgctcacgtaagttgcataacctgatagcgtgctatccacgaactccttataagcagacgcctcctttttcttggagcgaaacttgtgagtcaccatttcgccatagatctgaataagtggctgtagctggccttgcaatcgcctgccctgagctccagttacactgctaagtgtttcgatggccagcagcaaaagacgacgctcttccgctggcaatttgtttaacgcagccagttgatccttaaaaaagcccgtgcaacttgcaagaaatgcttcactaccggcaccctgtcggcgaatgcaacgtgcaaaaagtgtttcgtagaagctccaacccaccgtcgagctggtggggataaggcaaagcagttcgcttagccgcgggaagtagctgcatatgggaagcggatggccgaaatgcataagatctgcaagcaagtagtttatccaacaaatgagtttgaagtataaattcgattaaattatttacctattagtagctccagaatctgattggcgttctcctcctgatggctaagactgagatccctgtatagaacaaagatcaccagccaaaggcgcgatcgaatgttacggggcaactgagccaatggaaggccctgcagagtcttgaccagtacctgggctgggggcaaatgcaagtcaatttccaccgacgcgttatcccttaggaattgtgtcagcgagttctcctccacctgctcttccagtttcagtttcaccaatagtgaccccttggccttcgcttctttggcctctgctccatattccttaagcagctgcaatgtaaggatctcaatgctctccgaatcatttagatggggttccaagctttgattatgtttcctttgatgcaaacggagctgcttctgtggtctggaaagccgaaagagttgatacggtgggactaactcagccagggcatccgaacaattggctcccctttgatccttcagcaaccaaccactctcaacaagctgcagctccaaacgctgcaatctcagccggcagcagttcttgccaaagttgtacaccctttgctggatcaacgtccactcggcggtgggcaggaaacccctcagctggactggccgctggctggcggggaaaccatctggccagtagtacgccaatagaagctcaaaaccgctggctctctcagtgcactccagaaaggcattcataagccggcggttgtgctcttggcgtagtaaaagccgtccgaactgctccaggacctggcaagtgtgctgtagttgttgctccacttgcagctgataaagttgcacttgctcagccagtcgagtgccgtttaagtattggcaaaggagcgcagcatgcagttcccgagcaaagtccaggttttcgggcagcacttctttcggctgatcctcctcaagcagctccgcgaaggaatgcaacagacttttccaaatcaccagagatggtttgctcatcaggttgctaattaaacgagtgaaagccacaccggctgagtggcttggccacgtttggcacagctgcttgaaagcgtcattggccgaaggagctgtggctaaaggggttctattaaaaattatgcctagaaagcgctcctccaactgatggccttcagcttcaataattttagagtcctggatgcgtcgcttcttagcttcattagggggaacatccaaagtgtactttcccaaccatgctcctaggaccttgaggagattgatgatgaaccgctctgcgcgactaagacggcgaaacatgtccagcagtagaataaggtactccgaatacagctcctccacttgggcattctccttgggagtcgtgagcatccaaacggttatctggtaaacactctgctccagcaggagaggattataccgcaacgcagaacagagaagtattaaaacctcttttaagttggacttcttgtactcgcgcaccaaacgcagcagctgatcagaaacataggcaaacgcggtgatcgatagattttccaatttaaactgcagggatacattgtatttacgcagtgacataaggaaatgggcggtcagttgaagcgatgactgcgataatgcctccgtgttaaatatacacagtaagatggtgctgatgttagctgtttggaagcgattattcaggacactagcctccaaaaggatcaggctgacatgcagcggaaggtccttaatccgtgtgatgtcaaactccgccttgatttgcttttccagctcggccagttcgtctaggcatgaagtttttaaggtcagatgcagctccacaagaggacgaacagttttcgaattgtactcttctaaaagcttttcaggctcctgagagcggcgaaccatctctgtcagctgcttgatcacaggaactacaaactctgcatcccagtggtcttggctctcagtccgatccttgttatccttgcgaagttcgacgcacttttgatggcatctgaacaggctgccatagcattcgaatagaagcttgttgctggaccgcaaggcatcctggagcagctcagaactgagaaccatgggcaggacttccagtgccgactcgtttgcgttctcctcccgggagacaatctcgtagagagcgtgaatcaactggcatttcgttgtctgagtaacccagccaggctgcgccctcagcctcaggaaatccttgagttgttggaagggtaaatccttgcacccacccaatgatttcgccagccagtcggcgatgacctcgtacttattgaggtaggggaactccacggactgccataccttcagagcgaactcaacacgtgccgcgaacggcttgttcgtttcagtcagccaggacttcagcgctgcaaatggacgtggagcttactgacctggtccatcggaacggtattataaagcacttaccctcgcctgtgtccatgttgcctcgtccagtgaagtacaaaaaaatgcaatctcaaatcgaaatttattttactgcggcacgtgcggaataaacaaaaaatttatcgatacaccgatgcgatttcgatatcgatttgcgatatgcgtaagcgctgtttgtagctgttgtagctacgtcaaatctggctattttatagccgctacagaaacacattctattttgagttcttggcccaattggatattaatatggttaataggtagccataatacctcggtggctttgtaataaaataccaacagatttggcaagtggtgagatttggtagtgttttcgcttcatatcaagctaaatttggacatttttagctatttgtcaaaaacactgctggaacagctgatcgtccaccaccgagaaagaagcagagcaccgttacagattcgtgttgtttattttataattcgaatcattttaaaaaatccactgtttttttttgtacatttctgaatgagacaagaatcacaatgctgttaaactgtacgaggctcacacacctctgcacgactctccgggtcaggaaaagcagccaaataaggttgtccacatcatataatcaccatttgggcaggtgcctccaccatcgaaccgcccggtcgcttcaacacagccttccaccgccgaaccgttaccatagccacctgcacccaacactccgcatgccgtggtggtgcatgcgacgtggatttgcacagagcagcaagtggttagccaggaatgcaaaggcgaacttaccaactgcagttggagccggaatcgtgcccgcccccgtcaaaatgggcagatcccagtacggccgcctgctcagcctgactaaatcggagaaatgggtgctgacaggttactagcatacaacgcattttgaaatttcccaaatccttatgttctttatttctcagcgggcattggctgtctggtagtttcttcagctatcaccatgtcggttcctctgttcctgggcaaggtcattgatgtagtctttaataaatcgggcatggatagcgcagccatggccaa

SEQ ID NO: 31040 - DNA, 3772 bp, DROSOPHILA
cagtaaaataaatttcgatttgagattgcatttttttgtacttcactggacgaggcaacatggacacaggcgaggcgctgaagtcctggctgactgaaacgaacaagccgttcgcggcacgtgttgagttcgctctgaaggtatggcagtccgtggagttcccctacctcaataagtacgaggtcatcgccgactggctggcgaaatcattgggtgggtgcaaggatttacccttccaacaactcaaggatttcctgaggctgagggcgcagcctggctgggttactcagacaacgaaatgccagttgattcacgctctctacgagattgtctcccgggaggagaacgcaaacgagtcggcactggaagtcctgcccatggttctcagttctgagctgctccaggatgccttgcggtccagcaacaagcttctattcgaatgctatggcagcctgttcagatgccatcaaaagtgcgtcgaacttcgcaaggataacaaggatcggactgagagccaagaccactgggatgcagagtttgtagttcctgtgatcaagcagctgacagagatggttcgccgctctcaggagcctgaaaagcttttagaagagtacaattcgaaaactgttcgtcctcttgtggagctgcatctgaccttaaaaacttcatgcctagacgaactggccgagctggaaaagcaaatcaaggcggagtttgacatcacacggattaaggaccttccgctgcatgtcagcctgatccttttggaggctagtgtcctgaataatcgcttccaaacagctaacatcagcaccatcttactgtgtatatttaacacggaggcattatcgcagtcatcgcttcaactgaccgcccatttccttatgtcactgcgtaaatacaatgtatccctgcagtttaaattggaaaatctatcgatcaccgcgtttgcctatgtttctgatcagctgctgcgtttggtgcgcgagtacaagaagtccaacttaaaagaggttttaatacttctctgttctgcgttgcggtataatcctctcctgctggagcagagtgtttaccagataaccgtttggatgctcacgactcccaaggagaatgcccaagtggaggagctgtattcggagtaccttattctactgctggacatgtttcgccgtcttagtcgcgcagagcggttcatcatcaatctcctcaaggtcctaggagcatggttgggaaagtacactttggatgttccccctaatgaagctaagaagcgacgcatccaggactctaaaattattgaagctgaaggccatcagttggaggagcgctttctaggcataatttttaatagaacccctttagccacagctccttcggccaatgacgctttcaagcagctgtgccaaacgtggccaagccactcagccggtgtggctttcactcgtttaattagcaacctgatgagcaaaccatctctggtgatttggaaaagtctgttgcattccttcgcggagctgcttgaggaggatcagccgaaagaagtgctgcccgaaaacctggactttgctcgggaactgcatgctgcgctcctttgccaatacttaaacggcactcgactggctgagcaagtgcaactttatcagctgcaagtggagcaacaactacagcacacttgccaggtcctggagcagttcggacggcttttactacgccaagagcacaaccgccggcttatgaatgcctttctggagtgcactgagagagccagcggttttgagcttctattggcgtactactggccagatggtttccccgccagccagcggccagtccagctgaggggtttcctgcccaccgccgagtggacgttgatccagcaaagggtgtacaactttggcaagaactgctgccggctgagattgcagcgtttggagctgcagcttgttgagagtggttggttgctgaaggatcaaaggggagccaattgttcggatgccctggctgagttagtcccaccgtatcaactctttcggctttccagaccacagaagcagctccgtttgcatcaaaggaaacataatcaaagcttggaaccccatctaaatgattcggagagcattgagatccttacattgcagctgcttaaggaatatggagcagaggccaaagaagcgaaggccaaggggtcactattggtgaaactgaaactggaagagcaggtggaggagaactcgctgacacaattcctaagggataacgcgtcggtggaaattgacttgcatttgcccccagcccaggtactggtcaagactctgcagggccttccattggctcagttgccccgtaacattcgatcgcgcctttggctggtgatctttgttctatacagggatctcagtcttagccatcaggaggagaacgccaatcagattctggagctactaatagatcttatgcatttcggccatccgcttcccatatgcagctacttcccgcggctaagcgaactgctttgccttatccccaccagctcgacggtgggttggagcttctacgaaacactttttgcacgttgcattcgccgacagggtgccggtagtgaagcatttcttgcaagttgcacgggcttttttaaggatcaactggctgcgttaaacaaattgccagcggaagagcgtcgtcttttgctgctggccatcgaaacacttagcagtgtaactggagctcagggcaggcgattgcaaggccagctacagccacttattcagatctatggcgaaatggtgactcacaagtttcgctccaagaaaaaggaggcgtctgcttataaggagttcgtggatagcacgctatcaggttatgcaacttacgtgagcaattgcataaatagcgtagtcaggtgggagcgggaagagcagaagaagagaaatgagtcggagagttcagaaaaaacgaaggctgagccaaaagtagaccacaagaagaaaaatagggatccagagacagcgaagattcaggagttggaggacaatggaaagcagaggcagccgaaactcatagatgaaaactttcgacgtatctgtaagatatacattggtcactcgttgaactatcgcgatgctaatgcgacacgcttgctgaatgtggcgctcacccatcgtcaacgtttgcatttggatccggatgagatagagttcgtgctaagcagctattggaggcaattgaatacagacattgaggtgggcgacacattttccagttcagcactggattgtctggagccggccattaagctgatcattggctataagactaacgaggatttcctactgctcctgcaccgtctttcctcacaagtggagcaaatggcacgccctgcgtcgcaaacggagcacacggcgctccagaatgtgctaacccttttggctctctttgccaaatgctcgttgagcagcgtgaagggagcggatctaatccaggccatcattagctatcgcgcggaaagaaagctgacacaggacataagtgaaacggaggtggatggtttggcggacttgggtctgaaactggccactgtaatggccacagtgcgcgccacgcaggcactggccgtgaaaagtcgcacccttcctgcttatcttcaccattcgccaaatggtagcaaccgaaaggcccacgacgctgttcgaaaaggtgtgttttacgttaaggaaacgccattggccaactcaaggtcatgatttaagttttctagcattccaaagaatag

SEQ ID NO: 31041 - protein, 1227 aa, DROSOPHILA
MDTGEALKSWLTETNKPFAARVEFALKVWQSVEFPYLNKYEVIADWLAKSLGGCKDLPFQQLKDFLRLRAQPGWVTQTTKCQLIHALYEIVSREENANESALEVLPMVLSSELLQDALRSSNKLLFECYGSLFRCHQKCVELRKDNKDRTESQDHWDAEFVVPVIKQLTEMVRRSQEPEKLLEEYNSKTVRPLVELHLTLKTSCLDELAELEKQIKAEFDITRIKDLPLHVSLILLEASVLNNRFQTANISTILLCIFNTEALSQSSLQLTAHFLMSLRKYNVSLQFKLENLSITAFAYVSDQLLRLVREYKKSNLKEVLILLCSALRYNPLLLEQSVYQITVWMLTTPKENAQVEELYSEYLILLLDMFRRLSRAERFIINLLKVLGAWLGKYTLDVPPNEAKKRRIQDSKIIEAEGHQLEERFLGIIFNRTPLATAPSANDAFKQLCQTWPSHSAGVAFTRLISNLMSKPSLVIWKSLLHSFAELLEEDQPKEVLPENLDFARELHAALLCQYLNGTRLAEQVQLYQLQVEQQLQHTCQVLEQFGRLLLRQEHNRRLMNAFLECTERASGFELLLAYYWPDGFPASQRPVQLRGFLPTAEWTLIQQRVYNFGKNCCRLRLQRLELQLVESGWLLKDQRGANCSDALAELVPPYQLFRLSRPQKQLRLHQRKHNQSLEPHLNDSESIEILTLQLLKEYGAEAKEAKAKGSLLVKLKLEEQVEENSLTQFLRDNASVEIDLHLPPAQVLVKTLQGLPLAQLPRNIRSRLWLVIFVLYRDLSLSHQEENANQILELLIDLMHFGHPLPICSYFPRLSELLCLIPTSSTVGWSFYETLFARCIRRQGAGSEAFLASCTGFFKDQLAALNKLPAEERRLLLLAIETLSSVTGAQGRRLQGQLQPLIQIYGEMVTHKFRSKKKEASAYKEFVDSTLSGYATYVSNCINSVVRWEREEQKKRNESESSEKTKAEPKVDHKKKNRDPETAKIQELEDNGKQRQPKLIDENFRRICKIYIGHSLNYRDANATRLLNVALTHRQRLHLDPDEIEFVLSSYWRQLNTDIEVGDTFSSSALDCLEPAIKLIIGYKTNEDFLLLLHRLSSQVEQMARPASQTEHTALQNVLTLLALFAKCSLSSVKGADLIQAIISYRAERKLTQDISETEVDGLADLGLKLATVMATVRATQALAVKSRTLPAYLHHSPNGSNRKAHDAVRKGVFYVKETPLANSRS

SEQ ID NO: 31042 - DNA, 2662 bp, DROSOPHILA
tctttgtgtctttacacaaaaggtggccaaaatctactccgggaaagtgaacaaattccgcacggctggcaaccctggccgatagtcaataaatatcgatagttgttggttatgggtattttgaaataaaaaaattctacctttcttattttaattacctaaaacaaaattttttttaaataaaattggctatataaatgtttcagctaaaactacgagcgagcagacaagcatccaattcaaatccatagttatacaaatatatatatatatatatatatatatatattatacaaatgtaataaattttatattttcagtcattttaatctgataaattaaaaatgctggactattccaaacagctcataaccagaaacattttgaattttccgcctaaccgcaaattcgatcgatagacgataaaaaaattgatcgcagtcggcgcttttgtatgtattttttaatatggtagcactattctaataaggcaatattgttagcaaaacgggacactgattaactgttagcctgcaagttaggaaacctgaaagtaaaggattttcaattgatatttcaagacgttcctatccgatctgcccaacaatctgccagtatctcatcatggaaaaccaggtccgtaaaaaggcggcaaaacgatcgcgatcagcggatggcgacgccaacaacaatctcacgcagcggaaggtatttgtgaaccagaaaatgtgcgactcccgtgatcctcggaagatgaaggaggtccatggtatgtaaattgccttattcgcaccaacttatcttgtttcgatcctgtaatggaggggtgggagattggagagatagcgccgctcagagcgcagttatcccggacttgttgctcacttcagtttgaacagttagacgcgagaacaaaaaattgagcaaagcagcgacctctaatttacgatgaatttacgcataaatttttttttttaatttttttcttgctgttcttttgcacgtcccatcgaagctgagtgtctaaccctcctttaagtgtctaactcaactggaactctccgattttctatttctttcgcagagaagacaatcaaaatgcttttcgatggcgcagccggcaataggcagggtcagggccagaatgccctgaagccattggtacaaggccaggaggagcccgccctatgcgagcagtactatctgcttggcgatggttccatcgttctgcgcaaccttcgcaccgacttgtccaatccgcgcctggagagagtgaaatcgcgctgctgccagcgccaaacgctcatccacgacatatgcgtcaactgcgtgatggatctctgcgaggagtgtggctactcctgcggcgagtgctccaggttcatttgccgcagctgcgtgactttattgtgagttaagtccttaaaagaagcatcccccttgggaacaccttttatttgaaaatcaatcgaccatcatcttattttccagtggtaatcgagttgaagaagagaaggatcccctgtgcgagcactgccagatgttcttcagctaaggctttacacaatccagcacttataaagtcgcggtgcttgttaaattttaagttctgaagcagtacaaatttgggacgacacaatgtcaaatgtattaccaaccagctccgtttcacttatgtcctgtaactgctttctttccggccgatagcctggatgagatcctggcacaggagactgggctgggctgctcggtctgacatcaggttactgtgttcttttaacagcacaatcaggttgtctgtgagtgcattatacagatccacaaatagctgccaactgccgccgtggctgatcaagtacttgatgtctacatccaacatgctgccaagaaggcaatccagggactctcctgtgagagggaccgtacgattcccggccagattgcgctgggcctctaggagtcatagggcatgaccagaatatgccaagtctttgggttccggttgaaatggtcattaaggatctaaagagaacattattaactagggaaggagaataaggtactggggaagactcaccgctcccttcacgctgctcaacgagcatttggcaaagagccaaaagagttagcacattctggagcgccgtgtgctgcgtttgcgacgcagggcgtgccatttgctcctcttgtgaggaaagacggcgcaggagcagtaggaaatcctcgttagtcttaaagacaatgatcagatatgtcggaagcattcatctatccctagttcgtctaggcatggagtttttaaggtcagatgcagccccacaaaaggacgaacagtttgcgaattgtactcttcttacagcttttcaggcccctgagagcgtcgaatcttagtccgatccttattatccttgcgaaattcaacgcgccaagcattcgaatagaagcttggtgctggaccgcagggcatcctggagtagctcagagctgagaccatgggcagacaatcttgaacagaaatggccgacccccgcagaccacgaaagatgaagagggtccttggtatggaaagcattgtcccacttgcaccaactcacctactctccttcctgtaatggagcgggtgggagatcggagagacagcgccgctcagagtgcagttatg

SEQ ID NO: 31043 - DNA, 580 bp, DROSOPHILA
cacgtcccatcgaagctgagtgtctaaccctcctttaagtgtctaactcaactggaactctccgattttctatttctttcgcagagaagacaatcaaaatgcttttcgatggcgcagccggcaataggcagggtcagggccagaatgccctgaagccattggtacaaggccaggaggagcccgccctatgcgagcagtactatctgcttggcgatggttccatcgttctgcgcaaccttcgcaccgacttgtccaatccgcgcctggagagagtgaaatcgcgctgctgccagcgccaaacgctcatccacgacatatgcgtcaactgcgtgatggatctctgcgaggagtgtggctactcctgcggcgagtgctccaggttcatttgccgcagctgcgtgactttatttggtaatcgagttgaagaagagaaggatcccctgtgcgagcactgccagatgttcttcagctaaggctttacacaatccagcacttataaagtcgcggtgcttgttaaattttaagttctgaagcagtacaaatttgggacgacacaatgtcaaatgtattaccaaccagc

SEQ ID NO: 31044 - protein, 124 aa, DROSOPHILA
MLFDGAAGNRQGQGQNALKPLVQGQEEPALCEQYYLLGDGSIVLRNLRTDLSNPRLERVKSRCCQRQTLIHDICVNCVMDLCEECGYSCGECSRFICRSCVTLFGNRVEEEKDPLCEHCQMFFS

SEQ ID NO: 31045 - DNA, 3224 bp, DROSOPHILA
tttatctggccgactaacaacagcaagacaacaaggatcgtacggccgatcaagctataaatcaggctgggcttttgcggctaatgagacagattgcctcctctttgggattcgaattgctcttcacctttcttttggttcccttttctgggggtcacattccggtggtcctgcaataacaagaaaccgatctgatccccgatcgcaattgcaacaaatattttattgttatttgatgagcttcgaccaatgatgcaatggttgggtcaataaattataagtctgatgtggctcattagagacttatcttgggatacactttggcaaaaagggctaactatggatattaaattaaaagctcaaatgtgatgaaaataatattagcacaaatatgttcaattaaaattgaattagtataattatataattagtatataatagagacactctacttgtggatatttgtatatcaatgttttcccagtgtatttgatcgtgatctatatgggaatcgaccaccggctgcgtttcgtgtgggagatgcgagtcctaatccttagttaaagcacaaaaaataacatcacataaataatacgctcattgggttccacttcactttgagttccaatttcggaaggagttgtttttacagaacccggagtatttttttcacaataaatcacacaacagaccaattaggtccgcacaatttccgataaatggtcctcgaatggagctaaaaaacagtgctttgaccaaaagaatcttttgctgttgcccagctcaattgcaactcaattgagtaagttatggatcttgggttaactaattccctatgcgttacagatcgccaaaagagtcatgattcacaagcaaacagcattttcggttgtaaatatagatatatttccatttcttttgtacatttcaagtcgattggtctagggatggttagatttataaaatagtcttgatttttattttaatttggaaaatgtaactaatttttcagcttccacattccacaagccagcaataaagtgaagatccgccacagaaccgctttccttaagccaactgctgagtttaccggtgcgaatcccagcctttgattgcccacatcgaattcggtataaatacgacccaaaaatacatctcccataatccaaaagtcttggtttatagattgaatggccagcgaacagaaatcttcttcctcgatgatataatatttggctgggattttaaagtccacgccattaatgttgattattagatccgggtaggaagtggaactgcattcgaaaagtccctccgaattagcattaaacaattgagaaatctgatcatattgcgcctggggagctataatcagagatgttccagtatccgcaattgcttgggcaaaggtgctaatggaagtactaccgactttgatataatccgtttggaatttccaatatgcggcctgaacgacattcacataggtgagggaaccgctgtaaagcgagggatccgagccgcccaaaataagttcacctccgtaaaaagttacactgccgttatccctcagaaaaaatgaaaacactgggctttgaacgagtccctgctgcatcatgttctgaaacgtcggggtaactccgtccacggccaaagaggggaatcccatgcccagtattccgtcgaagtatgcatctacgaaatttgttccctgctcggtagttacctcaccgaatgtctgactttgtatcgtcaagccagcaaagcctacacaatccacggatagataaccagaaacactgccagttccataggttatggaaaaggccgttccattggccacataggtactggatttatttttgtagaagacctggtgatcctgacacgctgtgctgatacacgagcttcccggaacccaaaggtttgaggaaccggtgtcgaattgtaccaaaaagtcctggccgggggttccaatgcttatatttccataatactgaaagttatcgtagttggacaggtgctccatgggatacccattagcggtgtattggcgattgtatttctgctgaacaaaatccctttctgccacaatatttttgtggctgcgcttaaagtttggcgacttttgaatgggtattcggcgtagggtggaattagcctccccaaccaaaactataagtccggccagaaagaccaaactctttatttgaaatcttggcatgttccctataacaaccgacgaacacgactgactgtgattttactatctaatggggttcttataaaaacccaaaaggaaacgctatagtcgagtgtctcggcccttcgataccccttactctgccaaaaaatatttcctttgagaaaatcttctttaatacatttattgatcattgatattaaaactttcgaagttagattcctatacccattaatttttagaattagcctagttccaatacttttcaatgccttaatgtatagactttgtgggacaacacaatgctttttagattattcataccttttaacagatacaatatacctttttacactgagtccaactgggatgaaaggtaagcttaccgataacgatagcagtgtagtgtgtgtgattccggcgattgtacaacaacaatcaatcaaataattttgtgtgtacctccgtctcagctagacaggctaaggtttatgtaatattgcaattgcaaagttacctaaaatagtaaatacaatttagtttcggcttgctatgactgactccaagcaaaccttcataattatgtatttcaccatttgaattgctcactgcgataacttgccttaactgttatatctacttgttatcaactaatgatttatgtgtacttatcactaaaaaaaattacttcttgttaatccttaattaaaaattccaagaaattatgataaatattgttttccttgaataccgacatacaattccccaattcgcaaaatggtcaagaaaatataatgttgaggaattcataggaggaattgtaatttatagtcatctttaaacatttttttaatactcgtagacaacaccatattcaaatgcaaaacacttccagcttaacgaattcgctgtggaacctgcctagggaaatggtatttcgactggctgtcaatttctaatggagacgtcaggttccacttaaaggtgtgagaatatttatggaccggggttcgtagttcta

SEQ ID NO: 31046 - DNA, 1224 bp, DROSOPHILA
atgccaagatttcaaataaagagtttggtctttctggccggacttatagttttggttggggaggctaattccaccctacgccgaatacccattcaaaagtcgccaaactttaagcgcagccacaaaaatattgtggcagaaagggattttgttcagcagaaatacaatcgccaatacaccgctaatgggtatcccatggagcacctgtccaactacgataactttcagtattatggaaatataagcattggaacccccggccaggactttttggtacaattcgacaccggttcctcaaacctttgggttccgggaagctcgtgtatcagcacagcgtgtcaggatcaccaggtcttctacaaaaataaatccagtacctatgtggccaatggaacggccttttccataacctatggaactggcagtgtttctggttatctatccgtggattgtgtaggctttgctggcttgacgatacaaagtcagacattcggtgaggtaactaccgagcagggaacaaatttcgtagatgcatacttcgacggaatactgggcatgggattcccctctttggccgtggacggagttaccccgacgtttcagaacatgatgcagcagggactcgttcaaagcccagtgttttcattttttctgagggataacggcagtgtaactttttacggaggtgaacttattttgggcggctcggatccctcgctttacagcggttccctcacctatgtgaatgtcgttcaggccgcatattggaaattccaaacggattatatcaaagtcggtagtacttccattagcacctttgcccaagcaattgcggatactggaacatctctgattatagctccccaggcgcaatatgatcagatttctcaattgtttaatgctaattcggagggacttttcgaatgcagttccacttcctacccggatctaataatcaacattaatggcgtggactttaaaatcccagccaaatattatatcatcgaggaagaagatttctgttcgctggccattcaatctataaaccaagacttttggattatgggagatgtatttttgggtcgtatttataccgaattcgatgtgggcaatcaaaggctgggattcgcaccggtaaactcagcagttggcttaaggaaagcggttctgtggcggatcttcactttattgctggcttgtggaatgtggaagctgaaaaattag

SEQ ID NO: 31047 - protein, 407 aa, DROSOPHILA
MPRFQIKSLVFLAGLIVLVGEANSTLRRIPIQKSPNFKRSHKNIVAERDFVQQKYNRQYTANGYPMEHLSNYDNFQYYGNISIGTPGQDFLVQFDTGSSNLWVPGSSCISTACQDHQVFYKNKSSTYVANGTAFSITYGTGSVSGYLSVDCVGFAGLTIQSQTFGEVTTEQGTNFVDAYFDGILGMGFPSLAVDGVTPTFQNMMQQGLVQSPVFSFFLRDNGSVTFYGGELILGGSDPSLYSGSLTYVNVVQAAYWKFQTDYIKVGSTSISTFAQAIADTGTSLIIAPQAQYDQISQLFNANSEGLFECSSTSYPDLIININGVDFKIPAKYYIIEEEDFCSLAIQSINQDFWIMGDVFLGRIYTEFDVGNQRLGFAPVNSAVGLRKAVLWRIFTLLLACGMWKLKN

SEQ ID NO: 31048 - DNA, 3214 bp, DROSOPHILA
gcttaatataaaccttccagcttttataattcctgagatgtcgacgttatacggccggacagacggacagtgccagatcgactgggctattgatactgatcaagaatatataaactttatatggtcggaaacgcttctttctacttgttacatacattttcaacgaatctagtatactcttttagtctgcaagtaacgggtataagaagtataatttgaactgtataaaggttaaactgtatgtaggttaaagtacttatgcggtaaatgaatcttatttctagtacttatctaatcatcccacattaaagcaactgattaaataataccattgaagattgcacacatttgtatatagagagtgggagagagcgatatcttcctccatatgggtatcctaaacctgccgactcacgtttgccggcatgacaggttgggttaccccattagctgagaatttctttttgatgaagcaataatcgaaggagtgttttcttttggattcgtattcgtttgataccgctgtgagccataaaatgtaacccattaggttagtatggttgcgattataatggtggtgtcatcatcatttagccaaaaacctgagatttattccactggtccattcataaaaggccatcatttgaagcttagataatgtttaattaataaatacgcgtttttcgtatttcaatggtacttttatcgtatcagatattttttttaatatttccatatttttcttcttccagcagataaaggaaagtagtagatttagttgtcccttaagttgtgatacaacgataattgaataaaataagaactggcaattatatatgcattaagctgtttacgagcaccaaacgtagcctactctgggttggtttattaaatagaatggctttcttacttttttttagatcacgttgctttgctgaaactgtcagtatttggacttggctatcaccagccatatggcaaaacatcagaagtaaaattgtctgtgaacacacaaagcacacgaaaaaatctcggaaaaaaaactgtacaaaatttaacttcgctctcgaccagatttacaaaattttttttttggccaaacttaaaattaggaatacaagagaacggtgtgtgtaccaaaatcaaatcgtgtttagctagttggtgagtcttattggaagctcggcatattccgaatattactgaaattttttccccatttccgaattgcatttggtttcacatgacatacgcacacaattggaagtcgtaattctatatgtgtgggacagtgtttactgagtatttggttggggttaacttaagaattaatattttttttttttaaatgcgtatttcagacgtcaggatatatgctactttgattcgttaactattttcaagtgatcggaagcaaacgcagaggcatttctaatttgtgcgttgcgcgactttcagagatcgtagactcgattaaccatgggtaaaaagggcaaaggaaagaagggcaagaagcccgccgcagttgtggctcccatcgaagcgccaccatgtcctccgtgtccggaaccaccaaagcagatgcaaccacttgacgcttgtccagagtctagcggaccccacgatgtccttcgggctcaaccgaatcattacccggctcttcttcgtattccggaaacaatggcggtggtgggctctgagaatggatgctacgatagcatttgcaagctcctgagagccggattccggtgtgccgagcgggttttcgtgatggccccttggggcaactacgtggttttccggtatcacaacaataatgactttatttacttcctgtttgatggatgcacctgcgatgttaataggttccgctatctagacctcagctgcggaactgctggatttcttttcttcgataatatgcacgacgttattagttatattatccagtctcgaaagacgcgtctatatctggagaatctaaacaagattgccattgatcagattgtggaggagtatggcgctgtaacgtacacccaaaaggcaaaatgcatgcgattcgcttaaataggtcccatatgatttctaacaaaagagggcaacgcatacacaacgaggataatactggacgacaagctttgctctaaacatttaacatattttggcacaatctttatcaataaataataatctctttgaaagcaactaaaacaaatttgcatagctctaataccaatagcggtgatagcgatataccaaagcgtttattttgcatgtcgaagttaatccttttgtagagttttgctgggaaagttgaggttagcgtacgatcaaaagaagttaaataacaatagtcgacataaattattgcaatattactgtggataaaatacaaatcgtaaatataatatcaaaaattagagacttacagggtgtgagaattttgtcaattagagtacagattccaagtcgattagcgttcgattaattccattcatttgagtggtatggaaattatgcatgtgcatcattttgctaatattcggctcaaaagaatgaagcggaggattccagcttaacgtgcacaacaaatccctcaaattattattgcttgctacaaaatgaaaaaagaagaaacccaatagaaacaaggtgaaccttccaagtaaggggtcaatttttggaggcccatggattgcgaaaaccgcaaagcatttgcaataaagtgccaaacaagcgccggccacacgatatttgaatatttataaaagtagtcgacttgttgatagattatgagatgttaaactgaaaaattttatttttcaaacagattttcagtatttgaaaatgtttatattataacacaattaaattgtttttaacatcttaattaattctgaaataatgtttaaagttcttacatttttattaacatcttaattaattatatatatatataatataataggttattagacagaccgttacttcttataatttatatattgttattttttagtggatgcgatttgtgagcaatatatatttacttgacatttgtccgggctacgagagaaggctcggctggttaggccactgtttcgccggtgtgtcaagtgtccggtttccctaaccataactcgtgtacccctccttaactcccgtgagtaccttttaactatccaaactccttgactagccatgtcccatttaa

SEQ ID NO: 31049 - DNA, 1017 bp, DROSOPHILA
tctgtgaacacacaaagcacacgaaaaaatctcggaaaaaaaactgtacaaaatttaacttcgctctcgaccagatttacaaaattttttttttggccaaacttaaaattaggaatacaagagaacggtgtgtgtaccaaaatcaaatcgtgtttagctagttgacgtcaggatatatgctactttgattcgttaactattttcaagtgatcggaagcaaacgcagaggcatttctaatttgtgcgttgcgcgactttcagagatcgtagactcgattaaccatgggtaaaaagggcaaaggaaagaagggcaagaagcccgccgcagttgtggctcccatcgaagcgccaccatgtcctccgtgtccggaaccaccaaagcagatgcaaccacttgacgcttgtccagagtctagcggaccccacgatgtccttcgggctcaaccgaatcattacccggctcttcttcgtattccggaaacaatggcggtggtgggctctgagaatggatgctacgatagcatttgcaagctcctgagagccggattccggtgtgccgagcgggttttcgtgatggccccttggggcaactacgtggttttccggtatcacaacaataatgactttatttacttcctgtttgatggatgcacctgcgatgttaataggttccgctatctagacctcagctgcggaactgctggatttcttttcttcgataatatgcacgacgttattagttatattatccagtctcgaaagacgcgtctatatctggagaatctaaacaagattgccattgatcagattgtggaggagtatggcgctgtaacgtacacccaaaaggcaaaatgcatgcgattcgcttaaataggtcccatatgatttctaacaaaagagggcaacgcatacacaacgaggataatactggacgacaagctttgctctaaacatttaacatattttggcacaatctttatcaataaataataatctctttgaaagcaactaaaacaa

SEQ ID NO: 31050 - protein, 195 aa, DROSOPHILA
MGKKGKGKKGKKPAAVVAPIEAPPCPPCPEPPKQMQPLDACPESSGPHDVLRAQPNHYPALLRIPETMAVVGSENGCYDSICKLLRAGFRCAERVFVMAPWGNYVVFRYHNNNDFIYFLFDGCTCDVNRFRYLDLSCGTAGFLFFDNMHDVISYIIQSRKTRLYLENLNKIAIDQIVEEYGAVTYTQKAKCMRFA

SEQ ID NO: 31051 - DNA, 5759 bp, DROSOPHILA
cactctttccaaaatcgatataatgacaccacttgccaaagtaagaaaaagttatatatacaggttataaataatctttaagtctttcctttaaaaaatgtttgatttcaaattgcatctcagagtttaacaaaatgcaaacactttgtttattaaacatttgcgttttgtaagttaaaatattgttacgttaaaaaaaattcgaaaccagaaacttgtagcaagcacatttatgcaaaaaaaaaacattgtttacagtgtgacaaatacacaagctaagtacttttaaaaattaatttgtctagggatgttgtctatgtttatctgagtaagttgtatatttttttaacgatttaattttcggtcacacacatattttaaaagctgagtttaggaaaccagaggcttgtgatgtaggtacttacgttattagagcaataatagcaagatagaggtacatttgagtagagattgctctacaatattgaggatttcatttgtttagattgataaaattggaaatcccagagacaacattaaaaatataccgcttagttatatgatcctgcgtttttgtatacttgcaaaatacaatattagagtggtaaatctgcctaaatggatttcgaaatacttttgcgtcattgaaaattataacgtcaagcttgtggacaaaaatatattaatatctacctttagatatcaagcgaatataacacgttgcagaacctatttttaaaaatttaaaacgttttaatatcctttgcgataaaaaaaaatctgaattatacgacatatgtagtgtttttaagaaaatgttttttagctcacccagaatgttgtcttcccttacaagactctcatgttaatagaattaatctgcctcttctgttaatattagttctgttgtttgagtttagaaaaacgccccatgttattatagactattgaaaaggttttgaaaaccattatatattagacctctttcagtttggcctgtttaggaaatgatgcacgagttgcgtttggcgcccaagcttcgctcctggattctttggaggtgctgcagctgggcaggtgtaggagcatgggatccggatcccccggaagatgacgcagctgcagctgccgaagaggtagaagcggaggtaccacctccggaattgtggtgctgggtgtgctggtggtggtgtaacggggtgctgggtccattgttaccaatctgctgcggcaacgactgtcgacgacgacggagggccggactcagattgtaagttatttttgcctgggctagcagttccttgaacacctagggttgaaggcattatataatcgctaggttgggttgaaaaatgattggactcacctgggtaatgttttcattactggaagctgaagcctctacaaatccgttctcccagtccacagtaacaaccgattctgtggtggcgtactcaacctacgaaaaggcaaattaacatttaatggggaaagcaattaattgcttttgctatagtgtttttgtgattgtttgttaactgcaaacgactactttgatttcgcttaaattcttgtttgaagagttttacataattgtcgagttttctttgccaaaaaaaacaacattaataagatgaagggacgtgccaaatggcaagtcgagatcaatcaatacgcggtttcatttaacaggaaattaatttaggctcggtataatgaaaataagaatttaaaattagaacgcacctctcgctcagtttctccatctgctaagagatcgatcttgttcccgacaactacaattggaacagcggtagtggccttagtctcgtggatctgatcgcgaattgtgcgcacctcctcgaaagtggtggcatcggttacgtcgtagaccagaataaaagcatccgccgaggatatggaaagagctcgcatcgccggaaactgaagaaaaggaacataataatgttgattttatttagacgcgtcaataatgtttaatattttaaaattttacaatcatttccttttatttttaatgtaaggaaataagtttttggaaaagatgcaagtgaggattactttaacagtaatttttttactgtttaaaaaaatacatttgaatattaatgatccgttttgtcacttaccatacagctatcgtactttgccaattccttaaataatatttacacaaaagtactcccctgtgtgtctctggtctaattagaggtagttggtggctccgtagaactgatcttcatctctgatatgtgcccctttgcattaaccctgaagcatgtttacaattgtggcagaatacccaaccgaaaacaatcagtttcccatgtgtgtaacttatgattatggaaatcacagcactgataaagaatgtaaagaattatgctttttttaaaacacaagaatctcatatatgcatatatgtgtacgattttaattaagttatttcgattttttaattaaagataaatatagccattaagtactaaacaccaaatgcaaatcttgtaactccaactttaccatatttctttacataccctaaacagcaataaatatacccgttactcgtagagtaaatgggtataaataaaagtatgttacaggcagaagaaagcgttttctaccacgtaatgtatatgcattcgtgttgcccactataaaaatagttggatattttttcataattttattagtcgtgtaaatttctatcgaattgccaacaaatttttgtcacgcccacttttacgccctcaagcagccaaaccgctcattttattccccaatatctatcgacagcctagaaaaattatgaaatttcgcattcacagctagtacgagctgagtaacgggtatctgatagtcggggatgtcgactataacattctcttttgtttgtctttaaataataatataatacaaggttgtaattttagcgcagcctgttgaacggggataataatgacgcagatgggagacgtttctgtaaaatcagacgatatgtattaaagaaccggattcggaaatctgaatccaggccaaaagatcaaatatcgctctacgaaattattgtattaaacagaaactaaatcaatgctgctgggaccggtagcagcccttttatagtatttaaaaggaattacgcggactttagtagaactaccaaattttctggcacaggataagtcaaacatgtataccagcttctgacccttccggctgaccacatgcaatatatatgtagcgtgactctggatgtactagggatacccctcataccagtaactgtaagttcaatgcaatcaagttcatttttaatgactataagtgattttataaccgttaataataaaaacaacaacaacaaattcaagaaacccttgcgccacttgcgccatcaagagaaacgttaaatacgtggcgtagtttttgctcacctcgtatgagccggcagtgtccaaaatatcaagggtaaggctcacgccggcgatggaaaagttgccttggtgcatttcctcaatggtccgcttgtacttggtgctaaatgtattgtacagaaactgggtgattattgacgtttttcccacttttgcagagcccatgacgacgattttgtggcgtgcgttggccggtccaatggcatcatctaccgcgttgtttctaccaaccctgcgaatgcgagattttcggttgacattgaggtaggttaagaaagacgaacatgaaacatttagttagtgcatagcattatgcaaggctttgctcttcattacttcatagttaaaactttgcaacgcagggctgaagaaatatgccataggcagctagtttgcaagtttatcgctgttcgacagcgaagaacaagaacagggaatactctgtaacaagaactctgtaagtccacggttcaatccaagtgccaaatttggttggacaataaccacaagtacgtacaatgcatgatgacagcttagtcccgaataattacaaatcaagaacatctaaatggataaaggaaagcatcgaaagagcaagagttatatacttgtccaatggttaaggctaaccaactactgattaccatcgccaatactacgtactattttatattactctgcttttttagtaccttaggtatttcaataatatttgtttttttaaagggaaaaagcaagaaaacataaggaaaaatgtaatcagaagcggttagaacttgaaattttagtcctgacaggcgaaacaaatgaaaagtatgcaaagtacgaacattggtgactgcgtttttctttcccttttatgtcgtcttttgaacccagtcaaataagaatgctgccttggtactgaaaaaaaaattgccagtttaagtaaaatgagaattttacatatattcgggacaattttcgccaaatcattttaagttgttttctcctttcttattttatgaaaaaagtaatttgcaaagttattacatttttgttatgatattctctgcttccgctcttataaatatgttagtattggtatagttaaaacttcgctgtatcatttataatggcatatgtttctatatttcgatagaaattcaagtcaccgagaccatcaacgattcgaatattattttttaacgaatatctgctgtaatgacttacttatcacgctttggcttatcctcggcattgtcgtccttcataaacgagggctgcaggctgaatcggcggcgtaagtggcggccacgcatattgtaatccttggaatacctgagtggtctccctgattattgaggctactgataagtcaacgaccctcgcctaagatttaatgctcatgcttcgtatgccgttttatatttgcagcttagctgaaaatgtagcgctcactggcaaactgttagtccatcgtactttgcttattctttagcgtttttccctttgcggttcgtctttccaccagaatattaaaaatgctaatcttcgcgttgtattcctgtgttcacctgcaaatgaaggggttgtggatcagaggcagaacaatagtttttttttctagttttctgctgctggaaaaaagtattgccaaaaattgaccccaagaatctattaaagatttaaaaaccatgttaaaaaatatatattaaaaactaagtggcataaaaaatatgatggaaataatatatttaattaatttcagagtctatttttttaatcttttacaattataaaaagagagagaatgctatagtcgactttcccgaccgtcagataacccttactcagctagtggaaataggaacgcgaaatttcataaactgtctggaatatcaataaatattggtaaataaaatgataaaaaattgaaaaatttttcaaaggtgcgggcggtttgtcggcgtaagagtgacaaatagtttttggcaaatcaatataaatttacaaaactaataaaaattatgaaacaatatcaaaacatttttcaaaagtgtgggcttggcttaaaaaatgattaaaggggcggactttccttgccactctgacacaaagtctttagtcaggagaagaaaatgctgcttttcaattgttcttaaacaatgcgattttataaagtctagtgtagtcaaaaaaactgttaatgcaatgggtgaaaagtgaagattttaacacagacacggagaaccttgtaacgtattagcgaatatatattgtagcacatattaaataataaaagctaaataaataattaat

SEQ ID NO: 31052 - DNA, 960 bp, DROSOPHILA
atgcgtggccgccacttacgccgccgattcagcctgcagccctcgtttatgaaggacgacaatgccgaggataagccaaagcgtgataagtctttcttaacctacctcaatgtcaaccgaaaatctcgcattcgcagggttggtagaaacaacgcggtagatgatgccattggaccggccaacgcacgccacaaaatcgtcgtcatgggctctgcaaaagtgggaaaaacgtcaataatcacccagtttctgtacaatacatttagcaccaagtacaagcggaccattgaggaaatgcaccaaggcaacttttccatcgccggcgtgagccttacccttgatattttggacactgccggctcatacgagatgcgagctctttccatatcctcggcggatgcttttattctggtctacgacgtaaccgatgccaccactttcgaggaggtgcgcacaattcgcgatcagatccacgagactaaggccactaccgctgttccaattgtagttgtcgggaacaagatcgatctcttagcagatggagaaactgagcgagaggttgagtacgccaccacagaatcggttgttactgtggactgggagaacggatttgtagaggcttcagcttccagtaatgaaaacattacccaggtgttcaaggaactgctagcccaggcaaaaataacttacaatctgagtccggccctccgtcgtcgtcgacagtcgttgccgcagcagattggtaacaatggacccagcaccccgttacaccaccaccagcacacccagcaccacaattccggaggtggtacctccgcttctacctcttcggcagctgcagctgcgtcatcttccgggggatccggatcccatgctcctacacctgcccagctgcagcacctccaaagaatccaggagcgaagcttgggcgccaaacgcaactcgtgcatcatttcctaa

SEQ ID NO: 31053 - protein, 319 aa, DROSOPHILA
MRGRHLRRRFSLQPSFMKDDNAEDKPKRDKSFLTYLNVNRKSRIRRVGRNNAVDDAIGPANARHKIVVMGSAKVGKTSIITQFLYNTFSTKYKRTIEEMHQGNFSIAGVSLTLDILDTAGSYEMRALSISSADAFILVYDVTDATTFEEVRTIRDQIHETKATTAVPIVVVGNKIDLLADGETEREVEYATTESVVTVDWENGFVEASASSNENITQVFKELLAQAKITYNLSPALRRRRQSLPQQIGNNGPSTPLHHHQHTQHHNSGGGTSASTSSAAAAASSSGGSGSHAPTPAQLQHLQRIQERSLGAKRNSCIIS

SEQ ID NO: 31054 - DNA, 2213 bp, DROSOPHILA
tataataataatgaaaatagtgatagggatagttagctatgtttattggcagtacgaaacagactgcatattagcggtgatatctgttttggccatgttatgaactaacccctgataaatctataaaaatagttgtctaacatttgaatacataacttgcttaattttatagtaaattcactattcacctgtattcaacagaaaatgtttccatacagaatgtacagaatgaaaaacttacaatttctcctctatgttgttttcaaaagttttgccaaaaaatacaatttcattactcattcaggcgattttgtgccataaaaatttaatttcggtttaaattaccaggcgaacaggagttccagaacgtaatgttttatttttatattttcgttcacctggtgtttgaatgcgctccccaaaagtaggcaactgtttttgagttcgcttttagtttctaggtggtcttcgctatgttttttgttccctttttgaaacgtctactcttgggactttcaaaataaaaattaagtactaagtactaatccaatttccattttttctcgcctatattgtgtgtactggggtacatttattaattaaacaaattggtttttacaagcaagtaccttttgctacataatttatataacaataacaaaaaaaatttatcttggatgcatatatacagtatttacaaaagtggttgaagattgatttgacggctttctaggattggactaggattaggcccaacctccagcgggttgccaaccgccaccaccgccgcctccgtggccgccacggccgccggcacctccatggcctccagagctcagtttgatgattttgatgaccttggtgtagccacgtccgctacttccgtggccaccactaccacctgatgaccaacctccgcctcctcctcctgaagaccagcctcctccaccaccactatgtcctcctccaccgcctccgagactaatgattttgatgagttttacatcgctgccgcttccgccgcctccccctgaggaccagccacccccgccacctccagaagaccatccacctcctcccccgccgccgccagaagaccatccacctcctcctccgccgcctccagaggaccatccacctcctcccccgccgccaccagatgacccactctcggtaataactttaataatttgtacgtctcctccgccgccatggccaccaccgccaccacctcccgatgaccaaccgcctccacttcctccagaggaccagctacttcctccgccgggcttagggttagccgtcacactggccgctccaatgagcataagacacacaaaggcctgaaaagcataaactttattacaatcactttaaaaaaaatgtccagcaaggctgcctgcaaaatagttttggattatgcaggataatttaatagttatcctggcttacaacgaaccgtactttcatagcttgaaacactccgtttgggttaactagtgagttaagcgcaaatccacaactgacacgactgcagatggcagcgagagtttttataccaaaccaggtgcaacataactttaaccggaaaagcttggctctgccagttggcaaaaggaaaaacattttttaacgctaactgcgtggttggcagatgttggaagtgttgccgaggcactggtatgaaaaaaatgtatatattatgatcaaagatactttaaaaaacatataggtttattgccataagcaaattcgacataaaaaattcaattgttttatcctaaataactacaatatacgaattttgagaaataccattgttttttttttctgtgttattgtcgtaatatgggccaaatgatgccgcatcatcgtcagggggaggattcaacaatggacattagttttcaaatcccaatggacggagaaaaaaaaaacagcaggcgaaagctacagacaactcataactgcaactccatccgattgctgcatctgcaatagttttttaggcagccaaagatttgtttgtatagtaaatgcacatctcccaacagacaagttgatggcgcacctttcccattacataatttgcaccattgccagtcacaatagcaacttcagaccaacttgcaacttgtgactttgtgcgatgctattatttaatttgcatctaggtgtatcgatggcaatttggtcaaaaactttgacaaaat

SEQ ID NO: 31055 - DNA, 213 bp, DROSOPHILA
atggcggcggaggagacgtacaaattattaaagttattaccgagagtgggtcatctggtggcggcgggggaggaggtggatggtcctctggaggcggcggaggaggaggtggatggtcttctggcggcggcgggggaggaggtggatggtcttctggaggtggcgggggtggctggtcctcagggggaggcggcggaagcggcagcgatgtaa

SEQ ID NO: 31056 - protein, 70 aa, DROSOPHILA
MAAEETYKLLKLLPRVGHLVAAGEEVDGPLEAAEEEVDGLLAAAGEEVDGLLEVAGVAGPQGEAAEAAAM

SEQ ID NO: 31057 - DNA, 3057 bp, DROSOPHILA
atcgctgcaagtgctccctttctgtgcttaacgttaaggtaggttccaatccaatttaaccacatagtgaatttgtgaatggcgacagacttttacgattgaaggtagttatatcttggcaatcatcaatcaaagtgaggactaaagattgctctcgaaattgctggaatgtttccgtcaccatacttctttggaagctattaataggaaatagtttgacaaattacagattttttaatggaaaagattttataacatttaaattagaatcaacaggagtatctcctttccgtatatgtacattaaagtgctcatacgtaaaatgaagaaaaagccacttaaaattttgaataatttcttaatatattttcttttagttgcttaatgacttcagcttagatagccgcccggagttcgttcgggcctccgtgatttcgaagtctggagagttatacgcgagcgtcaatggaaatcaagtaagccacttttccttaaattaaacgacatattatgacggttttcctgcgattattctagattagtagtcgcttgcagagcattgttggtgccgatgttttaataaaccttcctgcacgtacttctgatcgaccattggcgaaagctggtgaaattttcccggcctccgtgttgcgctttgactttatctcgaagtacgaataagaactacacaaacgtaaaatgtaaaacaaaggtataaattccagaagttggacagacatatatagacagcacatatattatctttatttttttatgtatgataacattaaatataacgttcaacaattacaccgttagcagtgtgagcaaaaacgattaaaaagtaaatattataaaagccctcagaacagaaaaaagaaacatcaatcgaaatatattgtaaaaatattaaattagggaaaggagcaggatcagacgcgttatactaaatgggatcaggatcaggagcatatgtacaggaaatggaagaagacaaattttaaaccgactgactggcgctctcgccgactgttgaagctaccggcctctgaagtcgcagcgaggagcgacatggcaacgcaaattggtatttgttatgacttagaagcgcatatcgctgctgcggaacatagtcccacaacgcccgctcgatcacatgaagagcgtccggactgagcacgtccgctgtatactgcgtaggagccccaacgaccaaggacatggctgaaataaattacaaacataaaattatatataattgattcccaacgatgatggaaaacattactttgtgccactggtgccttgtacaatgactccgccgtcatgccgcatgtatccaaagcgaccacactgacgccatagggatgcagctccttgcgcagctcttcggcacacttgtctacggcaacgcgtgaggcgttaaaggcaaccagtccatcaccttcgtttcgagcatttccacctccacttactcctcccaagtaaaggagtcttccacgtgtcggacggagaaaacacacaaaggccttggccacacgtaaggtgcccaggatgttggttctgagcatgtgttcccactgctggacattctgcgattcaacctggcctcggaaaacactgccactagtgttaattacggccgcaataccgcgctcatctgcatttagattagcgcctataataacggtggcctcgcgaagcacatcctctcgggtgacatccaatctcatcggaataattgtgcctgcaatgggttcctcactgtactctcggatcttcatccaaccgcaaagaagtttggcgggtagcgaatcttgggcctctttcattccagcaaaaacccgataacccttgttagccaaatgggtgcacaattgaagacccaatgcggtatccgcactggttatcaggaccacccgactgggatgactatccgcattggcagatgcgctatcctcgcgcaccttacaaatcaggtagataagcagcgcgccggcgatcgaaaaaagcgcaagcaactggaagcccaacaccagcatggtcattgcctccattatgacatcgctggaatagcagaaaaaaggtgagattaaaggtgaacaatgtggtagaactgaaaatgtaatttgttttatactgactacagatgatctttcttacatttactcagtcggcaatcttcataaaaatatttaaacctagcaagagtttaacgttatagtgcatttaattggtacattttagaggatttgattatatagccgaattaaaaaaagaaagaaattgtatataaatagcaaatagttaagcaatctgaagtgctatacagttgcaaatgtaacacgaacctcaaaagctttggggcattatcgtaaaatgtttaaggtgttcggtttttacaactgatgtttcattcgatgcgttttgagcaagatgtcaatgacatttatccctacgacctcgaacagctcttattatatattaatatatataataaattttagaatttttaatttcactttctcctgaagtcttaatatgcaatcctttttagttctgcggtgtctcgtagtgaccgaagaatcgcagtagacttgatgcaatataataataaacaataagcaatatataataaacccaatgcgttttaaacctctaagaatatatatgagattgggtatttaaatattaagaactttataaatgttttttaatgaaactatgtctggatctaatcgacactttttcatttaggcgagaagtttaataaccttttagagttcggtaaccagagattgaatttatatagtctgggtatattaagatgttaggaaattaaacatcaagaagtttataaaggtttgataacgaaaatgtgtgtaacacgtatatatttactttattggacactttctcttccaaacgaggagtttaatcaccctctagagttgggtaacctgagattgcacttgcagtatatgaagtggatatacatacacgtatacatatgcatgtacatctcagtctgactcttgagcctcaaataacaacttt

SEQ ID NO: 31058 - DNA, 993 bp, DROSOPHILA
atggaggcaatgaccatgctggtgttgggcttccagttgcttgcgcttttttcgatcgccggcgcgctgcttatctacctgatttgtaaggtgcgcgaggatagcgcatctgccaatgcggatagtcatcccagtcgggtggtcctgataaccagtgcggataccgcattgggtcttcaattgtgcacccatttggctaacaagggttatcgggtttttgctggaatgaaagaggcccaagattcgctacccgccaaacttctttgcggttggatgaagatccgagagtacagtgaggaacccattgcaggcacaattattccgatgagattggatgtcacccgagaggatgtgcttcgcgaggccaccgttattataggcgctaatctaaatgcagatgagcgcggtattgcggccgtaattaacactagtggcagtgttttccgaggccaggttgaatcgcagaatgtccagcagtgggaacacatgctcagaaccaacatcctgggcaccttacgtgtggccaaggcctttgtgtgttttctccgtccgacacgtggaagactcctttacttgggaggagtaagtggaggtggaaatgctcgaaacgaaggtgatggactggttgcctttaacgcctcacgcgttgccgtagacaagtgtgccgaagagctgcgcaaggagctgcatccctatggcgtcagtgtggtcgctttggatacatgcggcatgacggcggagtcattgtacaaggcaccagtggcacaaaccatgtccttggtcgttggggctcctacgcagtatacagcggacgtgctcagtccggacgctcttcatgtgatcgagcgggcgttgtgggactatgttccgcagcagcgatatgcgcttctaagtcataacaaataccaatttgcgttgccatgtcgctcctcgctgcgacttcagaggccggtagcttcaacagtcggcgagagcgccagtcagtcggtttaa

SEQ ID NO: 31059 - protein, 330 aa, DROSOPHILA
MEAMTMLVLGFQLLALFSIAGALLIYLICKVREDSASANADSHPSRVVLITSADTALGLQLCTHLANKGYRVFAGMKEAQDSLPAKLLCGWMKIREYSEEPIAGTIIPMRLDVTREDVLREATVIIGANLNADERGIAAVINTSGSVFRGQVESQNVQQWEHMLRTNILGTLRVAKAFVCFLRPTRGRLLYLGGVSGGGNARNEGDGLVAFNASRVAVDKCAEELRKELHPYGVSVVALDTCGMTAESLYKAPVAQTMSLVVGAPTQYTADVLSPDALHVIERALWDYVPQQRYALLSHNKYQFALPCRSSLRLQRPVASTVGESASQSV

SEQ ID NO: 31060 - DNA, 2362 bp, DROSOPHILA
cttttatcaagaatgcattattgtccaatactttacgtaaaactccccttgaccctctttgggcaaacggggacaacgccacacaatggcccggtgatgatgctcgtatttggcctgtccggaggtcacctcgatcagcgactcctgaagcgtgtcgacggcacccaggattcgctcgatacccttgatcttgcctgttcgccgatgagctgacttaaccgaaccatatggttggcatcgagaccacgcacggcgagtccacgaatgcgtatttggcggcaacgcgtcctattcgcgaggagccgcccaccacagcaaccaagccaactgcttccccggttgcgcccagcgattcggacacggactctaactaagttggctaggtgctgcgttccgttgccacagtacttcacaatttcaggtgaatggaaaggcatgcaatcaagcggatttttgtagatattcctcgtgtatggttttccttatcgttcttgttatatacatacatattatataatacggtgttaagtacagcaattgaaaaagcagacgaaggagaacagtgacgaaacggtcatcgctctgtaaaaagccaaatgaacgaagcccagaaggagctaatggatctgtggacccgtcagaggacttatcaaaggcatcttggcctataatctataaaccatatgccacagccattgtcacatgacctaaaaaatttaaacttcgttacttgtagacatatgattacgttaatgttaattgatatcagaccagaatcgtacttaaagtcaactcatcatatgcatagtggttataatcccaatacacacaaactcatacaagcgagcaaagaagaacataaacgaagaaaaatttaaagcaatttccctcatagcgttctaattaataaaaaccgagcatctaccttaaaaagataatacatcgctggctccagttttccacttcacatgatgttaacattagcattaacgtgtaagtttatggcgaaggctgcaagcatatattaatcaacactggagtgagctgccagcctcaaaagacgttagcctaccctggaacgagctgccagctttacaaagttaaccaacactggtcaccatgcatatgtggtatgtgaaacttgaaactattcatagccatcatatacacttaagtttatgtataccattaatttcataaatttagaaatgaattgaaaactacaaacaaaagcaaaacgaaaatgcttatttaaatgttattgttgtgaattaaattaaagtagattcaaaataaactacgaagtaatgggaaacaatataggcaaatcatctttgttgacgcagaaagtctataagaaaccaaaaatctatatatacatatatatatataacttaaataaatatttgccatacatattgttttgttgcttgagttatcaaaaaaaaaatttaatacaaatagatttgtaaattacgtgttaaataaatatactcttcatcccagactaacaacttccgaaaaggcttgcattttttggtcctcttcaaacagctctactacgaactcttaaaacggctcataacggattcattaacacaaatagagaaatgtgtatattgtacccctaagaaatgattatttattcatgtattatgtatgttacattatttacgtttaattctacatatattatatcggataaagcatatatattgtatgtacaataaaaaggaagaaaatctatgcaagcaaaccggtcggctggcgaatgctctaacatgttatatttatataataattatacaagtctcgacgatcccgacggtcccgacgtcatatatgccccgatgtgtgttctaatgtgggcatatactgcgctggaatttgttgctattatacaaatatacaaatttgtgacgcaagctaaaaggtattaaccaataacctaattacaatataatcaattattacgaagtgagcaaaaacgcattatgatggaacaatatctagtcaaatgagaaaataaaaattaaaacaacaaatattaagcaatgcaaactgtcaccttggctttatctgggaatttgtactggttatttaagtaggtttatcattgctgtttggtttaaggatctagtcatggtggtctgtccgttactttaagcgttgagatctcaggaagagaaaaaacaatgggttatgcatgtaagatcttgaatttgtggacctatttctggttcatttcttatgaacagctttctctccttagaggcagtgccgctagctagggctttcctcagggcggagttctccccatgccacacagctcgcacataaacatcgataactattgacatct

SEQ ID NO: 31061 - DNA, 4674 bp, DROSOPHILA
ctaccgtcgcttcgaatccctttgcctttggtgccgacgatctcgagttgggggcggagccggaagcggaggctacccatgacaacgatctcgacccggcgatgagtttcttcggcactaccattgaggcggaggacgacacgttaagtttgaaatcaggcgctgaggaggaggatgagggaaagaaaccgcctcagtcacagccacagttgcaatcacacgcgcacccgcacccggccccgccacgaccactggttcctccacagagcacccaagacttaattagtacggtgtccagtcagttagacgaaactagttcggagctactaggtcgtattcccgccacccgatctcccagcccggtttcgatgcgggatctgcactcgcccagccccactccggattcgggactagccgatcttctggatgtgtcggtggatagtggatcgagtgcccatactcaaggcattgaggcggacttaattagtggtgtggcagggggagtgcggctagataatccctttgcagtgccgacagcggtgcctaatattcaggcggcagttccactgcctgcaacaccgattaaacaaccccctcgcccaccaccgcctcgtcctgctcccccacgtcccgctcctccgggtcaggcagcaccacaaagacctccaccaccgttggccgcagttaatccaccgccagctgctccagaagcggatgaccttttggatatgtttggtactacggcatgtaagccggccaagccgccaccacctaaatccaaggaggacatactgagtctatttgagcaaccgcatgtaccactatcccaaccagcatccaagccggacttactgcatgacgatctggacgagacgattggggagggtgaaccgccggaacaagaggagccggacacggagcagagcaatgaaattagctctcgagatgaaccagtatttacttcccttcttatacgaccagatgaaagcacccatgatataacatcccaaccacaggcggctactggattggaacgacaggtgaataacatggctgcaccatcgggaaccgccagcacgcagagggcgaccacgcccgatattgagataaccacggtagaggacctgccgcgatctgatgacgaggatgagccggaggctatgcaggagcccgaaacagagacgaaaccacaaatcgaacccgatacggagcccgagatcgtatctgaacacagcccaccaacggaacgccttgtgactcaggcagccctcgtcgatggtgagctaatagccgccgagcctgagccggaagaaatggacaccggtctagattttccgctggcttccagcggccagttgtccgccaaccccttcgccagccccgacgaggaggagccgaacttcgcgcccatgccagcggcagttgccaatatatttgcagtgaacgatccggactcgcagatggagaccccgaaagcgcctagccatacggccaatatctttgcttccgatccagacgagttcgacgccttctcagccaagtttgactcggtgaagaaggacaacatcagcataatggacggatttggcggttccggagcgataacgcccacgggcggcgatgcttggggaggtagtgcttttggatcaactacaatctcggctaatgcctgtggcgacaccaattcggcggatgatggattcggtaacgatgacgatgatttctatgcaatgcaggcgcctgcacgagcggattccgtggaatctgtggacaaggatttcagcgtggtgatccgcccgatggcagaggaaactagtggggtggccccccaacttgcgccaccaccgccgccggcgcgtggagttaaccaggcacagaccacatcgctgcctggcttaaccgtcaatccgttcgaggatgttagtggcttccctgctccggggctgccaccaaccgatggaaccgccattaaacgcacggactcgcaggacactccacagacaccactctacgacgaggatgtatcacaaccgctggaggagttcccgagactccattacattggacccggatgggaaatgcaactgcgtcagcccaacaagaagaagatcaccggtcagcgcttctggaaaaaaatcgtagtccgactggtggtgcagaacgacgtgccggtggtgcagctgcttaaccaggcgggcgataagcaaccctttcaagaactgcccttacaaccctcgtattctgtgtcggagatcggggcccagcagtatgaccagttcggcaaaattttcacgatgaaactacagtacatattctacaaggagagacccggcgttagacccggtcaagtgaccaaggcggagcggatcacaaataagctgaccaagtttgcacaatatgccatcgctggcgactacgaaggcgtcaaggagtttggcagcgatctcaaaaaactgggcctgcctgtagagcatgccccgcagtcatcccaactcttcaagattggctcaatgaactacgaggacatgaagcagttctcggtctgcatcgaggaggcattgttcaagattccggctctccgagagcgagcgttgacatacaaaatggaggaggtccaggtaaccgccgttgatgagatcactgtggaacaggacttcgagggcaagatcctcaaacagattgcccgggtgcgactcttctttctcgcctttcttaccggcatgcccaccatcgagttaggcgtaaacgatatgtggcggcagggaaaggaggtcgttggacggcacgacatcatcccggtggccaccgaggagtggatcaggctggaggccgttgagtttcatagtgttgttaatcagaaggagtacgagagaacgcgcaccatcaaatttcaaccaccagacgcgaactatattgagctgctccgcttccgtgtgcgtccgcccaagaatcgtgaacttccgctgcagctgaaggcaacctggtgcgttagcggcaacaaggtggaacttcgggccgacattttggtgcctggattcacatcccggaaattaggccaaatcccctgcgaggatgtctccgttcgcttccccatacccgaatgctggatctacctgtttcgtgtggagaagcacttcagatatggttcggttaagtcagctcatcggcgaacaggcaagatcaagggtatcgagcgaatcctgggtgccgtcgacacgcttcaggagtcgctgatcgaggtgacctccggacaggccaaatacgagcatcatcaccgggccattgtgtggcgttgtccccgtttgcccaaagagggtcaaggggagtttggtgcatacaccacacatcagctggtgtgccgaatggcccttacatcgtatgatcagattccaagcgagctggcgccatacgcattcgtggagtttactatgcccgccacgcaggtctcccataccaccgtgcgctcggtgagtgtccaggattcggatggcgatgaaccgccagagaagtacgtccgctatttggcacggcacgagtacaaggttggcatcgagaccacgcacggcgagtccacgaatgcgtatttggcggcaacgcgtcctattcgcgaggagccgcccaccacagcaaccaagccaactgcttccccggttgcgcccagcgattcggacacggactctaactaagttggctaggtgctgcgttccgttgccacagtacttcacaatttcaggtgaatggaaaggcatgcaatcaagcggatttttgtagatattcctcgtgtatggttttccttatcgttcttgttatatacatacatattatataatacggtgttaagtacagcaattgaaaaagcagacgaaggagaacagtgacgaaacggtcatcgctctgtaaaaagccaaatgaacgaagcccagaaggagctaatggatctgtggacccgtcagaggacttatcaaaggcatcttggcctataatctataaaccatatgccacagccattgtcacatgacctaaaaaatttaaacttcgttacttgtagacatatgattacgttaatgttaattgatatcagaccagaatcgtacttaaagtcaactcatcatatgcatagtggttataatcccaatacacacaaactcatacaagcgagcaaagaagaacataaacgaagaaaaatttaaagcaatttccctcatagcgttctaattaataaaaaccgagcatctaccttaaaaagataatacatcgctggctccagttttccacttcacatgatgttaacattagcattaacgtgtaagtttatggcgaaggctgcaagcatatattaatcaacactggagtgagctgccagcctcaaaagacgttagcctaccctggaacgagctgccagctttacaaagttaaccaacactggtcaccatgcatatgtggtatgtgaaacttgaaactattcatagccatcatatacacttaagtttatgtataccattaatttcataaatttagaaatgaattgaaaactacaaacaaaagcaaaacgaaaatgcttatttaaatgttattgttgtgaattaaattaaagtagattcaaaataaactacgaagtaatgggaaacaatataggcaaatcatctttgttgacgcagaaagtctataagaaac

SEQ ID NO: 31062 - protein, 1194 aa, DROSOPHILA
MSFFGTTIEAEDDTLSLKSGAEEEDEGKKPPQSQPQLQSHAHPHPAPPRPLVPPQSTQDLISTVSSQLDETSSELLGRIPATRSPSPVSMRDLHSPSPTPDSGLADLLDVSVDSGSSAHTQGIEADLISGVAGGVRLDNPFAVPTAVPNIQAAVPLPATPIKQPPRPPPPRPAPPRPAPPGQAAPQRPPPPLAAVNPPPAAPEADDLLDMFGTTACKPAKPPPPKSKEDILSLFEQPHVPLSQPASKPDLLHDDLDETIGEGEPPEQEEPDTEQSNEISSRDEPVFTSLLIRPDESTHDITSQPQAATGLERQVNNMAAPSGTASTQRATTPDIEITTVEDLPRSDDEDEPEAMQEPETETKPQIEPDTEPEIVSEHSPPTERLVTQAALVDGELIAAEPEPEEMDTGLDFPLASSGQLSANPFASPDEEEPNFAPMPAAVANIFAVNDPDSQMETPKAPSHTANIFASDPDEFDAFSAKFDSVKKDNISIMDGFGGSGAITPTGGDAWGGSAFGSTTISANACGDTNSADDGFGNDDDDFYAMQAPARADSVESVDKDFSVVIRPMAEETSGVAPQLAPPPPPARGVNQAQTTSLPGLTVNPFEDVSGFPAPGLPPTDGTAIKRTDSQDTPQTPLYDEDVSQPLEEFPRLHYIGPGWEMQLRQPNKKKITGQRFWKKIVVRLVVQNDVPVVQLLNQAGDKQPFQELPLQPSYSVSEIGAQQYDQFGKIFTMKLQYIFYKERPGVRPGQVTKAERITNKLTKFAQYAIAGDYEGVKEFGSDLKKLGLPVEHAPQSSQLFKIGSMNYEDMKQFSVCIEEALFKIPALRERALTYKMEEVQVTAVDEITVEQDFEGKILKQIARVRLFFLAFLTGMPTIELGVNDMWRQGKEVVGRHDIIPVATEEWIRLEAVEFHSVVNQKEYERTRTIKFQPPDANYIELLRFRVRPPKNRELPLQLKATWCVSGNKVELRADILVPGFTSRKLGQIPCEDVSVRFPIPECWIYLFRVEKHFRYGSVKSAHRRTGKIKGIERILGAVDTLQESLIEVTSGQAKYEHHHRAIVWRCPRLPKEGQGEFGAYTTHQLVCRMALTSYDQIPSELAPYAFVEFTMPATQVSHTTVRSVSVQDSDGDEPPEKYVRYLARHEYKVGIETTHGESTNAYLAATRPIREEPPTTATKPTASPVAPSDSDTDSN

SEQ ID NO: 31063 - DNA, 2372 bp, DROSOPHILA
atttgcgcagcatcatgcattcccctctggtgataaattttttggggagtcctatatactccagccaagctaattacgcagtttctgaaaaatgttaacgtaaacacattgggttggccatttcaaggtccagacctcaacataatagaaaacctctggtcatatatgtataaagaaaaggcgtgcaaacatatctaggagtcgcgaagaaacgattttggaaattcaagccttatggaagtatatttcaatagattataaccacagtttggtacactctgtaccaaaacgtctccaaaagttgatagacgctaagagagggtatattttttattaatttgttataatttttttgttgatttttttcttttaaatttatgacatttaaataatccatatgattattttactacatatatacatatacatatacatataaatacatatatatgtatatgtatattctacatatatacgaaaattattaaacaatttcccattaagtaaacaatgagttataaacaaatatattgaatgtatttattgtctaaatacttatgcccacttttgttgtgtcgacagcagccaactccttttgatttcataacagcaaaatcgaattctgtagccttttataatttaaggccgcagcactaacagccctctatctcggtcatttctatgcaatgcatgtttttaagtccactcttcgcttcttgatcgctaagcattattgtcagcgaacttttttgtattgttgtcgtcgctagtctaagcgctaattaactagaaataaaatttataacgtttcaaaagtaaataaaaaacaattagtttcaagaagtcacctcgcgaaatttgtcatggtgtgcaatacctagtccatttccatttttgaggatcatttatttgactagctggatcatttattgactggatcatttattccactggaacgccgtcaataaaaatgtgtttttggggatatacatatattcagctactctgtctgccgtggaagtaggatgagacgtccctggttatcaatgttaaggcggaacggagacagcatttcttgggtgtcacgcaggatactggggtcctgcttagtggcgtgattgaatccataaaagattagcaggcatatggttgccagggagaaggcaaaggcgctttgactggacaggatttggaaaaccaccgactcgctttccttggcatcccgaacccaatgacaggcactgatcgccgagcaggcgaagatggcgcccagaacaaagcgccagcggagtgaactccgtttctcagtgtttaccacctcagccagccgacgctcgaaagccagcaggtcttcctgatctgtgtcctccattctgttgctaaaggagttgactctaatgcggtcccctgggcgctgcaatgctgattgccccgttaattactattttacgaacagcagcaaggccgcatcatttgcagaatttttactgacacgataataatttttttcggtaaagacgaaatctgtttgaaaaaaaagacaaagtaataatgatatgattttcaagaaacgagtgctgtgatggtttctatgctttcacttttacttccttgtaaaaagtacatacattgagattgtaaaatatccactattttgcctataatgtaatgcattatcccaccacatttaaaataaatgtttatattgttatatttcgtttagatcaccatagtagtaaacaaagaaactagaatgtatgcgtagaaatgaaacgttcgctgtacagctttccgctctctcgctcttgaacaaaaattcgagagaccctggagccacctctagagccacgccaaaaaaaaaatcgtatggcgttacgcattttgttattgtagtgtctttgttgtaactctctccgtccgtatgaacgtcgaaattttgggaactataaaagctacaaagttaagattaatcctgcagattctagttatgcctaagattgttgatttgattgagtgtttcacattgaaaaattttatttttatagagccatcacgcgagtgcatataatttggcttggaatgtttttcaaaaacatagaaatacattgcattgcacgacggaattctaaccattttatacccgttactcgtaaagaaaaaggatatactagattcgttgaaagtatgtaacaggcaaaaggaagcgtttctgactatcaatttctcaatttctatatagtaataatgttgacatttgcctagtttctgaaacctggttaaaaacatcttacaacacgttaaaatacgcaactatagctgttattgaaacgatcgaacagtcaaaagagggggaggggttgcaatatacatgt

SEQ ID NO: 31064 - DNA, 372 bp, DROSOPHILA
atggaggacacagatcaggaagacctgctggctttcgagcgtcggctggctgaggtggtaaacactgagaaacggagttcactccgctggcgctttgttctgggcgccatcttcgcctgctcggcgatcagtgcctgtcattgggttcgggatgccaaggaaagcgagtcggtggttttccaaatcctgtccagtcaaagcgcctttgccttctccctggcaaccatatgcctgctaatcttttatggattcaatcacgccactaagcaggaccccagtatcctgcgtgacacccaagaaatgctgtctccgttccgccttaacattgataaccagggacgtctcatcctacttccacggcagacagagtag

SEQ ID NO: 31065 - protein, 123 aa, DROSOPHILA
MEDTDQEDLLAFERRLAEVVNTEKRSSLRWRFVLGAIFACSAISACHWVRDAKESESVVFQILSSQSAFAFSLATICLLIFYGFNHATKQDPSILRDTQEMLSPFRLNIDNQGRLILLPRQTE

SEQ ID NO: 31066 - DNA, 2576 bp, DROSOPHILA
gaagtaaaaataaataaataaaaaaaatataaaaaatgcttgctaaattgtgccggacctaaccctatacctgggtgaaagatacccaactgcgaatctacacttagagaactttgctgaataattatatccgcaaattttcgggttaaatttggcaaggaacagttaatttaaattcgttttggttcgaaaaattgagtgaaaaaatatgttcgtatgttttgaaagtgtgcgtggaaaacgccacgctactagagccatgctcttaagaaatgtggtaggtagggtagggcagtcccgcgaacacaattacacccgtatttcactaatctctcatgcttatcctcctcttcctgaattatcttcttccgaatatattgtcctactttggcatagactaacttttttttattcgtttatttgacatctaagattaaaattaattaaagtaaataacaatgtaaaaacaacagtaatagagggcaaatccagatcccccagcggtatggccgtaaagcattgcttcgggaggacgaacaagatttgcttactcgtggaacctcctggctctctcagctcttctgagctcggtagttatctctgcggcgaagctgttgaccgcttgccattccgcctcactctgcagcatgaatgggtctacactatccgcattcagtcttctaccaagtacggtttccagagagctccgttcccttgcacatttttcgcacgagaagagaacgtgctctggggtttcgctccgtccacttccgcaccatgagcaaacatccgcctccacatgtccaaagcgcttcagatagctgcgaaagcaaccgtgcccactgatcagctgcgttagatggaacgttatttcgccatgcttccgttctatccacggcttgagattaggaatcagctgctgcgtccagcgaccctttagaccattgttccacttgtgctaccatgtctccacggtgtgctgccttgcttctgctcgtattcacctcttggcgcatgggaagaggcttctactgtgggtttggttgaagaccactttgttttcctgcgtctcgttgggcactgttctgaaggcgtagcagatacgtagtgccgacagggcatttaggcccttggcgtagctttctctttcaagccctttagcccacaccgggacggcatatatcatggtcgcgcgggtgacgctcgtcagccgccgtctactcgcctgttttgggcctcggatgttcaacattatggttgataacgcccgatttactcctgctgctttcgaaagcctggtatctatcatgacttccatgtacttaattgtccgagaggaggacaccggggccgtctccactgcctttctggagctaatcaggacagcctccttcttctccggcgccagctctagccccattgagctgagccattgttcaatggccatgatgtttatgttacacttttcgtcagccttgccgggatgcttgtcaacaacgagcaaagccaagtcttccgagaagcctacgatctcgctccttccaaccagcggtaggcgaagtatcccgtcatacatggcgttccacagaagcggggtaagaaccgagccttgcgggactccgccggtgacctggtgcctgaagactcattccgacgatttgcacagcgggtccttgctccgagaagtagctgcgaatgatcctgactaggtaggctggtacgccgaagcccattaatgcttctagtatccgatcccacctcgctgtgttgaaggtgttcctgatgtctagtgtgaccatgaggcagtactctttgttacccccgttccatctggtgccctcgattgattggactgcggaccggtggaccgcgttttcctgaagccatactgagaccgagagaggtcacccgcgtcagcgatagccctctctagccgactgcacaccagtttctccaggagcttgccgatgaggcatatctctatctcttgctctcccgtatggctatcttgagtgctttcctgcgggctctatactcggattggcgttcggcaaaggactccacatctctagcgcgttgatagcgacgtctggcggagaggcaatctcgacgagccgtttttatcttctggttccaccagtagacaggggccttcagctgcctcatcaacgccactgccgtcacctcagcttcttctctgctcaccgtgggtagaaactgctctcggaataactgcgtgtctagggtgtccctcttgtattcatcctggcttggcccaggcttgggactaggaagggtatcccaggtcgcaaatgatggccatgtggtcactgccagtgtattcctcgctgagtctccacctcgctagcctgaacgacaagccgctagtgaagctgaggtacaccacagagcccagtccttgggtttagaagagccaggtccaccgtcgcgttagggtcagactgggggccaggtatacgctgtacacccaccaactgcccacccttgccctgacaaacccgatgtccgaaaaaacatcgtttaattgttgggcttatctgctatacctccagatc

SEQ ID NO: 31067 - DNA, 576 bp, DROSOPHILA
atgtatgacgggatacttcgcctaccgctggttggaaggagcgagatcgtaggcttctcggaagacttggctttgctcgttgttgacaagcatcccggcaaggctgacgaaaagtgtaacataaacatcatggccattgaacaatggctcagctcaatggggctagagctggcgccggagaagaaggaggctgtcctgattagctccagaaaggcagtggagacggccccggtgtcctcctctcggacaattaagtacatggaagtcatgatagataccaggctttcgaaagcagcaggagtaaatcgggcgttatcaaccataatgttgaacatccgaggcccaaaacaggcgagtagacggcggctgacgagcgtcacccgcgcgaccatgatatatgccgtcccggtgtgggctaaagggcttgaaagagaaagctacgccaagggcctaaatgccctgtcggcactacgtatctgctacgccttcagaacagtgcccaacgagacgcaggaaaacaaagtggtcttcaaccaaacccacagtagaagcctcttcccatgcgccaagaggtga

SEQ ID NO: 31068 - protein, 191 aa, DROSOPHILA
MYDGILRLPLVGRSEIVGFSEDLALLVVDKHPGKADEKCNINIMAIEQWLSSMGLELAPEKKEAVLISSRKAVETAPVSSSRTIKYMEVMIDTRLSKAAGVNRALSTIMLNIRGPKQASRRRLTSVTRATMIYAVPVWAKGLERESYAKGLNALSALRICYAFRTVPNETQENKVVFNQTHSRSLFPCAKR

SEQ ID NO: 31069 - DNA, 2198 bp, DROSOPHILA
ttatatgcatcgtatcgcggagagacaacgctgccacagtgggacggggaccattgcagcaacatagagtttgcatctgatggtacaaagttcaaaagcttcattcagcctaacgagaccgttaagttcttccgaaaaagcatgtgtagaccgataaacttggtatgttttgaacaagaattccgggataagccccaactaatttatattgtcttttagtaccgggtgggaaacgaaaaaacctatggcagccttaaaggatataattatgtatttgaggataacgcctttgataatggcgcaactaatgaagctaacaaatgtttttgtagaaaaggtaagtaacgaagcagctctgaatattacttacatttaagttttttaaccgttggttgttgggaccaagtggattatgtaaatgtacagtatgctggaacaatgcctcacaatattatgtgtataaatataaatttttactagtccaaactgagatatgaaagccaagactgagaaaagcttcgcgtcaatttagccttaacaaacagctgatcatacatatgaatttgatatcgcataaaaaattcagtgttgcaacttaaatgtttttaaatatcgttttggtgtgtctaatgtatcctctttcataatatatagttaaattcaaaatacaatttacaacattttttgactttatacctaataattggatatctggcccagtgtgcaatgatttgattttagacaaacagggaaacaataaatgttgtctgcttttataaaaatgttttgttggctatgtgaatgttgcatattaactgcgctggttttaatggccaaacaagtgatgacgtagcaaagtggctgcgaacgagatgaaatcgtttatgcgccaaactaaaggtggcttgaaagaactgatcaacagttttggcgtagctgtgatgatcttcttttcattcaattcacattttaatggccttaaactattagatgaatctccatgcgcaaaaaagccgctggtgttaggctgcctaaggccccgcaacaacgggcaagaggcaatgatcaagaggactccacaactgatcagctgtcaatcacagcaaatcagcatatgttgctaagatcggaagctgaacaagattcggagcaatccgatcaatccgctgtggaggtaccccaccctgtgattgcttaagactccgaattgtctgcactggtttctcaaccagtgattccacctgtctcgattagtttaccaccacaaggtaacattaagtccgcactaccggcacaagttggcacttcagaaatacaatctgcagggccaaaacccctcgcggtggttccactaaagaaacaaattttagtttctcggcttcgattccaaaattttgattcatattctcatcaaacaaagattattctaacatattttcagatcgtcagattgattgagattgtcaaaaacattttcagatacctgcacaccagagaggtaaaagtcattttaggaaaaccaagcgaaggaaaatttttgatagcttctataccattaaatatcatatcttatattttctaaagatttatgaattaaaattttaccgttttccagtatttttcgcactcaatttgtacaaaaaagtattttacacacttcttatgtcatgtgtttcgtttaagtgtttagctaatgcgctcttcgctttttacttcgaatctttgatgctcatttgaaatctaaaagacttccgatagcttattctttttagcatcaataaatagttatacctgttactcgtagagtaaaagggtatactagattcgttgaaaagtatgtgacaggaagaaggaagctcttaaacgcttcatataaagtatatatattcttgatcaggatcattagccgagtcgttctgtccatgtctgtccgtataaacttcgaggtctcaggaatctaaaatgttaagattcagcttacagattctaaagtaaatttctatcgatttgcaaaaaaaaaatgtttgcaacgcccactctaacgcattaaaaccgcccaaaacagccacacccacatttttggaccattttttcatatttattttcattattgtattagccttgtaaatttcattcaatttggaaattgacatccattctaatctgattactcttaatttgtctttgtcttttgatag

SEQ ID NO: 31070 - DNA, 198 bp, DROSOPHILA
atgcgcaaaaaagccgctggtgttaggctgcctaaggccccgcaacaacgggcaagaggcaatgatcaagaggactccacaactgatcagctgtcaatcacagcaaatcagcatatgttgctaagatcggaagctgaacaagattcggagcaatccgatcaatccgctgtggaggtaccccaccctgtgattgcttaa

SEQ ID NO: 31071 - protein, 65 aa, DROSOPHILA
MRKKAAGVRLPKAPQQRARGNDQEDSTTDQLSITANQHMLLRSEAEQDSEQSDQSAVEVPHPVIA

SEQ ID NO: 31072 - DNA, 2315 bp, DROSOPHILA
tacaaacaagagtaattgctatagtcgagtttcctacctatcagatactatcagatacccgttagtggaaatgtaaaagcgaactttcatgattgttttggaatttagatagatattttggaataaaatgagaaaaacttaaaaattgtttaaaagtgtggaagtgatcgttttgggcggcttgtgggcgaagctaaatttgtttgccaaaatttaaaagactataaaacatgaaatatatcaaatcatttttttaaagtgttgtgggcgttagagtgggcatggcaacatggcgctgcgtctatgtcactacaatctgtatgcttaatctcaacattcctgagatctcaacgttcatactattagatcactattaagaatatatgtataaattaattagttactaatgcgattgagtaaccacagttatcgtttaacgtcccaatgaaagacgaagcgattattgcgatatcattttttttgcggagcgaaaggctgccgttattgaatgcagaataaagactaaagctaccagtgaaaccgcaacacatatcgtttcggatccatgttcatagcggccacgcaaaaatgctgagtttggcgactacgcagcgacgtccagcattatgcttaccagcatgccgttgcagtcgcttattttatttggccgtccgcggacgtttaccttagttaactattcccccctcaagttggaggccgccctcggccgacctgattccggcaatcgcctcattcaatttccttgtagcgcgtctggcccttacgatacgccagctcacgaggccaaggcagaatagcagacagcatactgaagccatgataagtggggcgatctgcgtcgatttcttccttgaacttccggattgtctccaaattactttcactcaggcgatgaaggtaagggaagctgaacgcgttctggctagcggtaacattcaacaggaggaatttagctaaccctggagctcggctctaaacgttattcatttatcgtggcgtgctgggtgaaagaaatgaggtgcgtgccgtccatccagacttcggtgctattgtctatttgcactttggcggtattgtcgttgatgatgatgattccatcgtctacataggtaatggggtccagactgcttggttgcgcttcgcagtgcgccacgccgtcagcatggagctccctggcacatgagctgcccgacgacaattgacaaaaggcggtgctggccgaagccgtgcagtccttgacggtgtagacttcgttattacattcagcgatgacgttgtcggtgattcgcagcatggtggctaacggggaaaatagtaatctttttgcaagcaaacttaatcttaggaaacttaatgatggtcctgaactttagtgtttatttctatttgcctattgttcgcgtccatcaatcgcgcttctagtcggttgtgtgcgccgagaccagagaccagacaaagataggagaaggatgaatccggtcctgtgtgtgaaaattttactgatattttttgtatttaatgcgtaggaaacccaccaccaaaaacttacttaactattgtgtgtgtcgaatggtgttaagcttaaatcttagtaaatctaaacgtgccaagtagcttgaaagaccttacagccctaattaagggcattgaatatgggtgagtcaattgaggttgtccttatggaccacccctccccttaatgaggactgtggtcgccatgtccgcttcgacagctctttcttcgcacagaggcgtgagtttgttgccgagtcttcggttggatttgaccaacaccttctcaccgacttcaaatacccggttttgccgagaggcgttctctctggccctgagcgcggtttgagcctttttgatcttattgtaaatttcctccaagtggctcatcggggtgcgcaaagacgatgtcagccggccttctattgacaaccgagtgaatcgacttattatactgtgtggtggctaacatgattaactctatcagtgtcagcctattcccttgtctattttcatgcacctggcgagtttcagtagtgtgctatggaagcgctctacctgcccgttggaggtgctgtgcgatggtggagcattcgtgatgctaacaccaaagttgttggacagcatagatgaaatttgtatgcgaattcaacgatggttcgttgtcgcagtatatcatcttggcccttgggaaaaagttcatgagctgaagcagcgctggcttcaggtcctcaatggtccgcgatctaatgggctgtacgacggcaagtgtggaaaacttg

SEQ ID NO: 31073 - DNA, 315 bp, DROSOPHILA
atgctgcgaatcaccgacaacgtcatcgctgaatgtaataacgaagtctacaccgtcaaggactgcacggcttcggccagcaccgccttttgtcaattgtcgtcgggcagctcatgtgccagggagctccatgctgacggcgtggcgcactgcgaagcgcaaccaagcagtctggaccccattacctatgtagacgatggaatcatcatcatcaacgacaataccgccaaagtgcaaatagacaatagcaccgaagtctggatggacggcacgcacctcatttctttcacccagcacgccacgataaatgaataa

SEQ ID NO: 31074 - protein, 104 aa, DROSOPHILA
MLRITDNVIAECNNEVYTVKDCTASASTAFCQLSSGSSCARELHADGVAHCEAQPSSLDPITYVDDGIIIINDNTAKVQIDNSTEVWMDGTHLISFTQHATINE

SEQ ID NO: 31075 - DNA, 2798 bp, DROSOPHILA
aatgagtcagcgagtgactctcgactccatctgcccacagcgagaatatgtatacgtaactgtgcctttattatactttcacctccatcgcctttgcctcgcacacatatgagcaatcaacttggtgctgcacgtagcaaggtaaatctggaacataactgcgggtaatgacggggggcgattcggaaggatgcgaggattggcacagaggcgtcctcctgcagcgtttgatttcaatttgattgaaattgtttgttcgctgatattttaagctgattatatgcagagcatgctttgtgcgatttcacttgttaactgactactaacagaacatcggtggaaatctacgatacatttaattgcactcttacatatatactattattgaaattttgaacaacttttgtgataaacaaaagacgctactaatacatacaaagtacataattctgcttaatcgaagcaaatgctgtagcaagcagaacacgaatgtcttagcaagcagtaaagcgactgctttaaagattatccataggggttcccagaatctgaatgcgtaattatctttcagatcttaaagagctcaatatatgaaaagcacgctatgaaaaattgtttaatctccgctaaaaaataattcgaacattaaaagatgcgtggagcttggtgttgccacttacaatgtagattatagagttaccagattagattcagcttttaagctgaaatcatgccagcgaaacaagtaagtagctaagtagcttggtgccaaacaattaggaaaataggctaaggatacaacatactctggtcacactatagaaagaaaaaatcgccagtcataccatgtgtgtgaaagaacaaagttgaattttctgattgtactcggcattaaagattgttcgacttaaaaaaaaaaaaaccaatccaatagagcaggtaattgtccgcacctttcagtgattcagtaaaaaacatcttgcaatcatcgcagcaaaaaatgagtacagtcgcaagcaacgatcagcacgtggacaccggcgtattgccggtgcccagcacgaacagccctagctcccagatcgagcagaagggcaatgaagcaatcgtgcccaactacaaggctgctactgccggcgagcagggcgaggcacaggctggagctacctgcactacagtcgctgttcgtccgtcaggtgttgccacctctgccgacatagtgaaagggtcatcatctgtgagcagccacgtgcagccgtcatggcggagctccttcgccaggtcccaggacaagaagtgcggcatttgcttcgagacgatcatggagaaggagggaggagataagcgtttcggcatcctgcccagctgcaaccacgtgttctgcttccagtgcatttgcacatggcgtcatgccacacagtatgcctatcaagtgacgcgagcttgccccgaatgtcgcgtgtggtctaactttgtatgtcccagtgcattttgggtggaggaaaaggtggcgaaggaccagctcatcaatgatcacctcgccgctatgcgtgcaagggactgcaagtactttaaacaaggacaaggcgtgtgcctctttggcaacaagtgtttttacaagcactctatacccaacgcagattacgtcgatgtgggattgccgacccatgctctagggctaccgattccatcagatttttcgggacttggcaattgtcttattttggttcctttcccgaatatgttttttgatgatttcagcaattccgacgactacgatttctcggacgtaaactagtctgacgaaacgggaggagatgagaaaaaaaccaagttaataatccacgaaatgaagcgatgtattgtatgtagctgccaaattttgcttacagaacaatcattcaccacttaattccaagaaatttgggacactttttgcatgcattaaattttgacttgcattaaatttcattcacaagtggcttatccttaaactgaactgaactgaatatgagtatcaatagctttaaatgcgctaagcagtgaaaattacattttgaaaataggtgctggtctggaatttacaactgataacctgcaagcctgcaggcatttaatatcaaaaaatcaatgtattaacctagcagtaacttatcccttttggagaattttccttttcaaaatgaatctctatgaaatgtatttttatacaattaaataaaggggactaaaatgaaaactttgtttctttatctttatcgtggtcaccccgcacttcgaacactttccacacctgaaacgaacattgctcacttttccacttggccatgtgctcattatctagccaaccgcaatacgtggaaaacacggcgagccccattagcaatcgttatcttcagagatggccaggagaattcccattaactgcatttcagtgaaatgtcaactggatttttctcgtaccagttttccgcttggctcgtcgctgatgtgtttcagttgctttatatgtatttatttttgtttttgcccgtgagtatcctttttggctgaaaggattatccgagctgctgctgacgtccttctgccgcataagttgtgcaaatatatacacatgcaatgacttacatctgatttaatatgataattggaaagtgagtccgtagataaagcaagccagcccccatgcactcggctttcccccaccaagtgccaccttgaatgtcgctttaaatgcctcgtccgtctaactggatgactgactgggtcctgaatgaatcactagctggcgtttagca

SEQ ID NO: 31076 - DNA, 798 bp, DROSOPHILA
atgagtacagtcgcaagcaacgatcagcacgtggacaccggcgtattgccggtgcccagcacgaacagccctagctcccagatcgagcagaagggcaatgaagcaatcgtgcccaactacaaggctgctactgccggcgagcagggcgaggcacaggctggagctacctgcactacagtcgctgttcgtccgtcaggtgttgccacctctgccgacatagtgaaagggtcatcatctgtgagcagccacgtgcagccgtcatggcggagctccttcgccaggtcccaggacaagaagtgcggcatttgcttcgagacgatcatggagaaggagggaggagataagcgtttcggcatcctgcccagctgcaaccacgtgttctgcttccagtgcatttgcacatggcgtcatgccacacagtatgcctatcaagtgacgcgagcttgccccgaatgtcgcgtgtggtctaactttgtatgtcccagtgcattttgggtggaggaaaaggtggcgaaggaccagctcatcaatgatcacctcgccgctatgcgtgcaagggactgcaagtactttaaacaaggacaaggcgtgtgcctctttggcaacaagtgtttttacaagcactctatacccaacgcagattacgtcgatgtgggattgccgacccatgctctagggctaccgattccatcagatttttcgggacttggcaattgtcttattttggttcctttcccgaatatgttttttgatgatttcagcaattccgacgactacgatttctcggacgtaaactag

SEQ ID NO: 31077 - protein, 265 aa, DROSOPHILA
MSTVASNDQHVDTGVLPVPSTNSPSSQIEQKGNEAIVPNYKAATAGEQGEAQAGATCTTVAVRPSGVATSADIVKGSSSVSSHVQPSWRSSFARSQDKKCGICFETIMEKEGGDKRFGILPSCNHVFCFQCICTWRHATQYAYQVTRACPECRVWSNFVCPSAFWVEEKVAKDQLINDHLAAMRARDCKYFKQGQGVCLFGNKCFYKHSIPNADYVDVGLPTHALGLPIPSDFSGLGNCLILVPFPNMFFDDFSNSDDYDFSDVN

SEQ ID NO: 31078 - DNA, 4858 bp, DROSOPHILA
ggctttttgctttcggggtttccgggcagctggagtattgggtccaggctcagacccgggtgctcctgtttcatccgccgcctgcttgtttttgggcttcggtcctcgacgcttctgctcggttttccctttgggatgtggagcctccatgggaacggatcgccagtcgtctccgtgcttatctagtcgccgttttagaagctccacgtcatgattgcgccttcttactatctttttgatcccatttactctggataaaaggtactgcacatttttgtttacgtttcgtggagcataaaaatgacggttacctcatcacacatcgctcattttccgcctgaatcctttggcacctgtcatacagtttttccaccagctgtttgtacatgagttctttcttatttagcaacattttatacagatattggttatagttcaatatttagaaatgtttttatttacgccatggctcagtgtggccagatgggcgattttcttcttgctccgtctgtcggtacaggcgttgccacgtcatatttattcaaaaaaggactagttcacttattgaactaaatttagcaaaagtgcataaaaactgcttgacataattgtctttaatttaagatttaactggtcataataattactttacatactcgttttatgaaatgacaaaacctgatgcatttaaaattataagttaatgaaaatataaactatttaaattggttaataatataaattttataatttgctataacggttaaagctgttacttttagatgcaactatttaaattgaatatctagttccttaaaactatttacccctatttgcaccagcctggcaactctctcattttgcaaacagccgtgttaagcaaacccacaattagtaacttatgtagttccacaacaacaaccggcatgccaaacaaatcttccagagcagacaggaagacagccagaagcaaatagatatagtgtttgcgccaactattatgtctgcagccaacatgccgacgacaacaggagctcagggatcgggaaaccaagttcccacaactagcactacgattgtaaaccacttccgggagttgatcaaggaaccgaagaacctcgacgaggcggccaactatctgtaccagtcgctgctcgacgacgccgtagtcggaatctttaacgagacacatcatctgcgaaagtcagggaatctggccgccctggacggagtgccggaggactcaacctatcgaatgtgcgagatgcccaacctggacatattcggcatctcaacggccaaaaagccaatggactgcacctgccccaactgtgatcgcctggtggccgccgcccgcttcgccccgcacctggaaaagtgcatgggcatgggtcgtatctcgtcgcgaattgcctctcgtcgcttggccaccaaagagggcgccacatccgcccacctgcactcttcgggaaataccggaggcactgatgatgaggatgacgtggactggtcgtccgacaagcgtcgaaagaaatcaaaccagaactcaaggaacaacggctccaagaagaacaatggcaaaaccttttagtcagagctaacaatcattttcgtagtttattctgccataaaagtacacctttaaatcagtcaccaatgtattctaaactaatgggattttggtgatcgacccctactcttctttgagatcatttgaataggacagcagttagtggcaatatctaatcaattaatatctagatatcataggacaagggtaatataacttttcagcaaataggcgcttttaaacatagactttcctggtgctaaatgaagtaattcaatgtaataatatgaaagcaagccttagttttatattttacaacttaaagagtatatattttggttattttccttccttatcaatggcaaacacccggatatggtcgaccactaggggtgtccagtccgaatttctagacaactcctcgaattgtttgtcagttttggggtgggtgtttaaaaagggcttgtgtttcatttctagaatgtcgtcattgaaattaacattgccgccggcggttaggccaaggactagatggcactaaaaacgaaagatcatagagatattacatcttttagaggaaggcgtcttacctcatgttttcgaaatggttcaagaagtgtcggattgtttactgctccgaagaactcgccatcgaacttaaagataattttgtcagtctgccagataatagtcgtgaaatccgtccccatagtaaatttcccctggcgtacaagcgaatatgatcgaaaaaatcgtcatccgccttatccatacggggcaccagaagaatgtctaaagtaatcaaaaccatgtagtgattaccagctataaaaactaaatatccactcacttggaaacaaccaatcgcctttgggcattttagctctaatctcaactcgcccatatttaaaggtaaagttcgtgtgcatgttggcggatctaaaggtcttggagacccaaggctcccgtttcgatcttgaccccctgtcacactcttttcgtttggctatttgctggtgcagcccagaagagtcatatttcgctcatctctggtaattgatatgtgcaaattgttgttggttataatcgagttgacaggatcgtccacaaaggcaaaaaactcctggtttttcccgccagtattacgatacctaacctcgcgtacccaattcaatgggaacattctgataacgtttctgaagaactcaggttaatctaggcccatcaaataattcgccaattccattatcgttgattttaatctcgaaaaactgagttgcaatcttattatttctctccaccacagtttgaattcttattttggcattgggctcaatgttactttgtaactcaatctttgcaccaatatgcttcgttatcgcaccctttgtcaaccaactcggcttgaaagtatatggactcaatctcttccagatccccgggtaacactatgaatacctccctgcccttcacatttaccactggatgcggcccctccaaggcaatcatcaaagaaacaagacaacctaacaaaattagaaaaacacagcctttccgcatggcggctaccagagaatccagtcttgcaatcattgtgttaacatgtgggttactgcattccctagcatataagctctcaatctttagctgttctcttgtaaaaatatgatagatatgatcacattggtttccaataattaggtcagatatagtattttattcaatgaaatcatagattcacttttttcatagttcacagtttcattagaccaaatatttaattaagtgttgtagcttaatgagatcacgcgagtcatattcattcctcgtattcatcgattgaataaacattaaattgttgtatgaccaacacagcttgatcccaaatgggtgcattggttacggcctttataattttcgatgatagacccgtttcgaaattgcgatagctcttttgctctggcggaatgctgttatccggaaaattgtactctccgccgacagttaggaacaattcaatgtggcgctgaggagttggaattttagtgcaaaaaaattagtattattaagtaaaccaacttctgtctgactgagttcttggacgatcgttgagttcgttatttgagcaaaggtgcgaccatctatcttaaaggttatgctctcctccgtcccaatagacgtgtaagtataaaagtcattcccatagtgatcatccctactggcgaactcctccaattccaccgagctcgttggacaatggcaattcgaatggcatcgtgattaactgaagacagtgtgagtcctaaatgaaggattgcattcgattatccttgttactaatcattaagttcgaaatcacctgggaacaaacagtctccaatggccatcttggtttctatgtctatccgacagtacctaaaggtatccaatgagagtaattttgccgaatcaaagggaggcatacattttcgaaacggcaatctgtacttcttctcgccacatctttgattggaatcgcttttcgaataagcgcagttctccaaatagaaggggtttttcgacccatagttagatttagttacatacgaattggcttttcaattcacaagggccactcccttcctgtgattgcaccacgtgcttccaatttttcaaaggattttcactatctccaaaggactcggtgacaatagcctaccgctgcagcttgcagctgatgggtttgtctctagtgagggaaatcgcgggcaggcagtatttcgtagagctacgtagcttcttacaatctctacttttctcggatgatggtaggaatttccgcagaggctctaccaaagcactgctttctcccaaggatctgatcctgaagcttttgatcacagtttcgttttgatgggtctctacgacggcggatattttgagggtaccactgcccaggtattcccgtatagcctatagtcatagaagggacacttgtccccttcgaactcagtgtaaaagagcaccgacctaatacgatgatcttctattttacttattaatagattgtaggcagcaaaatgtgtggccatcttacctggaagcgatgcccagatccatgtatcgttttcagtgacattcaccaaaagctgaagagcctgaaaggaatcaaagccgaccaactggcttagtattaatgcccagactcatctccattctgtcagataagcaaccatactgaagcatttgatttcactgagtttctcttaggactttatttatttatagatttatagatttcgatcggca

SEQ ID NO: 31079 - DNA, 672 bp, DROSOPHILA
atgtctgcagccaacatgccgacgacaacaggagctcagggatcgggaaaccaagttcccacaactagcactacgattgtaaaccacttccgggagttgatcaaggaaccgaagaacctcgacgaggcggccaactatctgtaccagtcgctgctcgacgacgccgtagtcggaatctttaacgagacacatcatctgcgaaagtcagggaatctggccgccctggacggagtgccggaggactcaacctatcgaatgtgcgagatgcccaacctggacatattcggcatctcaacggccaaaaagccaatggactgcacctgccccaactgtgatcgcctggtggccgccgcccgcttcgccccgcacctggaaaagtgcatgggcatgggtcgtatctcgtcgcgaattgcctctcgtcgcttggccaccaaagagggcgccacatccgcccacctgcactcttcgggaaataccggaggcactgatgatgaggatgacgtggactggtcgtccgacaagcgtcgaaagaaatcaaaccagaactcaaggaacaacggctccaagaagaacaatggcaaaaccttttatgatcatccctactggcgaactcctccaattccaccgagctcgttggacaatggcaattcgaatggcatcgtgattaactga

SEQ ID NO: 31080 - protein, 223 aa, DROSOPHILA
MSAANMPTTTGAQGSGNQVPTTSTTIVNHFRELIKEPKNLDEAANYLYQSLLDDAVVGIFNETHHLRKSGNLAALDGVPEDSTYRMCEMPNLDIFGISTAKKPMDCTCPNCDRLVAAARFAPHLEKCMGMGRISSRIASRRLATKEGATSAHLHSSGNTGGTDDEDDVDWSSDKRRKKSNQNSRNNGSKKNNGKTFYDHPYWRTPPIPPSSLDNGNSNGIVIN

SEQ ID NO: 31081 - DNA, 2847 bp, DROSOPHILA
ggataaaatccaattgtctaattaaacttttcacagtcacagctatacataattgttcctcaattttcgtgaggaattttatttattttaaggtataaaatcctttttctgagactaccatcttctgagcttgaattattattaatttattaaaggaaatgtatattttatcgggtcaattaccttatcgataagatcgggagctttgcaatactgtcgcagttggaaaaagtctaggtgtcgtcagaacgcggattaaaatgtagtttcaaaagtcgtacaattatcccaacttcaagtaaaatggctgcatatgcgagcgcaagaggcaaaattattatcaacgctgcccaaaacatccagaactaagcagccaaaatgttaaaacaaacggttaatatgcatgctcatatgattttgccgcagatgaattttttaatgtacgctcgacaatgcgcttttcgcaacgctcatgcaaattacttgtgagtctccgggatttaaaaaagaatcaatcctagacgaaaactgtaatgttacatagtttgtacgtaaggaaatacataaacattatggaaatgtgccaatttttcaattgtaatgaaccaaattgcgtttgtttactttttgtatttcgatggtataggtcaagtttcacaacaatgtatttcgacttaaggcgcttttggacttaaataatcattgatagcaaaacaagaaagaaatgaaaatatgtagaaaatccatacatcacctattccttaagtacagtgataaagcgtagcactgtagcgaaatgatttaaaaaagacgaaaaaataaatacatataccgatactttgttttgatactgctcgcaattcacaacactgccaagcggcgttacctcaagttggcgtcgacaaacatttaaagttttgttatcgggaatatcaagttcacaaatatttgtatattcatttgagaattttttgtgcgtgacgatatccgtttaaaaacaatgccattcggtaactatgagctttatatagccacatctgatccactaaagcagcgtgtatttcagccaacgagggaaatgatccaatagccgctcgcctctccaaatgctattggaatctttcgtctccattcttgaaggatgtcattccaaaaaagcgtccgtccaaagcattcaatcgcaagccgccgaccaaactggaatccgaggaggaggagtaccacaaattcgagcgtggtctccacatttctgacttaggccccaagttaaaggagacggatggacagccaaagcttaagttcgagctggcagacgactacaagagctccaaacactgcatctgcatgcgctcaaacaccgcatacgagtgcgaacgatgccatcagtacttctatggtcgcctcgcccagatttgtgatctgcatccaaatgtatgtggtcctcttaagggacaacacctaaggatatcccctttgagggattttatgtaatatgccaccaagatagatatagctagtaacaccaattggtggttgccccataggaccgagttatacaaaagattagcgaagggaactgtatttaatagtacatatttataatacgcgtatatatagatatgcgctgttatttcttcgatcaggcatctccctacccatatcaaattctttattgtattgtaaaatcttatcttttttctcttccttgctaggagtttttccttatggactttcgcaattgtccattctgtaaggcacccattgagatgattaagaagtcacctatcagctgggagacaatacgtaagattgaagaagccgaattgcccagtgatggggatctatgattatgagtttgagactcagctgcatgttaccttaaatacattgttaaatgtaaaaacaagtgtatatatatatttaatatatacttttcggacttcggttaaaaggggctgagtttgattgtcccttggcccacatgtcagtattcattttgcagctcaacatttatgtatgatgtgttagacaggaactgcggcacggacatgaccacgataaacccttatagcccagtctgcagattggcactgcggcagtgactcgacgcaaagtgcatggcatggatatgcatgagcttacagctgtttccaaaatggtagttgcttaaagtttgcttttataaaaaaaaactcttgaattggtgcaatatgcaaaaatcatattttaaatcctgtttacttttatgaaatggatatttaaatggcttataagtaaatctttttaaaatatcaattattatttgtatcgtagaaaggtccctattttacttcccagtacttcagttcgcaagaatttccacgtactaatggggtaactagactgcgcttctctctcaacatgctgatacatatcaggttagtatataataatatgtgaacttgcattaagatatctgccatctttgcagtgcagcgcgaagtctcagcttggcaccattgaaatcagcggacaaattcatgtcaccagataacaattcaatcacttaagagttcagcacattttgaaatcgctttacaatgccccatgccaagtctccatgggcacattgtggtgtcctccttagttcttcgtcctgcgctgctctggctaactcctggtggtctggtaagtggcgacgctttagattgcatttgccacgacttattttcagttcttttcctccgtcgttctggctccatgcactgcagttttcccaacgacttggcaagccattctatggattcacttgttcttggacttccacttgggggttttctgcatccgcattctggtgcttctggccat

SEQ ID NO: 31082 - DNA, 483 bp, DROSOPHILA
atgccattcggtaactatgagctttatatagccacatctgatccactaaagcagcgtgatgtcattccaaaaaagcgtccgtccaaagcattcaatcgcaagccgccgaccaaactggaatccgaggaggaggagtaccacaaattcgagcgtggtctccacatttctgacttaggccccaagttaaaggagacggatggacagccaaagcttaagttcgagctggcagacgactacaagagctccaaacactgcatctgcatgcgctcaaacaccgcatacgagtgcgaacgatgccatcagtacttctatggtcgcctcgcccagatttgtgatctgcatccaaatgagtttttccttatggactttcgcaattgtccattctgtaaggcacccattgagatgattaagaagtcacctatcagctgggagacaatacgtaagattgaagaagccgaattgcccagtgatggggatctatga

SEQ ID NO: 31083 - protein, 160 aa, DROSOPHILA
MPFGNYELYIATSDPLKQRDVIPKKRPSKAFNRKPPTKLESEEEEYHKFERGLHISDLGPKLKETDGQPKLKFELADDYKSSKHCICMRSNTAYECERCHQYFYGRLAQICDLHPNEFFLMDFRNCPFCKAPIEMIKKSPISWETIRKIEEAELPSDGDL

SEQ ID NO: 31084 - DNA, 2225 bp, DROSOPHILA
actcaaagaaatgtgagaaggaggagaagctggagaaggcaaaggccaagaaggcgattcagaagggcaacatggacgtggcccgcatccacgcagagaatgcgatccgccagaagaaccaggcggttaactacctcaggatgagtgcccgagtggatgcagtggccagtagggttcagtccgcactcaccacccgcaaggtcaccggctccatggccggcgtggtcaaggccatggatgcagctatgaagggtatgaacctggagaagatttcctccctgatggagaagtttgaatcgcagttcgaagacctggacgtccagagctcggtaatggagggcaccatgtccgacacggtaaccacctcggtgcctcagggagatgtcgacaatctgctccagcaagtggccgacgaggctggcctcgaactcaacatggagctgcccagcggagttcagagccaatccgttggagcctcgacagcagtgtcccaagagcaagacgagctcacccagcgactggcacgtctccgccaggctgaataaaaatagcgacgccctgcccgttgaatttctgttttagcaattaagtacattcaaaatataaataagtataaactcagtgattggaagtctatcgatgctgctttgtctaccataatcagaagaattgccatgaatctttaagtgtaagtgtgctgtttgtataggcttcaaacggattatgatttacatgcttttctaatgcaatatacgataatcatgttttaaaggctttgttgttatagttatttgaagacctgccaatttttgtaacttgtttacttggaaagatatagcataatttggaaatagaaatggttctgcagcaatcacaactttcattgctttggttactataattcatttctggtcttagcttttatttgtcttaatattatatttaaaagtatacaagccctttatcttaaaactagaacacgccaagcaatcgctatgactcaggtcaacagtggaggttgaggttgttgatgcggtggtgcaatgactggattgggattgatgggtgcctgtttggctttttgctttcggggtttccgggcagctggagtattgggtccaggctcagacccgggtgctcctgtttcatccgccgcctgcttgtttttgggcttcggtcctcgacgcttctgctcggttttccctttgggatgtggagcctccatgggaacggatcgccagtcgtctccgtgcttatctagtcgccgttttagaagctccacgtcatgattgcgccttcttactatctttttgatcccatttactctggataaaaggtactgcacatttttgtttacgtttcgtggagcataaaaatgacggttacctcatcacacatcgctcattttccgcctgaatcctttggcacctgtcatacagtttttccaccagctgtttgtacatgagttctttcttatttagcaacattttatacagatattggttatagttcaatatttagaaatgtttttatttacgccatggctcagtgtggccagatgggcgattttcttcttgctccgtctgtcggtacaggcgttgccacgtcatatttattcaaaaaaggactagttcacttattgaactaaatttagcaaaagtgcataaaaactgcttgacataattgtctttaatttaagatttaactggtcataataattactttacatactcgttttatgaaatgacaaaacctgatgcatttaaaattataagttaatgaaaatataaactatttaaattggttaataatataaattttataatttgctataacggttaaagctgttacttttagatgcaactatttaaattgaatatctagttccttaaaactatttacccctatttgcaccagcctggcaactctctcattttgcaaacagccgtgttaagcaaacccacaattagtaacttatgtagttccacaacaacaaccggcatgccaaacaaatcttccagagcagacaggaagacagccagaagcaaatagatatagtgtttgcgccaactattatgtctgcagccaacatgccgacgacaacaggagctcagggatcgggaaaccaagttcccacaactagcactacgattgtaaaccacttccgggagttgatcaaggaaccgaagaacctcgacgaggcggccaactatctgtaccagtcg

SEQ ID NO: 31085 - DNA, 225 bp, DROSOPHILA
atggaggctccacatcccaaagggaaaaccgagcagaagcgtcgaggaccgaagcccaaaaacaagcaggcggcggatgaaacaggagcacccgggtctgagcctggacccaatactccagctgcccggaaaccccgaaagcaaaaagccaaacaggcacccatcaatcccaatccagtcattgcaccaccgcatcaacaacctcaacctccactgttgacctga

SEQ ID NO: 31086 - protein, 74 aa, DROSOPHILA
MEAPHPKGKTEQKRRGPKPKNKQAADETGAPGSEPGPNTPAARKPRKQKAKQAPINPNPVIAPPHQQPQPPLLT

SEQ ID NO: 31087 - DNA, 4759 bp, DROSOPHILA
aagcatacatatatgagttatttctgaagccgaaggactaaaacaattttgcttaatataatgttcttttgattttcacttacaattaaaatccaaattgtattttcatagagtttatgtgccttttaaagcttttaagcgatctaggtcagcgatcttttgcatcccggttttggaatactgttgaaagtctgtccgttgcccctttaagtcacatggttgcatccattatgtgactcctggatgcggcatagacaaagttggcttaagtacgccgggcccgcctggccattgtgctccgtgcccagcgtgactgctgcatctgcagctgccccctttccattattgaagtgtgcacttccgcaaaatggtatttggagcaagcacataagcttaacccctcggtgcagttcctctgccaatagaagctgtgaatttagtggcacttgcaattttatggcaaacaatgaaagggacaccagactgaaggagcaaagtgcgccgatgggagattcgtccctcggcaatggctatttatttgcatgccccactaatggcagctattatatatatatattaggctaaacaaggcttcttgaatacttgctggcgttcgtggatccatttcgatattactgtgaatagaaaaagaatctcacttttttctttgtacacatgtatatagataaacttactccatctggagcccaggacgacaggacaaacggaatgttctgttagcggatcaggctctccggcgtgattcaagttgaaccaaatcaatgcactgccttttttgggctgcacggcaatcttaagttttgtgaaaactgtagttccccccaaaggaatgtcagatgcctaaattaagggtgtacaaataaaataaacaagaaaaaattaaaaaaaaaaaacacttacgtagattaacgctgtagctatgcgatcgcctccgaaatcagcaaaaaagtctggctgaaagaattgtatgcgctatgtttcaactatgtttcactaatctgagagccactcacaggtcttttggccaactccacgtagtcaacatgctttccaaaatgaccacccagtccgtaattggtcaggtacaggaccatgttatcgcgcatctcaagaccactcatatccgccatccgccgattgatgctcaaagtgaaaggtgctgtggtgccctgaaaagcaatcattttcaccactcggtcctgttgctttggattgccctttttgtcaaagtctacatatgtccagccatcaatcatggagccattatacatggctatgtctcgcattgatttgaattcgttttcatacagcacgtcgtgatacagaagtatcattggctgcacgctcagaaactccaacttaagtggagctaacttaaggaacgcagaggtgtccctattatagcgacatattagttctggcgaggatttctttggccactctccacggcaacctcgctccagcttggttggtttgcgcttcagtcgggctgctacctcttggaagatcttctcgtcccctgataggtattcatcaattaacttcttaacgttgtcgtagttgtcttcccgtgtgacctctttggccaatcggttccattcagacttctctgtcggagtgggcttacttttatccgaatttagggcttaaaatggaattgaatggcattagtcggcatcttcgattcgtttatgttccggaagtgatcttacattctttcagcaaggccttggcatacttcttgtatatccttttccttttcaagcccaaaactttcgcgtagatcatgccacgaggatgtgtgtgaacccttagggccatgcgataccagtgcgtggatcctgagaattgagtttgattgtagtaataatcacccagggcaacacaatccggagcagtcaaatgggagctacaaggagaatgtcattgaatattctcaagattgcatattaaatttgccaacccactttaatttctttcccatgaggacacctttcgtcaaatcctctgcgtgcagattgtgaaatttttcaatgcgcgtcataccctttagggcaactttgaggtcatcgtcaatcggcgcggacttcaactgcacttccatttctttgattttcttcgaagctatagccaattttatatatctcagccatttgggccaatcttgattgaggcgtctgagcatgggaaacgcatttagaggattggacacatactcttccttctcctccagcgttgttaaagttactcgtttcagcgagtcttgatatctgaaaataatatacaataaaatgtgtctcatataatttattatatagtataattcatagcacatttcaaaagattttttttgaataaaaaataatttaccctacttacaatttaatcagatctaacttggactgcatttcctgaacgtatatatctaagttcgtttttagagattcttccatttccaaaagtttcatcatgctcatcacagatgtgctgtatatcattttctcctctgacgtttcatttctttccttgcaaaagttctgcggaacccaaatgaatacaagacatatctgaagcacgaaccacttcatcttgacttgggtagactaatgcactgaatttctgttctatttattagactaatcaacaatttcatggtatattggtaatggctgatacatttttggttccgccacaaaaaattcgtttgtttaagatttgttttggtatcttttaactatgaaaccaagtaactatcttataatattgctcgcatgaaatctaaaaaaaaacattttttaactagagttgtatttactacgatttgcatgggaagctaaacatttgcggaaacataggaacccactttgtgagcgctgtaaaagaaaacttcctatatgtagtacaatcgtacgtatatatgaataagctaacctactccatctgtcgccattgagaacaggacacaccgagtgtaggcttcttatgtcaggttttccgtcatcatgcaaattgaaccagtacaacatgctgcctttttgtgggaagaccgtaacattaatttccggaaaaacagtggcacctccttgtggaacttcactagcctgtaaattggaatttttatatatatttgaagggaaagcaatcatctttactcacataaaaaagaatgcttgccaacctatctcccaacgtcgtaatatttggagtttcaaaaccatcggacgagtagtcaaagtgcggttggaaataggtgcccaatccatagttcgcgatctgtagtttttcatcttttaagaagttgaatcctgtcatatcaattatccgctgattgatgcgctcccgaaccaatgaagtatttgaccaccaatcatatcggacaactgtatctctgatttctgtgccatttctctggctggcgtagccattaaccatattcatcgattgtcctttaagttcacgaatctccgaatcgtacagaacttcgtgatacattgccataaatggatccaaactaatttcctccaattttagaggagccaatcgcagaaacgtattcgcagtgcttttgtatcgacacacaagattcgtcttttggcgatacagtcctcgacaaccaagttcacagttggaaggacttctttttacctgatacagatctttctctacttcaacgtcgttctgcggttcgttcaggtcagacataatattatccagctcctcttgactggcctgtaccattataaaggcttcttcaatggacttcgaaggctcagatgttgtagagcctacaattagttgatataagcaaaaggagaaaacaataaagcctagtcttaccgtatttgaagagggatttaatgtattggcgatgaaggtgttcagatgggtcgcccaaaatctgaataaataattgttcgggattttccaattcgcgtttgcaagcaattcgataccatttggctgctgtctgatagtcgctttgctggtacatcgaatttcccatggctatgaggtcgcgatatgtaagttgaacgctgcagattcgatttcgctaataattctccaattttaattactattctatatacttgtactgaactccttgcaaaacaccttgtgccagatcgtcgattttcaagtcatatattttttctatgcgttgaattccatgcatggccgacaacatgtccacatcgttcggaaccattttcacaaggtcaaccagaatactctgatttcctgtatatataaaaatgtatattatatagtatagtagagtatattagtatatattactacaaagtattaatagagctctatttcaatttgatgttactagttgctagttactacaaactagtttctacttgctagttactacttattagttactacgtactagctacgactaatactagtttctagttacaacataccttctccaatggcttctttaaagtattcgtgccattttggtaaatcctcgtgcgtgcgtcttagcagtgaaaatgcatttatgggatttgaaacgtattgcactttttcattgaggcttcgatgtaattcataacccactgacgacaagtacctaaaatttttcttttacttgtgataaaaacaaattttaggttgtgttacattcgaagtgcttcgaatttttctcctagctgatcaacttggtttaaaaggttatcggtgaatttttcttccactttgagcagtttcagaagtcccacag

SEQ ID NO: 31088 - DNA, 1726 bp, DROSOPHILA
atggtacaggccagtcaagaggagctggataatattatgtctgacctgaacgaaccgcagaacgacgttgaagtagagaaagatctgtatcaggtaaaaagaagtccttccaactgtgaacttggttgtcgaggactgtatcgccaaaagacgaatcttgtgtgtcgatacaaaagcactgcgaatacgtttctgcgattggctcctctaaaattggaggaaattagtttggatccatttatggcaatgtatcacgaagttctgtacgattcggagattcgtgaacttaaaggacaatcgatgaatatggttaatggctacgccagccagagaaatggcacagaaatcagagatacagttgtccgatatgattggtggtcaaatacttcattggttcgggagcgcatcaatcagcggataattgatatgacaggattcaacttcttaaaagatgaaaaactacagatcgcgaactatggattgggcacctatttccaaccgcactttgactactcgtccgatggttttgaaactccaaatattacgacgttgggagatagatatcaagactcgctgaaacgagtaactttaacaacgctggaggagaaggaagagtatgtgtccaatcctctaaatgcgtttcccatgctcagacgcctcaatcaagattggcccaaatggctgagatatataaaattggctatagcttcgaagaaaatcaaagaaatggaagtgcagttgaagtccgcgccgattgacgatgacctcaaagttgccctaaagggtatgacgcgcattgaaaaatttcacaatctgcacgcagaggatttgacgaaaggtgtcctcatgggaaagaaattaaactcccatttgactgctccggattgtgttgccctgggtgattattactacaatcaaactcaattctcaggatccacgcactggtatcgcatggccctaagggttcacacacatcctcgtggcatgatctacgcgaaagttttgggcttgaaaaggaaaaggatatacaagaagtatgccaaggccttgctgaaagaatccctaaattcggataaaagtaagcccactccgacagagaagtctgaatggaaccgattggccaaagaggtcacacgggaagacaactacgacaacgttaagaagttaattgatgaatacctatcaggggacgagaagatcttccaagaggtagcagcccgactgaagcgcaaaccaaccaagctggagcgaggttgccgtggagagtggccaaagaaatcctcgccagaactaatatgtcgctataatagggacacctctgcgttccttaagttagctccacttaagttggagtttctgagcgtgcagccaatgatacttctgtatcacgacgtgctgtatgaaaacgaattcaaatcaatgcgagacatagccatgtataatggctccatgattgatggctggacatatgtagactttgacaaaaagggcaatccaaagcaacaggaccgagtggtgaaaatgattgcttttcagggcaccacagcacctttcactttgagcatcaatcggcggatggcggatatgagtggtcttgagatgcgcgataacatggtcctgtacctgaccaattacggactgggtggtcattttggaaagcatgttgactacgtggagttggccaaaagacctgtgagtggctctcagattagtgaaacatagttga

SEQ ID NO: 31089 - protein, 573 aa, DROSOPHILA
MVQASQEELDNIMSDLNEPQNDVEVEKDLYQVKRSPSNCELGCRGLYRQKTNLVCRYKSTANTFLRLAPLKLEEISLDPFMAMYHEVLYDSEIRELKGQSMNMVNGYASQRNGTEIRDTVVRYDWWSNTSLVRERINQRIIDMTGFNFLKDEKLQIANYGLGTYFQPHFDYSSDGFETPNITTLGDRYQDSLKRVTLTTLEEKEEYVSNPLNAFPMLRRLNQDWPKWLRYIKLAIASKKIKEMEVQLKSAPIDDDLKVALKGMTRIEKFHNLHAEDLTKGVLMGKKLNSHLTAPDCVALGDYYYNQTQFSGSTHWYRMALRVHTHPRGMIYAKVLGLKRKRIYKKYAKALLKESLNSDKSKPTPTEKSEWNRLAKEVTREDNYDNVKKLIDEYLSGDEKIFQEVAARLKRKPTKLERGCRGEWPKKSSPELICRYNRDTSAFLKLAPLKLEFLSVQPMILLYHDVLYENEFKSMRDIAMYNGSMIDGWTYVDFDKKGNPKQQDRVVKMIAFQGTTAPFTLSINRRMADMSGLEMRDNMVLYLTNYGLGGHFGKHVDYVELAKRPVSGSQISET

SEQ ID NO: 31090 - DNA, 2821 bp, DROSOPHILA
cggccttcttgatcatgtggtacagatcctcgggaatgtcgggcttcagacccaccgacttcatgatgcgcaggatcttgtttccgttgacgaaacgcacctgggcaactccgtgcgagtcacgcaggatgatgcctgtaaaaaccggattccggattaacataacctcaaacaacaacatactcggcagtgctcaccgattttggagggagtcagacccttcttgcccagcttcttaatctgctccttgacatcatctgcgttcagtttcagccaggatgggacagtgcgtctgtaggggagggctgattgggaaatacccttgctgtgaacgaaatacacaaatgttagtacgcgtttatggcggcgcctgtcaaatgcgaatacgtctgcaccatgtgcttgcctttgcggtcgataattaacacactaaaaccaccgtagaaacgcattaaacacattcattcgttcaacccgcacggcagacacattttgcatgcattcagcttggcacacaggcatcgaaaacaatgaaaaatttcatttttacccaggagcgtgcatacgacccatcttgatagtctagtttttgacaccgaaaagaaggtggagacttttggcacgttgacagctctacgatgtggagacctgtcaaagcagctatcgataacgggatgcttagcgatattttttttaatgcgcttacaatatgttgtgatattcaaaactttactttaagtgactattacaggatttattaaagggaaatagaaagctaatttgtgtaaaaataattcatttagctatcgatatatgtatactattgtcagctagactctacacaagcacaggagtgctttgggaaggtttcatttcttgcagcacgctaaacggtcacattattgtttcccgaccaagaatttaccaataaaatgcatttaaataaatatagtgaagtagtggagcggcttgagaacgaggaatttgaggtgagtgatcgtttaatatattcactacagatggaattctagaaaaccatacttttacagcaagtcgaactgggagctgaagtctaccagcaattacttgctatttacctctatcaaaacaaactgtaagtgattgatataaaagaaatacatattttaatcttgtgctacagggctgatgccaagttgttgtggatgagagttccagctaacctaagggatgacaaggaactgatccagctgaacctgctcaatattgccctgcagaacaataactatgccgatttcttcaaacacatcaagtatgagtggtcggaaagagtaaagtcacctgtggaggatcttctaagtatggctatgcctaaaagcttactaattggatataaaaacttataatgtatctacttagataagcaacgcgaagagctgttcaaactaatgggcagcgcatatatgtccatttaccagcacaatctactggaattgtcactaatgtcggaggacgaactgaaacacgcctgtgcggccttaaattggactgaggaactggacggtgaccgggtaatcctgaagcccaaggttcaggaagcaccgccagctcgtggaaacgatgaccagttgcttaagttgaccgagtttgtaaccttcctagagaattaagcctcaataaatttcaatacatttaattggatttttgtatacatttgaagaaaagttatggtcacacagcctgtgtcaatctaaaaaacactcgattaatatcgttattagacatatttataaatattagctaaatcaccgaattggcgccattgggttttgtacgaattagcttttggaagtatacctaaaaattaggaactagaaactaaggctacagaattataattttccatgtaatctatgtagatatataatcatattcttggcctaatttaataagtgtgattttaatattcttcagaattcagttaaataaaatatatttcagaaaatctatcgacgcgcggaaacgccgatagtatcgaatgataaccgatatgcgttccacctctaccgttgtgtcacttgaagaaaaaaaatattaatttgcaccaacgacgtacgtttttcgttcgaaaagaacagcaatcagcggataattgtatggattcttagaaaatttgcagcgacgaaatatagtaccttgcgaaattattttgtaaccttgaagaagtaaactgcgaatcgccagagggccaaatagaaatctcgtcgtttgcctgcagaatagaagacccgattttcagtgcgcttgtgtttgtgtgtgagcagcagaaacagcagaaaaaatggcagcaagcgacaaatcggtcgacgattcactatatcccattgcggttctaatcgatgaactgaaaaacgaggacgttcaggtttgtcatgtcctaaaacctgaaatccaattgtatctcgcgaagaatgtgcagaaatattctagtgattaaattttggggtagcgtgcccacactccctgctttatctgcgattgtatttgtgcaaaaatgcgtcacggtgtgtgtgtgcgtgtgtgcatgggcatttgtgttggtgcgagtgtgtgcatcgaaattataccgaatttcgatatacacaagattagcgttttgcgaaaaaaattactattatcaattaattgcaattatgggtatacgtctttatccgctttttatttgtagattttgttatccttcatttatgtatgtataagtataagtttttacgcatttgctatttgcaaaaacaatttacaactgcgcgtgttaaaaatagatcaacttcaatcaatagta

SEQ ID NO: 31091 - DNA, 713 bp, DROSOPHILA
tttaatatattcactacagatggaattctagaaaaccatacttttacagcaagtcgaactgggagctgaagtctaccagcaattacttgctatttacctctatcaaaacaaactggctgatgccaagttgttgtggatgagagttccagctaacctaagggatgacaaggaactgatccagctgaacctgctcaatattgccctgcagaacaataactatgccgatttcttcaaacacatcaagtatgagtggtcggaaagagtaaagtcacctgtggaggatcttctaaataagcaacgcgaagagctgttcaaactaatgggcagcgcatatatgtccatttaccagcacaatctactggaattgtcactaatgtcggaggacgaactgaaacacgcctgtgcggccttaaattggactgaggaactggacggtgaccgggtaatcctgaagcccaaggttcaggaagcaccgccagctcgtggaaacgatgaccagttgcttaagttgaccgagtttgtaaccttcctagagaattaagcctcaataaatttcaatacatttaattggatttttgtatacatttgaagaaaagttatggtcacacagcctgtgtcaatctaaaaaacactcgattaatatcgttattagacatatttataaatattagctaaatcaccgaattggcgccattgggttttgtacgaattag

SEQ ID NO: 31092 - protein, 134 aa, DROSOPHILA
MRVPANLRDDKELIQLNLLNIALQNNNYADFFKHIKYEWSERVKSPVEDLLNKQREELFKLMGSAYMSIYQHNLLELSLMSEDELKHACAALNWTEELDGDRVILKPKVQEAPPARGNDDQLLKLTEFVTFLEN

SEQ ID NO: 31093 - DNA, 6055 bp, DROSOPHILA
cttttacagcaagtcgaactgggagctgaagtctaccagcaattacttgctatttacctctatcaaaacaaactgtaagtgattgatataaaagaaatacatattttaatcttgtgctacagggctgatgccaagttgttgtggatgagagttccagctaacctaagggatgacaaggaactgatccagctgaacctgctcaatattgccctgcagaacaataactatgccgatttcttcaaacacatcaagtatgagtggtcggaaagagtaaagtcacctgtggaggatcttctaagtatggctatgcctaaaagcttactaattggatataaaaacttataatgtatctacttagataagcaacgcgaagagctgttcaaactaatgggcagcgcatatatgtccatttaccagcacaatctactggaattgtcactaatgtcggaggacgaactgaaacacgcctgtgcggccttaaattggactgaggaactggacggtgaccgggtaatcctgaagcccaaggttcaggaagcaccgccagctcgtggaaacgatgaccagttgcttaagttgaccgagtttgtaaccttcctagagaattaagcctcaataaatttcaatacatttaattggatttttgtatacatttgaagaaaagttatggtcacacagcctgtgtcaatctaaaaaacactcgattaatatcgttattagacatatttataaatattagctaaatcaccgaattggcgccattgggttttgtacgaattagcttttggaagtatacctaaaaattaggaactagaaactaaggctacagaattataattttccatgtaatctatgtagatatataatcatattcttggcctaatttaataagtgtgattttaatattcttcagaattcagttaaataaaatatatttcagaaaatctatcgacgcgcggaaacgccgatagtatcgaatgataaccgatatgcgttccacctctaccgttgtgtcacttgaagaaaaaaaatattaatttgcaccaacgacgtacgtttttcgttcgaaaagaacagcaatcagcggataattgtatggattcttagaaaatttgcagcgacgaaatatagtaccttgcgaaattattttgtaaccttgaagaagtaaactgcgaatcgccagagggccaaatagaaatctcgtcgtttgcctgcagaatagaagacccgattttcagtgcgcttgtgtttgtgtgtgagcagcagaaacagcagaaaaaatggcagcaagcgacaaatcggtcgacgattcactatatcccattgcggttctaatcgatgaactgaaaaacgaggacgttcaggtttgtcatgtcctaaaacctgaaatccaattgtatctcgcgaagaatgtgcagaaatattctagtgattaaattttggggtagcgtgcccacactccctgctttatctgcgattgtatttgtgcaaaaatgcgtcacggtgtgtgtgtgcgtgtgtgcatgggcatttgtgttggtgcgagtgtgtgcatcgaaattataccgaatttcgatatacacaagattagcgttttgcgaaaaaaattactattatcaattaattgcaattatgggtatacgtctttatccgctttttatttgtagattttgttatccttcatttatgtatgtataagtataagtttttacgcatttgctatttgcaaaaacaatttacaactgcgcgtgttaaaaatagatcaacttcaatcaatagtaataccataactgattttaaaatgagatagtaagatgaaatattttcgttacatcgaataatctaatcacttatcttatctaaaaaagatatcttaagtaaatatatatgctacgtttttttttgaaaataaaatgtagggtacaggttgaccaccgcttttgtaaaaaaaaaccaatagccctatcaataataacctcaaaatcgtagaattagttaccacttatcctaaatttgaataccctattaaaataatcatctttaatattttcccttaccaaaacagcttcggttgaactccatcaagaaactgtccaccattgcactcgctttgggcgaggagcgcacacggtccgagttgattcccttcctcaccgagaccatatacgatgaggacgaggtactgctggccctggccgaccaactgggcaactttactagtgagcaaagatataatttctaatgaaaacatttccaaccatgttccgccgttactttccaggtctcgttggtgggccagagtttgccatgtacttgattccgcccctcgagagtttggccaccgtagaggaaaccgtggtgcgagacaaggctgtggaatctctacgcaccgtggccgctgagcacagcgcccaggatttggagatccatgtggtgccgacactgcagcgattggtttccggtgactggttcacctcacgcacctctgcctgcggcctcttctcggtctgctatccacgcgtcacacagccagtgaaggccgagctgcgcgccaacttccgaaagctctgccaggatgagacacccatggtgcgccgtgcagcggccaacaagctgggcgagtttgccaaggtcgttgagacggagtatctgaagtccgatttgattcccaactttgtccagctggcacaggatgatcaggtaagcacctgattaagaccaatttaacaacactccaaaatatcaatccttatccttaatttccaggactctgtccgtctgctggctgtagaggcatgcgtaagcattgcccagctgctgcctcaggatgatgtagagcacgtaagttgatcagcgctgaaattgttaatacctgttggcttacaaaaaatattccatagctggttctgcccacgctgcgccagtgcgccagcgactcttcctggagggtgcgttacatggtggccgagaagtttgttgatctgcaaaaggctgtgggcccagagattactagggtggacttggtgcctgccttccagtacttgctcaaggatgccgaggccgaggttcgcgctgcagtggccaccaaggtgaaggacttctgcgccaatctggacaaggtcaaccaggtgcaaatcatccttagttccattttgccctatgtccgcgatcttgtctcggaccccaatcctcatgtgaagtcagctctggcctcagtgatcatgggcttgagtcccatgctgggcgcctatcagactgtggagcaattgctccccctgttccttattcaactcaaggatgagtgcccagaagtgcgcctaaacatcatctcaaacctggattgcgttaacgacgtcatcggtatccagcaactgtcacagtcgcttctgcccgccatcgtcgagctggccgaggactccaagtggcgtgtgcgtctagccatcatcgagtacatgcctgctctggccggtcagttgggtcaggaattctttgaccaaaaactgcgcggtctctgcatgggatggctcaacgatcacgtgtacgccattcgtgaggcagccaccctcaacatgaagaagctcgtcgagcagttcggagctccctgggccgaacaggccataattccaatgattctggttatgtcgcgcaacaagaactatttgcacagtaagttatcgaattgaaattgtaatgatcaatatatgcttatggttcttatgatttttaggaatgacttgcttgttctgcctgaatgttttggcagaggtctgcggcacagatatcaccaccaagttgctgctgcccacagttctcctgcttgccgctgatcccgttgccaatgttcgtttcaacgtggcaaagaccctgcagaagatctcgcccttcctggaggccagcgtcattgatgcccaagtaaagcccacactcgacaaactgaacacagacacagatgtggatgtcaagcattttgctgcacaggccattgccggcatagctgcaggtaagcaataaacagtctaatataaacaaggttagcgtttgacagggatagaaagggtctaacttatagaacaatatataacattattcattatcacaagttttaaggcatgcagggaatctgagagttacacaaattcataaattgtcagttagtagtaagactttaattttaattaaaatcctgccatagaaatggaactgaatgtgtttagaacggcaataccgccgtgcatgggcgccaaaattgaggcggcaatggactcaaagctgatagtggaaccgccccgacagccggaggcagctgacaatgacattttgcaggagatgaatggcaaggcagcggagccgcccacgcttgactcggaatgttagaggatgagtagccaaccacatgacgtgtgatgtgcctcccgctgtctccagccagttccacaagccaatgtgtttaatcctccccgtcataatcgtattcacatttgattgtttgtttgttcaagataaccaggctagatgtccgatctgattaaagtgcgagtgcagtggatcaaatatttaaccgatactaatgttgtgccatatttttttgtctctttcccggtatcatcgccatcaccacgtggttatctcaccattccccactctgtgttcgtctgcaataatgtgttttgtatatttgtttatagcgtaatcaaccttcttgcatctttttttattctatttttaaaactgtatgtatttaacgccggcaacaaaacatattatgtagcaacaacacttaagaacggaaaattgtagtggatcccggaaggtgttaaacgctgcagccgatgctggatgagggatgaatggagccaggagtcagaggaaggagagaatcggagaatcagcatgggaggagacccactaaacgcgacacacaactaaacattactacttacatacttatattatatataaattaccataggcataacgatcattattaaaaacatttgtagagtttggaacatttgatcgcatctgaatgcaaaaataaaattgtagtgaaacaatatcacacgatctattgaaaagtttaatgtggagcaaaattgaatatttaactcccaaaattgtataccaatttctaggtttcagttgtcagttcaaagtttggaaatgtaatattttcctttttatagtttcgttcaaattaagctttatatacattctgattatttggcaggtgcattgattatttataatttgtgagaggtatggctatgaaaagcatagattatacaaacaaaatacttgtatttttacattttaaaaatactgttaatttattttgaaatcctaaaatcattccagcagtaaacgattttgatagcaagctagactgatatcgataggcgccaaacagacacctggcgatagttggggcttctttttggttttttaattggatgatggtggtggtggtggtggtggtggcgagcagtttctagcgagagatcagttggacttttgcgacgaagcgatacgcttgtttgttttgccgttccgctgcgcgttggccaatgtttgcctaactctcgaatcgaattccgaaaccgagtgtggacgcgtaagtgccattgaattattccgtctgacgctcgagcgccatcgaatcggatgcggcgtggaatgtggtggagtcaatggggggatcagatgcaaatttgattgggcaaatgggtggaaccaatcaattgtgtgtatacaataaaacgaggtgtttgtgtgtgcccaaccaaacacagccaaatgcggaacattatcagtttacccacggctgtcgcaatctccgcgtccgtttaccgtccactgacctacgatccacctgcccccgtggacgcaacaagtgtccgaatatttatagtctatgggctctatgcattaattactcgcatatgtcaaaaacgctgagctgttattacaattagtgcttcattatttagcccgatttccccaagtggcgcgtttcgctaagcgttattatttttaccttccgctaaacacttggcgc

SEQ ID NO: 31094 - DNA, 2421 bp, DROSOPHILA
ctctaccgttgtgtcacttgaagaaaaaaaatattaatttgcaccaacgacgtacgtttttcgttcgaaaagaacagcaatcagcggataattgtatggattcttagaaaatttgcagcgacgaaatatagtaccttgcgaaattattttgtaaccttgaagaagtaaactgcgaatcgccagagggccaaatagaaatctcgtcgtttgcctgcagaatagaagacccgattttcagtgcgcttgtgtttgtgtgtgagcagcagaaacagcagaaaaaatggcagcaagcgacaaatcggtcgacgattcactatatcccattgcggttctaatcgatgaactgaaaaacgaggacgttcagcttcggttgaactccatcaagaaactgtccaccattgcactcgctttgggcgaggagcgcacacggtccgagttgattcccttcctcaccgagaccatatacgatgaggacgaggtactgctggccctggccgaccaactgggcaactttactagtctcgttggtgggccagagtttgccatgtacttgattccgcccctcgagagtttggccaccgtagaggaaaccgtggtgcgagacaaggctgtggaatctctacgcaccgtggccgctgagcacagcgcccaggatttggagatccatgtggtgccgacactgcagcgattggtttccggtgactggttcacctcacgcacctctgcctgcggcctcttctcggtctgctatccacgcgtcacacagccagtgaaggccgagctgcgcgccaacttccgaaagctctgccaggatgagacacccatggtgcgccgtgcagcggccaacaagctgggcgagtttgccaaggtcgttgagacggagtatctgaagtccgatttgattcccaactttgtccagctggcacaggatgatcaggactctgtccgtctgctggctgtagaggcatgcgtaagcattgcccagctgctgcctcaggatgatgtagagcacctggttctgcccacgctgcgccagtgcgccagcgactcttcctggagggtgcgttacatggtggccgagaagtttgttgatctgcaaaaggctgtgggcccagagattactagggtggacttggtgcctgccttccagtacttgctcaaggatgccgaggccgaggttcgcgctgcagtggccaccaaggtgaaggacttctgcgccaatctggacaaggtcaaccaggtgcaaatcatccttagttccattttgccctatgtccgcgatcttgtctcggaccccaatcctcatgtgaagtcagctctggcctcagtgatcatgggcttgagtcccatgctgggcgcctatcagactgtggagcaattgctccccctgttccttattcaactcaaggatgagtgcccagaagtgcgcctaaacatcatctcaaacctggattgcgttaacgacgtcatcggtatccagcaactgtcacagtcgcttctgcccgccatcgtcgagctggccgaggactccaagtggcgtgtgcgtctagccatcatcgagtacatgcctgctctggccggtcagttgggtcaggaattctttgaccaaaaactgcgcggtctctgcatgggatggctcaacgatcacgtgtacgccattcgtgaggcagccaccctcaacatgaagaagctcgtcgagcagttcggagctccctgggccgaacaggccataattccaatgattctggttatgtcgcgcaacaagaactatttgcacagaatgacttgcttgttctgcctgaatgttttggcagaggtctgcggcacagatatcaccaccaagttgctgctgcccacagttctcctgcttgccgctgatcccgttgccaatgttcgtttcaacgtggcaaagaccctgcagaagatctcgcccttcctggaggccagcgtcattgatgcccaagtaaagcccacactcgacaaactgaacacagacacagatgtggatgtcaagcattttgctgcacaggccattgccggcatagctgcagcgtaatcaaccttcttgcatctttttttattctatttttaaaactgtatgtatttaacgccggcaacaaaacatattatgtagcaacaacacttaagaacggaaaattgtagtggatcccggaaggtgttaaacgctgcagccgatgctggatgagggatgaatggagccaggagtcagaggaaggagagaatcggagaatcagcatgggaggagacccactaaacgcgacacacaactaaacattactacttacatacttatattatatataaattaccataggcataacgatcattattaaaaacatttgtagagtttggaacatttgatcgcatctgaatgcaaaaataaaattgtagtgaaacaat

SEQ ID NO: 31095 - protein, 591 aa, DROSOPHILA
MAASDKSVDDSLYPIAVLIDELKNEDVQLRLNSIKKLSTIALALGEERTRSELIPFLTETIYDEDEVLLALADQLGNFTSLVGGPEFAMYLIPPLESLATVEETVVRDKAVESLRTVAAEHSAQDLEIHVVPTLQRLVSGDWFTSRTSACGLFSVCYPRVTQPVKAELRANFRKLCQDETPMVRRAAANKLGEFAKVVETEYLKSDLIPNFVQLAQDDQDSVRLLAVEACVSIAQLLPQDDVEHLVLPTLRQCASDSSWRVRYMVAEKFVDLQKAVGPEITRVDLVPAFQYLLKDAEAEVRAAVATKVKDFCANLDKVNQVQIILSSILPYVRDLVSDPNPHVKSALASVIMGLSPMLGAYQTVEQLLPLFLIQLKDECPEVRLNIISNLDCVNDVIGIQQLSQSLLPAIVELAEDSKWRVRLAIIEYMPALAGQLGQEFFDQKLRGLCMGWLNDHVYAIREAATLNMKKLVEQFGAPWAEQAIIPMILVMSRNKNYLHRMTCLFCLNVLAEVCGTDITTKLLLPTVLLLAADPVANVRFNVAKTLQKISPFLEASVIDAQVKPTLDKLNTDTDVDVKHFAAQAIAGIAAA

SEQ ID NO: 31096 - DNA, 4045 bp, DROSOPHILA
gccgattcgattccctccttaccctcgaaaccagtgatactccatcgtgcgactgagcattatctgacggctaattttcccccgataagccggaatataaattgaagtgctctttatttatgtccgcgatacaacggcgaaatcgaggcaaaaaaagaaggccggtacttaaattaccattgcgttgggcaggcaacgagggtcaggggtcttccatttcgacatatatctatgtacacatttataagcatttctacagtccaacttccctcagttagatatgttatgattaggaggttgacaagaataatagttgcaatattaatttattagtttatacaagaaagttttgagatttcataatctcattgaagtatttatatattttattttaaaaagtatttgtatttgcttgtgttctgcattgtactttgtactttaacaatgtatgcttaaactgaaacaccactttctaatttaattcagtccgaaaacaaatatattccaagctaaactttaacttttgttcccacttagggacgttggactgtagcttacaagtgtgtttgaatggcattgctgtaatttcaagtctgcatatttaagcactgtagtttgttcacttagacctcgggttaaggtaatctctggcaatagacagtgggccctgtagctggttgaactgtcaaacatttcactttttttatgatagccatattactaaggtcaaagttacagggtccgcccataaaaagactattactttttaaaagttaattttagtgataataaaatgcacttaaatagctagtaaaactgtacttaaataaacatgctgtattagtctatatataattaaacccatcatattaatggatcaataatagttacggcgatctttaagtttgtaactttcaacgggaaaactttgtaattattcagctcactcctgttgaggaaactcattatgttgcaattttaattgatcgtggtgatttggaaataagtagactggctggcgacaaagcttttatttttatggcattcattcaatcaccattgaattagtcctcaagtgcataatgggattagcgttcgattaaacttgttcagccgatagaagtggatgaataataatgcggagatttggaatgttccgaaatcggatgttccaccgtaggagcacatgaatgatgcatggacaggcaaaggcttggactcccacacggactttgccgccgttggggcggcacactcgtgtgaatcacgatgcttacgatgtcgcaaggctttttttggccgaactcaccattactatcttatccgaaaaagattgaaatttaattagagttatcaatttcaatgggggtttaggccacgccacattaatccggccaaccgagtgcccggcccagtctttgccaatcaccgcatgggaccagaggatatccggacaatccactggccacgtaatcaatcactttatggactaatagccgacagcccacagaaacatgcacaaggccattaaaaacaaatccagtaagtaagtgtgcgaaaatggaaaattccgctaatacaatttggataattattaaaccagggctcctctgcggactcaagaactccaaggcggatctaacgacagccaagtttatactatattatgggtaagaactaatattattattagtaaatatgaagaaaaattatacataaagccatgttattgcactaatatccaaatttcttaaatatattcaagtattcacctatagcattatcttttattcacagacccacggtggcagatagcgatatctatgacctaaccgatttccagagtcttctggaggacgagcacttggatttgggcaagaacaccgtgctctatttgcacggctacttggaagatccggatgtggagagcattcacgtcatagccgaggcctatctggagcgaaaggataccaatcttatcgtcctagactggggtgaactggccgatggcaattacatgttcgatgccttcccgaacctcaaacagctgggcccagagttggccaaggtcctgctcaaaatgttcgaccatggcctggacattgagaagttccacattgtcggacactcgatgggcggccagctggccggactcctcggccgagagattactaaacgcaccaagggtgtcagaaagataaaaaggtaaaatgaaagaggtttgatttcaaattatttattcatgctcggttcgattttagtctatgccgacgtcatgatatacgatgtttaatatacgatatttagttaataattttaatgtccaaagcttaacacttttgtattaccatatggtaatacaaaaagtttttttttagaatcgttgttcggcaaagtttataaagtttatattgaatccttttcttgtctcacttatctccaatcttcttttatagaatttccgctttggatcccgcatttccgctcttctatccgggcacgcacctgtctgccaatgatgcggagttcgtcgacgtgatacacacggacgcctggctgtacggagctccgacgagcacgggcacggcggatttctggccaaatggtggatacagcctgcagcctggctgtcccaagcgaaactacaagatgctcagcgacaacgatctgtccagtcatcggaggagctggtggttctgggccgagagcgtttcggatcgatatcccattggattcgatgctgtgcccgccaagaaatggtcggacttcaagcagaacaaaatagtagagaattgcccgcccgtggtgatgggtcatcattgtcccacgacgtaagtttctacttgccttatatgcatagcgcagaatttagtttcatcatttgaaattgtgattttcagaattcatggcgacttttacttacaaaccaacggacatacaccttttgctcgaggcaaggagggcactgtctacgttgaccccaaggatctgctgggaaatacccacagcatcacctgtgactgcccgtcggagaaaacgaattaataagaccatctacaattgcactgtgtacattatgaaatgtagctatattaatattgttgtttctatgacgccttacaccacattttgatttacgagaaaaatatacttaaattttgttgttgaaaaaaactttgcattactttggggtatttatacattattattgcactatttggggttttaaatgagttttattaattactttttttgaatggattttttgaactttcaaataatttaaatctggttgctggttccgctcttgcaattcattccggaaccagttcgaaagttgcgatatcgataacacagctatcgacccgtcaacctctgccaccgataacattgtttgcaacaattgagcatattgacaacaaaacgaaattcgacaggctaaaatgaagataaaactaatagattcggtggtgcgcagttttaaggtggccaagatcttccgagagaacacggacaagatcaacgccatcgattttgcgcccaacggcgaacatctaatatcctgcagcgaggatgaccagatcgtgatctacgactgcgaaaaggggacgcagtcgcgcacggtgaactcgaagaagtatggagtggatttaatccactttacgcacgccaacaacacggccatccatagctccaccaaggtggacgacaccatacgctatctcagcctgcacgacaacaaatatctgcgctacttccccggccacaccaagaaggttatctcgctgtgcatttcgccggtggaggacacctttctctccggctcgctggacaagacgctgcgcctgtgggacttgcgctcgcccaactgccagggactgatgcatctctctggacgacccattgctgcctacgatcccgagggcttgatcttcgccgctggcgttaactcggaaagcattaaattgtacgaccttcgctctttcgacaaaggccccttcgtcacatttaaacttaatcaggagaaggaatgcgactggactgg

SEQ ID NO: 31097 - DNA, 1537 bp, DROSOPHILA
aaataagtagactggctggcgacaaagcttttatttttatggcattcattcaatcaccattgaattagtcctcaagtgcataatgggattagcgttcgattaaacttgttcagccgatagaagtggatgaataataatgcggagatttggaatgttccgaaatcggatgttccaccgtaggagcacatgaatgatgcatggacaggcaaaggcttggactcccacacggactttgccgccgttggggcggcacactcgtgtgaatcacgatgcttacgatgtcgcaaggctttttttggccgaactcaccattactatcttatccgaaaaagattgaaatttaattagagttatcaatttcaatgggggtttaggccacgccacattaatccggccaaccgagtgcccggcccagtctttgccaatcaccgcatgggaccagaggatatccggacaatccactggccacgtaatcaatcactttatggactaatagccgacagcccacagaaacatgcacaaggccattaaaaacaaatccaggctcctctgcggactcaagaactccaaggcggatctaacgacagccaagtttatactatattatggacccacggtggcagatagcgatatctatgacctaaccgatttccagagtcttctggaggacgagcacttggatttgggcaagaacaccgtgctctatttgcacggctacttggaagatccggatgtggagagcattcacgtcatagccgaggcctatctggagcgaaaggataccaatcttatcgtcctagactggggtgaactggccgatggcaattacatgttcgatgccttcccgaacctcaaacagctgggcccagagttggccaaggtcctgctcaaaatgttcgaccatggcctggacattgagaagttccacattgtcggacactcgatgggcggccagctggccggactcctcggccgagagattactaaacgcaccaagggtgtcagaaagataaaaagaatttccgctttggatcccgcatttccgctcttctatccgggcacgcacctgtctgccaatgatgcggagttcgtcgacgtgatacacacggacgcctggctgtacggagctccgacgagcacgggcacggcggatttctggccaaatggtggatacagcctgcagcctggctgtcccaagcgaaactacaagatgctcagcgacaacgatctgtccagtcatcggaggagctggtggttctgggccgagagcgtttcggatcgatatcccattggattcgatgctgtgcccgccaagaaatggtcggacttcaagcagaacaaaatagtagagaattgcccgcccgtggtgatgggtcatcattgtcccacgacaattcatggcgacttttacttacaaaccaacggacatacaccttttgctcgaggcaaggagggcactgtctacgttgaccccaaggatctgctgggaaatacccacagcatcacctgtgactgcccgtcggagaaaacgaattaa

SEQ ID NO: 31098 - protein, 340 aa, DROSOPHILA; identical to SEQ ID NO: 25524

SEQ ID NO: 31099 - DNA, 3026 bp, DROSOPHILA
tttatattgaatccttttcttgtctcacttatctccaatcttcttttatagaatttccgctttggatcccgcatttccgctcttctatccgggcacgcacctgtctgccaatgatgcggagttcgtcgacgtgatacacacggacgcctggctgtacggagctccgacgagcacgggcacggcggatttctggccaaatggtggatacagcctgcagcctggctgtcccaagcgaaactacaagatgctcagcgacaacgatctgtccagtcatcggaggagctggtggttctgggccgagagcgtttcggatcgatatcccattggattcgatgctgtgcccgccaagaaatggtcggacttcaagcagaacaaaatagtagagaattgcccgcccgtggtgatgggtcatcattgtcccacgacgtaagtttctacttgccttatatgcatagcgcagaatttagtttcatcatttgaaattgtgattttcagaattcatggcgacttttacttacaaaccaacggacatacaccttttgctcgaggcaaggagggcactgtctacgttgaccccaaggatctgctgggaaatacccacagcatcacctgtgactgcccgtcggagaaaacgaattaataagaccatctacaattgcactgtgtacattatgaaatgtagctatattaatattgttgtttctatgacgccttacaccacattttgatttacgagaaaaatatacttaaattttgttgttgaaaaaaactttgcattactttggggtatttatacattattattgcactatttggggttttaaatgagttttattaattactttttttgaatggattttttgaactttcaaataatttaaatctggttgctggttccgctcttgcaattcattccggaaccagttcgaaagttgcgatatcgataacacagctatcgacccgtcaacctctgccaccgataacattgtttgcaacaattgagcatattgacaacaaaacgaaattcgacaggctaaaatgaagataaaactaatagattcggtggtgcgcagttttaaggtggccaagatcttccgagagaacacggacaagatcaacgccatcgattttgcgcccaacggcgaacatctaatatcctgcagcgaggatgaccagatcgtgatctacgactgcgaaaaggggacgcagtcgcgcacggtgaactcgaagaagtatggagtggatttaatccactttacgcacgccaacaacacggccatccatagctccaccaaggtggacgacaccatacgctatctcagcctgcacgacaacaaatatctgcgctacttccccggccacaccaagaaggttatctcgctgtgcatttcgccggtggaggacacctttctctccggctcgctggacaagacgctgcgcctgtgggacttgcgctcgcccaactgccagggactgatgcatctctctggacgacccattgctgcctacgatcccgagggcttgatcttcgccgctggcgttaactcggaaagcattaaattgtacgaccttcgctctttcgacaaaggccccttcgtcacatttaaacttaatcaggagaaggaatgcgactggactggccttaagttctcccgtgacggcaaaacaattctgatcagcacgaatggatcggtcatccggctcgtagatgccttccacggcactccgctacaaacgttcacgggctatccaaacaacaagggcattcccatcgaggcaagcttcagcccagactcgcagttcatcttttcaggcagcaccgatggacgagtgcacatctggaatgccgacactggcaataaggtgtccgtactgaatggtgaccatccgggaccggtgcaatgcgttcagttcaatccaaaatacatgatgctggcgtccgcgtgcaccaacatggctttttggctgcccacatccgaggagggcttgtaggcaatgattcccgcttgcttagcttataagattacaatttaatttataaataataaatcaacataacataaacagaggcctctaactggattcctggggctggtccttgtggcggtcgtatcctctacgtatgctgttcaggagttgtccaagattatgacccattttggcactaatgccgagcacgggattttgcaggcgacgttgcagttcctcaaagttgttttggccctcttccacgtccagcttattggccaccaccaattgcgggcgactcgccagacgtccgccaaactggcggagttcgtgcattagctgctcatagtgcgtccatggctccggtgcactggcatctaacacgaacagcaacaaggtgcaacgctcggcgtgctttaggaactgtatgcccaagcccttattgcgatgagcatcgggcacgagtccgggaagatcggcaatggtgagctggacatgatcatcgtactggacggttcccaagtgcggacgcagcgtggtgaaggcgtagggagcaacctttggcttggcccgtgtcagtgcattcagtagggtgcttttgccagcattggggtaaccaatcaaacccacatccgccatgctgcgcagttccagagtgtatgatagatcttcacccctaggaccgtattcgctgaccttgggacttgtttccttgtccgtggtaaagaaacggttgcccttgccaccggctcctcctcgagcggccacaaacataagatccgcttgtcccagatccccgacaatttgaccttgcgcattcctgatcaccgtcccgattggaaccttgatcacagaatgcttggcgttcttgccatgacaatccttggagctgcccggctctccttcttcagctttcagaacactccccacgtggttaaagttgcgcacatcgttagaggcctggaacaccacatgcccgccgtggccaccgtctccgccatctggaccggccctttcattgcaccatagctgcaggaaggacacgcaaccgtcgccac

SEQ ID NO: 31100 - DNA, 1026 bp, DROSOPHILA
gagcatattgacaacaaaacgaaattcgacaggctaaaatgaagataaaactaatagattcggtggtgcgcagttttaaggtggccaagatcttccgagagaacacggacaagatcaacgccatcgattttgcgcccaacggcgaacatctaatatcctgcagcgaggatgaccagatcgtgatctacgactgcgaaaaggggacgcagtcgcgcacggtgaactcgaagaagtatggagtggatttaatccactttacgcacgccaacaacacggccatccatagctccaccaaggtggacgacaccatacgctatctcagcctgcacgacaacaaatatctgcgctacttccccggccacaccaagaaggttatctcgctgtgcatttcgccggtggaggacacctttctctccggctcgctggacaagacgctgcgcctgtgggacttgcgctcgcccaactgccagggactgatgcatctctctggacgacccattgctgcctacgatcccgagggcttgatcttcgccgctggcgttaactcggaaagcattaaattgtacgaccttcgctctttcgacaaaggccccttcgtcacatttaaacttaatcaggagaaggaatgcgactggactggccttaagttctcccgtgacggcaaaacaattctgatcagcacgaatggatcggtcatccggctcgtagatgccttccacggcactccgctacaaacgttcacgggctatccaaacaacaagggcattcccatcgaggcaagcttcagcccagactcgcagttcatcttttcaggcagcaccgatggacgagtgcacatctggaatgccgacactggcaataaggtgtccgtactgaatggtgaccatccgggaccggtgcaatgcgttcagttcaatccaaaatacatgatgctggcgtccgcgtgcaccaacatggctttttggctgcccacatccgaggagggcttgtaggcaatgattcccgcttgcttagcttataagatta

SEQ ID NO: 31101 - protein, 317 aa, DROSOPHILA
MKIKLIDSVVRSFKVAKIFRENTDKINAIDFAPNGEHLISCSEDDQIVIYDCEKGTQSRTVNSKKYGVDLIHFTHANNTAIHSSTKVDDTIRYLSLHDNKYLRYFPGHTKKVISLCISPVEDTFLSGSLDKTLRLWDLRSPNCQGLMHLSGRPIAAYDPEGLIFAAGVNSESIKLYDLRSFDKGPFVTFKLNQEKECDWTGLKFSRDGKTILISTNGSVIRLVDAFHGTPLQTFTGYPNNKGIPIEASFSPDSQFIFSGSTDGRVHIWNADTGNKVSVLNGDHPGPVQCVQFNPKYMMLASACTNMAFWLPTSEEGL

SEQ ID NO: 31102 - DNA, 3152 bp, DROSOPHILA
ttgccagcattggggtaaccaatcaaacccacatccgccatgctgcgcagttccagagtgtatgatagatcttcacccctaggaccgtattcgctgaccttgggacttgtttccttgtccgtggtaaagaaacggttgcccttgccaccggctcctcctcgagcggccacaaacataagatccgcttgtcccagatccccgacaatttgaccttgcgcattcctgatcaccgtcccgattggaaccttgatcacagaatgcttggcgttcttgccatgacaatccttggagctgcccggctctccttcttcagctttcagaacactccccacgtggttaaagttgcgcacatcgttagaggcctggaacaccacatgcccgccgtggccaccgtctccgccatctggaccggccctttcattgcaccatagctgcaggaaggacacgcaaccgtcgccaccctttccgccgatggcacgtatcctcttggcatcggagaagtactgcgcctggaaatgtggacacaaaagtgtggcattagttatgtaaattccattgcaatcttatgattctacctctttccgggtggacttcgccttcttcggacgcagcgctgatgccacctgacagtagttggctatgagaccaattggttttgcatttctggatatattcaatgaaaatcgcgcaagaaacgatttgccggtagagaataacattgctgaagtcttgtgaccatgggcatagtcagaaaaatatgtaatagggattgatatatcttaatcaagtgaaattaaattaaatgatctaaaggttcgagaaatgtattatataaatatattaagatgtatttttagggcggctagaattttttacttttaaaaaagtattcgaatccccgtctacacctgtggaaaatcacctgctgatacataaacatatcgcgacgactatcgaaagctatcgaaccagctggaaattatgtttttgttatccagaggaacgagaagctttcaacagttgagaaagatgtctattaaaggagcactcattgatctcagtggcaccttgcatgtggaggatgaacctactccgaatgctgtcgaggcgttaaaaaggtgcttagtttaaaccaaggtattcgtaattattttcaaagttgccgtgtagattgcgtgactctggcgtactggtgaaattcgttacaaacaccacgaaggattcaaaggccactcttcacgaacggctatgcaggattggcttccaacttgacgcctctgagatctacagctccttgagtgccgcagtctcgtatgtggaaaatgagagactaaatccgtactatattctgtctgaggatgcacgacaggactttccgccggaggacactaggcgctataaggattcagttgtaatcggtctggcacccaaggcctttaactatgaacagctgaatgaggcttttaagtgagcatccgagcaaggatattcttatctcaattaacgattatctctgcaatagcgttctattggaaaacaagaatcacaaactgatcgccgtgcatcagggtaagtactacaaacgagcagaaggcctagccttgggcccagggtgctttgtcaagggtttggagttcgctacaggacgaactgccaaagtgattggcaagcccaatccttatttcttcgaaggagctctggctggtcgggatccagcctcatgcgttatgattggagatgtatgtaaagtaaggaatacattttgaaaacttaacgaattcttgattcgcaggatgccaatgatgacatagtgggcgccatgagcatgggcatgcagggaattctggtcaagaccggcaaatatctgccggatgtcaaaccatccccacctccaacagcgttgttggaaaactttgcagaggctgtcgattggattatacagaaaaaccaatcttaggctttattgggcttctgcaaatgtttatcgtgtttaaaacatagatactgacgaattttttatttaaaatagttacttaaaaagactttactgatataggtaaggcttagatataattaaatgctcaaaataagttcagttctgattataaacttttcatgtggaacataataaaggacccgtttttaaagtgtgaactagcccgaatcatttttcaacgatgtacgaatacagccaaacacaattatgtaattaatttagtgtataaatgcttttattttataaatagccgtaaaaattcatctgaaatgctgtttaaaacagatcaacggattaagattaagcatagttgtgtatcaaaattgtgagtaattgaaggtcttgccgctttcgaatcctttatgctcttaagacagtttcgactgagcgaatttgctggccaattggacaatttcgtccaccttttcgtaatttgtgcccgatgcctgggcggattccggtttgccacctcccttgcctcccagcgtggcggaaacatgctgcacccactcgttggccttcagacccttttccacggcacttttcggcaccgagctgagacagaagatcttcttggagtccgcatccactgacagaaacatggcggcagcgtcgggcagctggctgcgcacttgcttcagtgcggcatccagcgccttggtgttgttaaaggcttccaactgctcgaccagcacggtggcattgggattggcttcgcacagagtcttggcgcgctccacaacagtgaccgagacagcggcacgcagggcacgttccttatcgtccaatgttttcttcaagcccttcagcagattgcgcatctcgtcctttttcacgtagggaatcgtagcatgcgagatctgttcagtcagctcaacaatctccttcacatgcgacttggagtccttaccggacttatcgttatcaatggtggccttaagccggacgatttcttgttcaaatgcttcagatttcttcagtgccttcagagcttcgggtcctgtaagagccacaattcttcggatacccttggcaatggcctcttcgctgctgataacaaagtccattatgtgacccgagcgcctcaaatgggtgccgccgcaaaactcgacggaggtttgttcgccggcttcagaatcgggattctgctccagtt

SEQ ID NO: 31103 - DNA, 992 bp, DROSOPHILA
gaacgagaagctttcaacagttgagaaagatgtctattaaaggagcactcattgatctcagtggcaccttgcatgtggaggatgaacctactccgaatgctgtcgaggcgttaaaaagattgcgtgactctggcgtactggtgaaattcgttacaaacaccacgaaggattcaaaggccactcttcacgaacggctatgcaggattggcttccaacttgacgcctctgagatctacagctccttgagtgccgcagtctcgtatgtggaaaatgagagactaaatccgtactatattctgtctgaggatgcacgacaggactttccgccggaggacactaggcgctataaggattcagttgtaatcggtctggcacccaaggcctttaactatgaacagctgaatgaggcttttaacgttctattggaaaacaagaatcacaaactgatcgccgtgcatcagggtaagtactacaaacgagcagaaggcctagccttgggcccagggtgctttgtcaagggtttggagttcgctacaggacgaactgccaaagtgattggcaagcccaatccttatttcttcgaaggagctctggctggtcgggatccagcctcatgcgttatgattggagatgatgccaatgatgacatagtgggcgccatgagcatgggcatgcagggaattctggtcaagaccggcaaatatctgccggatgtcaaaccatccccacctccaacagcgttgttggaaaactttgcagaggctgtcgattggattatacagaaaaaccaatcttaggctttattgggcttctgcaaatgtttatcgtgtttaaaacatagatactgacgaattttttatttaaaatagttacttaaaaagactttactgatataggtaaggcttagatataattaaatgctcaaaataagttcagttctgattataaacttttcatgtggaacataataaaggacccgtttttaaagtgtg

SEQ ID NO: 31104 - protein, 255 aa, DROSOPHILA
MSIKGALIDLSGTLHVEDEPTPNAVEALKRLRDSGVLVKFVTNTTKDSKATLHERLCRIGFQLDASEIYSSLSAAVSYVENERLNPYYILSEDARQDFPPEDTRRYKDSVVIGLAPKAFNYEQLNEAFNVLLENKNHKLIAVHQGKYYKRAEGLALGPGCFVKGLEFATGRTAKVIGKPNPYFFEGALAGRDPASCVMIGDDANDDIVGAMSMGMQGILVKTGKYLPDVKPSPPPTALLENFAEAVDWIIQKNQS

SEQ ID NO: 31105 - DNA, 2805 bp, DROSOPHILA
ttttttatatttaaaattaagtccacttgcttaatttacattaattgcactctagaaccctccagatatatgtaaaaaatcacaaattttaaaaaatgcatttagaataagctcttaaatgcgcctctatttgagctagttaacaatgtgtaacaattaaaagtccattcgctgtggcaagtgttcctcctccacctggtgctcgatctccctcatgcgtaacataagtttaaagttctgcttgtcctcctggccagtaaggaacatggttagcagggcctgcaggccgattaaggttcctaaggctgggacaatggggcgtgtaaatttccgccacaacagaaacacttctctgggattttccgtaatcgagggaatacggtacgtgtagcagcgggttgcgaacagaaatgcggcgaatggggccagaattgtgggatatacgatgcccagacttgtctgaaaggcagcactgcgcatctggatgcacaccgggcactcgcccagcggatttagtaggatgggccgctgaataaagaacttgtgcgccagcatggtaaatatggcgggaacggcgacaatcgggaggtaagtggacaatcgaccatgtcctccaagtcgcagcttggtgcgataatgattatttatgtaggcgcccgttcccgcagccaaagcactcagaattccgggcgtgtagcgcaacgaccatctacaaggcaatattttgatcgcttgttaggtaagcggcaactttagaaggcttcatgcactcacacttcgcctattttgtcccaggaagttataatcttccattggtatttgagggcctgatcctctgttatgaccaccgcgtccctgggcagttcgtcgggcttggcgcgtgataatgccatttttcattaatttatcaaaatatttggttctcagaaaacagctgcttatgggtcagtgttgtataagtcccgaaccggtgtgagaatgttgaatacagtgggtatcggaaaaaggtctcggaaagtaacgcgaaatttacagatgatgacatatcagtgctgttaaatggtcaaatcagtgttgcgtgctgttttatatcagaggcgaattgaagtgtactaccataattcttgcgagtctgcttaaaatgcctcacaaacgtaggaaccgagtacatgcgaaccaaaggaatttcacagcgcgacgcgtttctgtggccaaactgtcgtctgcaccgccgaatgtgctcgtcgaatcctgcaacggttctcatgcggataacagttcgccggacagtccgaaagccaaagaaggtgcaatgaccaacgggaaaaacccggagatcaagttagccgtgcccaaatgcaacaccaccgtgcgcaagcagaacgaggcccatatcatatccaacattaagctggatatgaaccttaataaggattctaactttatcgccccacaggttaattaaggttttcaattatgtatactgttttataataacatattctgtaactaccccaaagatcaccaaaaagatgaacttcgctccgaatcgtgttgtattcggggtcctggtgcctctcaatgtcaacgattctgtgctggtgccgcacaatagaaaaccggatgccttaaagcacacatcgaaagaatcggaatcatgcaaggccataagcgagccccagctagccgactatgcggagaaagtagatcccatgatcatggctgttaaggaaccagtactccacttggattgggaaccaggacccttcgattttttcggcgcatataggagaacatacaattagagttacattttatttataaatatatccgagaatatcagaatgtttgtagctttgttaaccgatgaagttcatgaccaccagatgaaggatcacatgagcgaagatgaagtcggcgaaaccgcgttccggcgaaatgccggcaaacacgctcttgttctggggattggcctgcaggcgtaggcacactgccaggacgaaacagctgacggtgctgatgaaaccagataggaaggagttgaacgggaaggttccaaccaggcagcagtaaacaaactggatgatgccggtgagcagaatgtagccgaggtagatgtccaccagcttcagtttcttgggcgtattctgcacgtagtcgttgtagaacttggaaatgacgctcgacagctccaccattttgctattttatgtgatatttgtccggatatttaaggataaaggcgctttttaacaaattaatcgcagacacgtcacaaattgggagagaactcaaaagtaggaccgttcgtctagtttgaaaataatactgatagctttatcgatgaaggcgcaagtacagtgggcactcaataccttgaagtttaataaagaataggtttatatattaaaaaatttttgtgttttagttaaaactaaaacataacaaatcttatagattaatgaccgctatcgattcttttttaatgttgcatatgtttgagaggtaatgttataatttaatttatataaaaagaaacacaaattctttttctaacccgttaataaagttttctatccgattttcactgtaccgccaaatcagcgaattaatcgatagatacggaaagtcatcctcgattgttgtgtcttgctttgcttcttcagtgcttgttttggggtgagaggcaattgttattgcgagttgagttcgaagaaattagtaacgtatgtatttaaaacaccacaaaagggtatgatgtgcgttgcaacgttacaataaacatttgctatccaatgtgcaaca

SEQ ID NO: 31106 - DNA, 741 bp, DROSOPHILA
gaaaaaggtctcggaaagtaacgcgaaatttacagatgatgacatatcagtgctgttaaatggtcaaatcagtgttgcgtgctgttttatatcagaggcgaattgaagtgtactaccataattcttgcgagtctgcttaaaatgcctcacaaacgtaggaaccgagtacatgcgaaccaaaggaatttcacagcgcgacgcgtttctgtggccaaactgtcgtctgcaccgccgaatgtgctcgtcgaatcctgcaacggttctcatgcggataacagttcgccggacagtccgaaagccaaagaaggtgcaatgaccaacgggaaaaacccggagatcaagttagccgtgcccaaatgcaacaccaccgtgcgcaagcagaacgaggcccatatcatatccaacattaagctggatatgaaccttaataaggattctaactttatcgccccacagatcaccaaaaagatgaacttcgctccgaatcgtgttgtattcggggtcctggtgcctctcaatgtcaacgattctgtgctggtgccgcacaatagaaaaccggatgccttaaagcacacatcgaaagaatcggaatcatgcaaggccataagcgagccccagctagccgactatgcggagaaagtagatcccatgatcatggctgttaaggaaccagtactccacttggattgggaaccaggacccttcgattttttcggcgcatataggagaacatacaattag

SEQ ID NO: 31107 - protein, 199 aa, DROSOPHILA
MPHKRRNRVHANQRNFTARRVSVAKLSSAPPNVLVESCNGSHADNSSPDSPKAKEGAMTNGKNPEIKLAVPKCNTTVRKQNEAHIISNIKLDMNLNKDSNFIAPQITKKMNFAPNRVVFGVLVPLNVNDSVLVPHNRKPDALKHTSKESESCKAISEPQLADYAEKVDPMIMAVKEPVLHLDWEPGPFDFFGAYRRTYN

SEQ ID NO: 31108 - DNA, 4291 bp, DROSOPHILA
gataaaacgaaaataagttcgtaatgctttgtttgatttctttatggctctcaaataaagatttcttgacataagtcggctgcttgtctggatttaggtagactttacgatttaagcactattaattcctcgctaaataaatagcacacattctatgaccatgtagcacttatatgtaggtcttctaaaagcaagcacactggaattattaaatctattttttaaagctagtgttaaagtaagaaaagcatgattacttgtcaaaatggcaatataaccagaatactgcatgcatgatacataaatatgcaaatgatatcaacgctagaatgattcgaacctatgtatcatttatgtattatgtatatctctcattataatttgtatttgttaagttaacactttgatttcacgtttatttgcgaaaactttcttctcgccttatatgttcattcaagaaatttatcagtagtattaaatatcacaataatgcaacttgagtaattccgtttgctgactcaagtcaataatctgaatataatgggtggatatttgattcaccgtctggatacacattatataattgtgatttatggtatgctcgctggcttcgcaggagatatgcgggtcttatctctacgtatggattgtttttcgcgacttgttggtgttttcgactttaaagctatactctagtgggagacgaactcgtcaatatgatatcgacttccgaagcacgcgtaatcagacccatatgcaaagtaatgaaatgatcacattaatcgtactttgagtcaagtccaaggctaacttggactatcagcatggtcgaaattttccactctactccgcccggcacgcgatcactgtccactatgcaacgcactatctgcacctcctattgttataagcgtggaaaactgagtcagcggaaaatttccgaggcgaaaagcgggcgtctcaagttgcactcttagtttgtttcgtgcagccggagagggcgcatcataaaatccaacgctcttagttacttacctacccctgtttccagattcccgagggagcgccgcgcaagaaaaagatgacggaacgacagccgttgctcctccagagcgatgcctctgactacgagggcagtcgaggatcggcagcacgacccgtgcgcagctctccgccggacaacactctcgtcaacgtgcacagcgaggacagcttagcaggtgagtttgtgaccaggtcaaaatatgttattacaaagtaaattgaggtatgacgagaaacttataattttttcgcttttttctgtgagtgcacgcagcagcctctggatcgggagatgatgaaattggatcgacggataagtcctataaccccacccatcatcgcgacctggagcatccgacgtccaacttcgataccctggttcatctgctgaagggcaacattggtacgggcattctggcaatgccggatgcctttaagaacgccggactttatgtgggactctttggcacaatgatcatgggagccatctgcactcactgcatgcacatgctggtcaactgctcccacgagctgtgccggagattccagcagccatcgttagatttctcggaggtggcatactgcagttttgagtcgggacctttgggactaagacgatactccatgttggctcgacgaattgttaccacgttcttgtttatcacgcaaatcggtttctgctgcgtctacttcctctttgtggcgttgaatatcaaggacgttatggatcactactacaagatgcctgtgcagatttacctgcttataatgcttggacccatgatcctgttgaatctggtgcggaatctgaagtatttgacacccgtttcgctggttgccgccctgctcacagttgccggactggccattacattctcgtacatgctggtggatctgccggatgtgcacacggtcaagccggtggccacttgggcgacgttgcctctatattttggaaccgccatctacgcgttcgagggaattggtgttgtcctgcccttggagaacaatatgcgcacacccgaggactttggcggcaccacaggtgtcctcaacacgggcatggtgatcgtggcctgcttgtacacagctgtcgggttcttcggctacctgaagtacggcgaacacgtggagggcagcattaccctaaatctgccgcagggcgacacgtaagtccttaaactttccattgctaatcggttttagttgtaagacagagggatttaatatttctcatgctgatatacataatctacatgctcttgctatttgaaaagcgctattcgaaatattgatagttcagatagttaagatcgttattaactttactgtctaaataattttaaattacatgataataaagctagcaaaaggtgttataacaatttttaatgatattcccagactgcaatactaatattttaattgtcttcctctttacatatttagactttcccagttggtgcggatttcaatggcggtggccatcttcctctcgtatacgcttcagttttatgtgcctgtgaacatcgtggagccctttgtgcgaagtcatttcgatacaacgagggccaaggatttgtcagcaactgtgctgcgagttgttctggtcacttttacctgtacgcatagatagtcaatatttaaaatgttccaattatcatcgtattttatttcacagtcctgctggccacctgcattcccaatctaggctccattatctcgctggtaggagccgtcagcagctcagctttggccctaattgcaccacccataattgaagttattacattttacaacgttggctatggacgcttcaattggatgctatggaaggacgttttaatcctgatctttggactctgtggctttgtgtttggcacctgggccagcttagctcaaatcctgaacgacagaacccactgagtttaatcgaaataagcgaatcgaaaacagaacctggctagttctgcctacaaatgtgtgcgaatttatgacgaaggctttatgtagttacactcagactacgaatatgtttaccattagttgtttaccatttcccaactggtatcggtccagtccagtggcggtgctttagtgtgattaatttatatttatggcaaattagttgcatttttttttgttgttatcagccagctgcaatcgtaccagacaataactagcattttaagtagaaagtttttcaacatttgttcagtttgtcagttggagattatttctgtgttaactcgatgaccgcacaatgccaaacgtgattttacgtagtattcttaactaaattattatttagcttttactatgtagtctaggtcggggcagatcattccaaagcaactgctaagaatttcccaaaaaccgaaattagctaatgttatctgcatacttttatcgttcgattatttgtaattatacaactataaatacatatatatgtatacccctagccgtactggtcccgaaatgggaccttcgataaagttttgtaaatacatcaattcggtgtatcaacaaatgttctttaatagttcaatcggtaacaaagacaataattaatataatgtttataaaaatcagtacaattgatgttatttagtattcctaccacagggcttgaatggtcactgggaatgggattccattggaattagccactctcaatggactcgatgagagcagaatcagtccttgagctcgtggaccgttcctaatctgcttggtcaggcgagcgggtgcctgctggacaggctgaacttcctctgcatccggatcgggtgtaaagtcttgcggctcctcatcgctgggtagctgctcaactgcatcggtaggcggtgggccgtaggtcagatccggtggtccatatgtctgatccggaactccttcctcgaatggcacctccggcttcagttcgtcggcggatggatagggtgctgcctgctgtttctgaagttgctttgccagccgtgctggctgagctgaaaccgctccaagtgccaggaccagaaccagcaaggaacaggatgacttcacgtagctgcgcatattggctttgacgcaagagatacacgaacttatgagggaaccgttgttgattgattgataactttgctgttcattacctgtctttttatatgtttttcgggtactacgtggatggattaatcaatttttggtggtaaaacgtggtcgtttggttaatgactgggtcatccagtggcccttgtggtca

SEQ ID NO: 31109 - DNA, 1863 bp, DROSOPHILA
gcgcatcataaaatccaacgctcttagttacttacctacccctgtttccagattcccgagggagcgccgcgcaagaaaaagatgacggaacgacagccgttgctcctccagagcgatgcctctgactacgagggcagtcgaggatcggcagcacgacccgtgcgcagctctccgccggacaacactctcgtcaacgtgcacagcgaggacagcttagcagtgcacgcagcagcctctggatcgggagatgatgaaattggatcgacggataagtcctataaccccacccatcatcgcgacctggagcatccgacgtccaacttcgataccctggttcatctgctgaagggcaacattggtacgggcattctggcaatgccggatgcctttaagaacgccggactttatgtgggactctttggcacaatgatcatgggagccatctgcactcactgcatgcacatgctggtcaactgctcccacgagctgtgccggagattccagcagccatcgttagatttctcggaggtggcatactgcagttttgagtcgggacctttgggactaagacgatactccatgttggctcgacgaattgttaccacgttcttgtttatcacgcaaatcggtttctgctgcgtctacttcctctttgtggcgttgaatatcaaggacgttatggatcactactacaagatgcctgtgcagatttacctgcttataatgcttggacccatgatcctgttgaatctggtgcggaatctgaagtatttgacacccgtttcgctggttgccgccctgctcacagttgccggactggccattacattctcgtacatgctggtggatctgccggatgtgcacacggtcaagccggtggccacttgggcgacgttgcctctatattttggaaccgccatctacgcgttcgagggaattggtgttgtcctgcccttggagaacaatatgcgcacacccgaggactttggcggcaccacaggtgtcctcaacacgggcatggtgatcgtggcctgcttgtacacagctgtcgggttcttcggctacctgaagtacggcgaacacgtggagggcagcattaccctaaatctgccgcagggcgacacactttcccagttggtgcggatttcaatggcggtggccatcttcctctcgtatacgcttcagttttatgtgcctgtgaacatcgtggagccctttgtgcgaagtcatttcgatacaacgagggccaaggatttgtcagcaactgtgctgcgagttgttctggtcacttttaccttcctgctggccacctgcattcccaatctaggctccattatctcgctggtaggagccgtcagcagctcagctttggccctaattgcaccacccataattgaagttattacattttacaacgttggctatggacgcttcaattggatgctatggaaggacgttttaatcctgatctttggactctgtggctttgtgtttggcacctgggccagcttagctcaaatcctgaacgacagaacccactgagtttaatcgaaataagcgaatcgaaaacagaacctggctagttctgcctacaaatgtgtgcgaatttatgacgaaggctttatgtagttacactcagactacgaatatgtttaccattagttgtttaccatttcccaactggtatcggtccagtccagtggcggtgctttagtgtgattaatttatatttatggcaaattagttgcatttttttttgttgttatcagccagctgcaatcgtaccagacaataactagcattttaagtagaaagtttttcaacatttgttcagtttgtcagttggagattatttctgtgtta

SEQ ID NO: 31110 - protein, 486 aa, DROSOPHILA
MTERQPLLLQSDASDYEGSRGSAARPVRSSPPDNTLVNVHSEDSLAVHAAASGSGDDEIGSTDKSYNPTHHRDLEHPTSNFDTLVHLLKGNIGTGILAMPDAFKNAGLYVGLFGTMIMGAICTHCMHMLVNCSHELCRRFQQPSLDFSEVAYCSFESGPLGLRRYSMLARRIVTTFLFITQIGFCCVYFLFVALNIKDVMDHYYKMPVQIYLLIMLGPMILLNLVRNLKYLTPVSLVAALLTVAGLAITFSYMLVDLPDVHTVKPVATWATLPLYFGTAIYAFEGIGVVLPLENNMRTPEDFGGTTGVLNTGMVIVACLYTAVGFFGYLKYGEHVEGSITLNLPQGDTLSQLVRISMAVAIFLSYTLQFYVPVNIVEPFVRSHFDTTRAKDLSATVLRVVLVTFTFLLATCIPNLGSIISLVGAVSSSALALIAPPIIEVITFYNVGYGRFNWMLWKDVLILIFGLCGFVFGTWASLAQILNDRTH

SEQ ID NO: 31111 - DNA, 3089 bp, DROSOPHILA
tcaacagtaagcagtccaagaccattcgctccatgaaacgcactccttctttgtggggtcgaatccagtggacaacgggcacaacacagccgtggccgtggaggtggaggactcacaccaccagtagcgagtgggatcccagaagttgcggatgttcgtttgcacgttggatgcgtcgctgcagtcgggctggttgtcagaattgggatcgcacgcatttccggtgcttaggagcgccacgaagaaggcaaggcagatcaaaagtagtgctatgggatcggcaaagggttgaagtatatttcaaatggggattccttttcgatttgctcagctaacttaccggacttcatggtgcaattgagttcccactggtttcgtaagtgtgctttaactgggcgaattcgcaagcttatataccccagaccggcactgatattggctttcatcaatagcagttatctccgttggcgggaagcctgtgcgaaattctattttggcagcgacatgaaatcgtttcaaaataatcgcaccttgtatcgcccaccgtatctgtatctgtatctcagcgcattgtacgcgcccctaagttttgttgacgcaatagtttgattatatggatgtgtcgtaaaggtcatgccgcgtgccacaatccaaactgggtagcactcctatcaataagttaaatatagtacaaaactaggacagtaaggtttataatcgaaatttaaatttgggggcttctattcaaatacctaatacttaaccgtggggaaccccacattcttaacgcaaacaagtcattagaattacgcatttatatttatattaatatactacccttaactgttggtgatagcactaccgcactactaacctggtttttaatcaacccatccgctataccgtataccatacatatcgaaatataaaactccaaaatataacattaaatcgcagtaggtgtcacacaactaattatttgcgatattaatgattacaaattgctcgtgataaatctcccatagcgatggagtcgagggtcaccagcggcacaggtccaccgaacaccattatgatccagctggtgtcccaacagcccagttcctgtggacagatgcaggccatgcccatttcggtgcagacgatacccttgttccccaattccagaacatcgacagagcgaccttgtcgatcggtctccattgccccgaatgtaagacctccaacggatgtccctcctcctcgaaggaatttaagaatccgacccgaggaatatgcgacacccaagcggaagaattcgcaaagccagtttcgtcatttctcccgcagcataaaccaacctccaccggtgtactatgttcttcgaccagaagaccgtattatgcccatctacataccacctccgaggtttaacaatgagcaaggatcaaggatggcgacggagtgtccttgctgtggccatgccaagtcattgaacccggaggaacctctaagagtccacgtagcgcagaaagagtttgtcaaattagagaaggcaactcctggacatcgggatcaatgtactaacaccattgaccagccagatgtgggaaatataaggacgatttacgaaacattgggacgcgcaatggtcactgcagccgtggaggcagcccagagatcccagccagcaggaccctcagatccgacaaatgtaatattgaaactattaacccaattgggggagcagaatcaaacaacaggcttgagtccacattcagaagcagtagcagaaagtcccgaccaccaaccacatatgcgcaggcccaaagctagctttacggaagcagtccgcatgatggagaggacctcgtctgatccttccattgctaaagggccaccagatgagctagatgaccaacgtaggcttccatctgtactctccgatggtcgtcttcgcgtcgaatatccgaaaacgcctagaccaacaccaacatactccgtcgaatctgaaaacaccctcagtaatcatatgtcctcggagagattaagactcgattctggttcctcgccaaacctgggaaactccattggacatagccaagcgtagcaatgaaatgatcttcaccgaagtaccctagatcagaatataaattatcttccacatgaccataaataaactgcgttgaagctttaatagttgcgaatcctttggaatcaagtaaataattctataatgcatatattttaacccccttttgggaaatcaaagtgttgtttattgcggcaaagttctttgactttttctgtgacgttgctctcaagcttaagtagacttaacttgccccattttcagttaagtcacttgcacagctttattcattactatatctatatctgtaagtcgctatttagccttgtaatatcgacgacaaggtcgtcctgattagattcaattaaattgggcttaagataagactagtgcaatgcaaagtgaaaatattcgaaacgtgtaggacgattggcttagattatgggacatgttgtgataagtgtcaaaaatgtttcatatttaatttcactggtttgcggagatagcgaatttctgcgaaataccagcgcaattcccaataagctgataaggtgacacgttccaaaagactaccatttttgcaatcgcgagtcgtttgccggaaacaaatgacatcagtcgctgccattttagatagttttgcatctcctccttccaattggacatacaatacatctaatgacatgttttcgtgtcatgtttttcgtgtaatattgctgccgttttttttttttttttttttgtcgattgcagccagcgggaaacggtgataatttcttaacgattcttagccgagtttgcgatctggcatcgtttcgaatgactgccgtgggtggtataagtatagttccccttttgggttttcacaaccatcggtaaccctttaccacttctaagtgcacttagaaaaaaatccattgaatctgaaatatgtaaggttttttaataagttaagcacaaaaaaatatatactttaatttattattatactattatttctatctaataaatcatattt

SEQ ID NO: 31112 - DNA, 1089 bp, DROSOPHILA
attgctcgtgataaatctcccatagcgatggagtcgagggtcaccagcggcacaggtccaccgaacaccattatgatccagctggtgtcccaacagcccagttcctgtggacagatgcaggccatgcccatttcggtgcagacgatacccttgttccccaattccagaacatcgacagagcgaccttgtcgatcggtctccattgccccgaatgtaagacctccaacggatgtccctcctcctcgaaggaatttaagaatccgacccgaggaatatgcgacacccaagcggaagaattcgcaaagccagtttcgtcatttctcccgcagcataaaccaacctccaccggtgtactatgttcttcgaccagaagaccgtattatgcccatctacataccacctccgaggtttaacaatgagcaaggatcaaggatggcgacggagtgtccttgctgtggccatgccaagtcattgaacccggaggaacctctaagagtccacgtagcgcagaaagagtttgtcaaattagagaaggcaactcctggacatcgggatcaatgtactaacaccattgaccagccagatgtgggaaatataaggacgatttacgaaacattgggacgcgcaatggtcactgcagccgtggaggcagcccagagatcccagccagcaggaccctcagatccgacaaatgtaatattgaaactattaacccaattgggggagcagaatcaaacaacaggcttgagtccacattcagaagcagtagcagaaagtcccgaccaccaaccacatatgcgcaggcccaaagctagctttacggaagcagtccgcatgatggagaggacctcgtctgatccttccattgctaaagggccaccagatgagctagatgaccaacgtaggcttccatctgtactctccgatggtcgtcttcgcgtcgaatatccgaaaacgcctagaccaacaccaacatactccgtcgaatctgaaaacaccctcagtaatcatatgtcctcggagagattaagactcgattctggttcctcgccaaacctgggaaactccattggacatagccaagcgtag

SEQ ID NO: 31113 - protein, 353 aa, DROSOPHILA
MESRVTSGTGPPNTIMIQLVSQQPSSCGQMQAMPISVQTIPLFPNSRTSTERPCRSVSIAPNVRPPTDVPPPRRNLRIRPEEYATPKRKNSQSQFRHFSRSINQPPPVYYVLRPEDRIMPIYIPPPRFNNEQGSRMATECPCCGHAKSLNPEEPLRVHVAQKEFVKLEKATPGHRDQCTNTIDQPDVGNIRTIYETLGRAMVTAAVEAAQRSQPAGPSDPTNVILKLLTQLGEQNQTTGLSPHSEAVAESPDHQPHMRRPKASFTEAVRMMERTSSDPSIAKGPPDELDDQRRLPSVLSDGRLRVEYPKTPRPTPTYSVESENTLSNHMSSERLRLDSGSSPNLGNSIGHSQA

SEQ ID NO: 31114 - DNA, 2929 bp, DROSOPHILA
tcagttaagtcacttgcacagctttattcattactatatctatatctgtaagtcgctatttagccttgtaatatcgacgacaaggtcgtcctgattagattcaattaaattgggcttaagataagactagtgcaatgcaaagtgaaaatattcgaaacgtgtaggacgattggcttagattatgggacatgttgtgataagtgtcaaaaatgtttcatatttaatttcactggtttgcggagatagcgaatttctgcgaaataccagcgcaattcccaataagctgataaggtgacacgttccaaaagactaccatttttgcaatcgcgagtcgtttgccggaaacaaatgacatcagtcgctgccattttagatagttttgcatctcctccttccaattggacatacaatacatctaatgacatgttttcgtgtcatgtttttcgtgtaatattgctgccgttttttttttttttttttttgtcgattgcagccagcgggaaacggtgataatttcttaacgattcttagccgagtttgcgatctggcatcgtttcgaatgactgccgtgggtggtataagtatagttccccttttgggttttcacaaccatcggtaaccctttaccacttctaagtgcacttagaaaaaaatccattgaatctgaaatatgtaaggttttttaataagttaagcacaaaaaaatatatactttaatttattattatactattatttctatctaataaatcatatttacggaattgaacagtctgccaggaaagtgtaatacattactttcagtgtagcttaagttgagttaggcattgctcactaaggaaagtgaaattcccgtccagactggcgcaactgatgatgaacgcagcgaagcggacacttttagctccaaattgcacaccacaatttgtcgccagtcgcctgcaattcctccgtttttttttataaagtcgatgacatggcgccggcgagcttagtcatcatgttcgcccgcaatcgtaagcttcggatcgcaattggccttatcttttggacgagtctcgcggtggcccaaaatgcaagtgcccaatatgaagcggtcagccagcggtcgggaaaccaattggacctggctggttcggccatcgccaagagcttcgagccaccgcccgaattctacaggggtccaggctcagaagggggattagaaaacaacactcccatcagttccagcggtcatccctctctgggaagtgtgggcgaaagtctaagtgatacctacaatagatggcgagctggaggtgcaaatctccaggatcgcatcagtgtgggtgagtcattagaaacaaataaccagaagaatagtttaaattctacaactaattaatttttcaacaaaaaaaaggtccttatggagccgcaggagtagaggcatcgcatgcaccgaatgtgggcagctttgaaagcaattcccacccgtatccctacgagtactcccacggcagcggaggaggtggaataggaggagctggtctagcaggcggagctgcaagtggcgcctttttcggcagttctagtgtagaggctggtattcccttcgatgtgtatggatcgcgaccgggtcacgctgttggacatggccattattcaccgcccgaatatgcgtatccgtatcctctggatcaccacgagatagccgcgcacaagggtcccggctacggcgacgtgtcctccaaagcactgctggccaaaagctttctcatcccgttggccagtgctgcagttcttggtatcgccgctgccctggtcagcaatcctctgctcctccagttgggcactgtttcggggctgggaaccatcgttggcaaacgtaaacgacgagcagcaggccgaaatccgctggcgaggaaagcccataaatacactttataaatatgccattcataacaaaagaaatggaaaataggcggttgccttcaatgaatctctatcgacaagtaacaatccgtgataagactttgttgtggtcagtttcattatcgtttaatcattcatgaaaacgtaatcgctataaaaacaaatcattgaccagcaaagcgttaattgaaaaaatgtaaaaaaaaaatgcatatctctatacgcagttcgtatagaatttattttaaaaggaaaaaccattgttagttattttatacaatattatagaaataaatttatcaattaataaaggattatagttcgccaagtcttatgacataataaatattattgaagttgcctttcaaattttgaaaaatattattggcaccaataatttttcgctctgcttatcgattattcgattactttttatacccagtccctttggtgtggttacactggcttccattcgcggctaaataaatataaatataatgtagttcttctatagaaatatgggctccaagcgtaggcttagattccttttggatgaatccgatcagcaggagaacagcccggatggcaatggtccaaagaaaaagcggctgtttacaccaacggactttaatattccaaaagcgaatcaaaggagttttttggcggaatccacatcaaatcatcaaaagaacactccttccaggtttcagacaatgtggcagacgctaaacaagtccggcagcagcagcagtcaacccgattctctaggaaactccagtttctcatcatgttcccagcttctgaacaccagttggccaggaacgagacgaagagcaaaagcattgccccttgctatccagatttccccaagaactcctccctcagtttcatatgaaggacgtgagacaagctctttattccaaagttcttggaaatcattaattaaccaaaccgcttcctgcaacgggtcgtcagagaacattgactctgatccacctactcctcaacgattgcc

SEQ ID NO: 31115 - DNA, 855 bp, DROSOPHILA
atgttcgcccgcaatcgtaagcttcggatcgcaattggccttatcttttggacgagtctcgcggtggcccaaaatgcaagtgcccaatatgaagcggtcagccagcggtcgggaaaccaattggacctggctggttcggccatcgccaagagcttcgagccaccgcccgaattctacaggggtccaggctcagaagggggattagaaaacaacactcccatcagttccagcggtcatccctctctgggaagtgtgggcgaaagtctaagtgatacctacaatagatggcgagctggaggtgcaaatctccaggatcgcatcagtgtgggtccttatggagccgcaggagtagaggcatcgcatgcaccgaatgtgggcagctttgaaagcaattcccacccgtatccctacgagtactcccacggcagcggaggaggtggaataggaggagctggtctagcaggcggagctgcaagtggcgcctttttcggcagttctagtgtagaggctggtattcccttcgatgtgtatggatcgcgaccgggtcacgctgttggacatggccattattcaccgcccgaatatgcgtatccgtatcctctggatcaccacgagatagccgcgcacaagggtcccggctacggcgacgtgtcctccaaagcactgctggccaaaagctttctcatcccgttggccagtgctgcagttcttggtatcgccgctgccctggtcagcaatcctctgctcctccagttgggcactgtttcggggctgggaaccatcgttggcaaacgtaaacgacgagcagcaggccgaaatccgctggcgaggaaagcccataaatacactttataa

SEQ ID NO: 31116 - protein, 284 aa, DROSOPHILA
MFARNRKLRIAIGLIFWTSLAVAQNASAQYEAVSQRSGNQLDLAGSAIAKSFEPPPEFYRGPGSEGGLENNTPISSSGHPSLGSVGESLSDTYNRWRAGGANLQDRISVGPYGAAGVEASHAPNVGSFESNSHPYPYEYSHGSGGGGIGGAGLAGGAASGAFFGSSSVEAGIPFDVYGSRPGHAVGHGHYSPPEYAYPYPLDHHEIAAHKGPGYGDVSSKALLAKSFLIPLASAAVLGIAAALVSNPLLLQLGTVSGLGTIVGKRKRRAAGRNPLARKAHKYTL

SEQ ID NO: 31117 - DNA, 7222 bp, DROSOPHILA
acaggcggcttccagaatagcgtcaacaatcgggacatacttcttggcgtccttcttcagtctatcgaggagcgttgcatgtgccatttctgcggcccgggtaatgaacatgcctatcgctccaaagacaagatcagccagcgtctgaagcagttgctccgacccaacaccgcagccgcacacgatcagggtgatggattcccggtcgcgccatatgtaagtccactcctcggcatccgcgggagcctgattctggataggctgctgtttgctggtcgtcgtggcctccagttggattcccagcgacttaaagaacatgtgaaagccgtttaaggaggccaccgtcgagaagggcagctggatatggagaaagggtattaactaagtgaataggtaggcaatatgttactcttacattttcgcattctcccttctttcgtgtaaacactggcaatccgccgtttgttgtcaaacataacaaatagatggacatcgcagctcttcttcttcgccgaacctgctacgtatgatgcttacatcgattaaatcgattcgttttgaattatcgaaaataagcgatgcactagtaaattaatatgatttattttaaacttttatctgaattacttgcatacttttagtgttttaatgtaataaatcagtaagatgcagtattttgtagctgattcaggagaacagatcaaattcaaatatatttatgtcaatttatgcatgcatgcatactggtttgtttttccattaaattaaacagataatatttttttgtatttttttttaaaacatcgctgcttaaaacatcgatgtttttcgatatcagggacatcgatgtttctggcagtaagtaagccaacaaactaagcatcttcatccatgccatttgattattttattcgatcaacgttatcgatcactttgcgtgcatgcctgtagaccagggctgtggacgtatgtttgttcagcaccatacgggcacactgttctcacaaattgcatttcgcattgtccgtcgtcgtcgttttcacacgctgctcttttctggaatcggtaaaaggtaagcttgatatgtgaattacatgttcatgattgttaattaattacacactgcgtcctcgctggcgcgttttgaaaagctaagaaaatttgggaaatgccgccgcagtcttgtcgcatttgcggcggcgatgcgttcgcctgtgccagtgtgtgcgtatgtgtggtgtgccgagcgcttgtatgtgtgcgagtgcgaaaaagtgtagcgcgcgcaggcaacagcgtgcgcttgtagttgtgtgttccaaaaaaatgaaacaagaaaacaaaaaagaaatatggttgcctgtcgacaggcgtaaaagtacgcaatatgtataaccaacggtcttatttccacagcttcaggtccagtcccggcaccagatccagatcccgatccagatcgagagtcgccgctcctcaccgtcatcatagtgcgaagaagaagaagctgaagcagaagccgccgcgcactttcgataaataaagtggaaaaaaaaaacagcaaaaacaagaaatccaaagggaaaaaacgtgagatccgagctcatccggcggaggaggaagccaagaagctatcaaaattaacgcggacacaactgcagagcgacgccgacgcgaacgccgcttctactacaaagcgatggcgacaatgttgacatcggacgaggcgggcaagctgctcgacttctcccagaagctggacattaatctgctggacaagatcgtcgaggttgtgtacacagcgcagggcgagcagttgcgtctagcccagagcatactgaccacgctgaaggagcatccagaggcatggacgcgggtggacagcatattggagtactcacagaaccagcggaccaagttttatgctctgcaaatcctcgaggaggtcatcaaaacgcgctggaaggtcctgccgcgcaaccagtgcgagggaatcaagaagtatgtggtcagtcttatcatcaagacctcgtcggatcccattgttatggagcagaacaaagtgtatctgaataagctaaacatgattctggtccacattctaaagcgcgaatggccacgcaactgggagacattcatcagtgacattgtcggtgcgtcgaaaacgaacgagagcctgtgcatgaacaacatggtaatcctgaagaaccttagtgaggaggtgttcgacttttcgcagggtcagatcacgcagactaaggccaagcacctgaaagacaccatgtgctcggagttctctcagatctttacactatgctccttcgtgctggagaactcgatgaatgccgccctaatccatgtcacgctggagactctgctgaggttccttaactggataccgctgggctacatctttgaaacgcagcaaattgaaacgctgatattcaaattccttagcgtacccatgttccgcaatgtgaccctgaagtgtctgtccgagatcgccggcctgactgcggcaaactacgacgagaatttcgcgacgctcttcaaggacacgatggttcagttggaacagatagtcggccagaatatgaacatgaaccatgtgtttaagcatggttccgacacagagcaggagctggtccttaatttggccatgttcctgtgcaccttcctcaaggagcacggcaaactggtggaggatgccaagtatgtggactacctgaatcaggcgctcatgtatttggtgatgattagcgaggtggaggacgtggaagtattcaagatctgtctggaatactggaacagccttgtggaggatctatacaattcggaattcttccaccccaccctggagtctacaaagaggcaacaagtgtatccccgtcgacgtttctacgcccccatcctgtccaaagtgcgattcattatgatctcgcgcatggccaagccggaggaggtgctggtggtggagaacgaaaacggggaagtggtgcgcgagttcatgaaggacacaaactcaataaacctgtacaagaacatgcgcgaaacgctggtctttcttacccatttggactctgtggacacggaccgcatcatgacgctaaagctgcttaatcaggtgaacggatcggaattctcttggaagaacctgaacacgttgtgctgggccattggttccatatccggtgagccatttttggtgttttattcccagtctgtacttggtttttataaatcacaaacattcattcctgattatcatggaccaccattatttccgagtataaccctatttttttttgtgcttttatcactcttcaggtgctttttgtgaagaggacgaaaaacggttcctggtcaccgtgatcaaggatctattaggcctgtgcgaacagaagaagggcaaggacaacaaggccattattgcctccaatatcatgtatgtggtgggacagtatccacgcttcctgcgcgcccattggaagttcctcaagacggtggtaaacaaactcttcgaatttatgcacgaaacgcacgatggtgtccaggatatggcatgcgatacgttcatcaagatagccatcaaatgccgccgctactttgtcaccatccagccgaatgaggcatgcacctttattgacgagattctcacaacaatgagcagcatcatttgtgatctgcagccgcagcaggtagtggctttttttaattacaatattattatacctacatttgaagcttaatcagtaaaagctatactaatgtataaattcatttgtaggttcacacgttctatgaagctgtcggctacatgatctccgcccaggtggatcaggtacaacaggacgtcctcatcgagaggtacatgcaactgcccaaccaggtgtgggatgacatcatctcccgcgcctcgaaaaacgttgacttcttgaagaacatgaccgctgtcaagcagctgggcagcatccttaaaacgaatgtggctgcctgcaaagccctgggtcacgcgtatgtcattcaactgggccgcatatatctggacatgctgaatgtgtacaagataacatcagagaatatcattcaggccatcgaggtgaatggcgtcaatgtgaacaatcagcccctgatcaaaaccatgcatgtggtcaagaaggagacgcttaacttgatatccgagtgggtgtctcgttccaacgacaatcagttggtgatggacaatttcataccgcctttgctggacgctatactgctagattatcaggtaactttcaaaactcacaatgaatacataatacattaatactaatgttatttttccttattttgtagcgctgcaaagttccatcggcacgggagcccaaggttttaagtgcgatggcaatcattgtgcataaactgcgtcagcatatcacaaatgaagtaccaaaaatatttgacgccgtcttcgagtgcacgctggacatgatcaacaagaactttgaagatttcccacagcacagacttagtttctacgagctactgcaggcggtcaatgcgcactgctttaaggcgttccttaatataccgccggctcagttcaaactggtcttcgactcggtggtgtgggcattcaagcataccatgcggaatgtggccgacatgggattgaatatcctatttaaggtacattcactaattaaacttgcttatcggttttttttgtttattaacgggtattttcaatttcagatgcttcaaaacttagatcagcatcccggtgcggcgcagagcttctatcagacgtactttacagatattctaatgcagatattttcggtggtcactgacacctcacacacggccgggttgcccaatcatgccatcattctggcgtacatgttctcactggtggagaacaggaagattacggtgaacctgggtccgattccggataatatgatattcatacaggaatatgtcgcgtcgctgctgaaatcggcatttacccatctgtccgataatcaggtcaaagtctttgtcactggcttattcaatttagacgagaatgtgcaagcatttaaggagcatttgagagattttctcatacagattcgcgtgagtatttatcaaatgatggccattaaagctggccaactgctagtaaatatcatttaccttaatgtatataaattgaattgcaggaggccaccggcgaggacgattccgatctgtacttggaagagcgtgaagcggctctggccgaggagcagtcaaataaacatcagatgcagcgtaatattccaggaatgttgaatccgcacgagttgcccgaggatatgcaggacgaatagatgtcgatgtcgatgtcgatgtcactgagctagaatgttttagttgatgcttgagaatgataaaaggatggtgatgtatgagtgtttctcgagcgagaaagtataaatgtttgtttgattgaatgcatataagtacgttatatatataaatacatccacacaagacccacaacacttgcatacacacacatacacatacacctatacagatatagctgcgttaaaaggtgaatgagtaaatggttattcgtgcgcaattacatacattaatatgattaacatatttttgcgcattgtcctcgacataccagcataaataagatgcccagccagttcccaactcccgctcccctatccacattatatagttgtaaaacgtcataataatactacacgcaaccgatacgaaagatgcaaactttattgtactaatataaaataatgtttgtttggaattttttaaatgagtaattgtagaaagatccgagtatgaatgaatatttgaacaaacacaaacacacctctcagagaaacccacacaaaaatgagcaaaggaaacaagaatattaagatgaagaaaaccttaaagtaaaaatttaattgtagtgacttaaacagatcagatgctggcaggagtaaacaaaattgtatgcaatctttttgcataaatctagcattaacccgacgttgaagacgatggacgccgcaataaggagacgatcaagaaagcacggcatcataaccagaatagagttcatgcaatgtgtgaaaaaaaaagaaaactaaaacgcaaatacccaaaacacaaatacatcaagaaaaacaaaagtaaccatagaaatgcgtattaaatcgtttaaatttttacataattagtttgtacattaatttaaataaaaatcaattaaaactacattgatgtatgatgcaaagccacatttaagtttcaattgtaacgattttgatagtaatatagtgtacgtatctaatctcgtggaatttcgcaattgattgaaacattattggattgatgccaatcaattttgaaagtttggtgggatatctgtatatctgaaatgttttcgtttaatccttgagcaactagtgtcaaaagatttttatttcgaatatttaaagtcaattttagagaaaagtttattaaacgtttgttgtggcagttgtattgaactataggtagatacaattatttaggtcccgctttttgaggcactgataatctgttgttatgtagaaagagcgtgtccttagagtagcccttccaggtttcgaaaatgtcctgggaaataagccaggtgttgccaactggcgtcacgggataaacgtcgtctttgttgctaaaaggcagctcgatttcgtgcgagactttcagcttgaaagcggtaccattaaagggtcgtccagcatggagagccactgtcacatcttccaggaagagtctccaccgaggcctatagtagtcgctcaccaagccggaccactgtttgcacgcatagtccaggatctgaccatcaggaccccaggcggtaatttggtttctcgcattgaattcgaagtttctttgttgcccagtgttcggtgccgcttgcttggcctgctgcagccagttgccgagcagaaaattcctgctgctcgccaggatcagctccatgtcatcgaacagtttcaacagcttgacgctaaggaattcgaaacgcgaaacctgtcgctttctataggccgaccttagattgatatacaactgatctgcgctgatctgcaggaattgcctggttatgtccaccaaatcgtgttcgtatatctcgtatctgttatcctctagcggtatgatggctctgaaggtcagcaacaagtgccaggcatccagc

SEQ ID NO: 31118 - DNA, 4433 bp, DROSOPHILA
ctcacaaattgcatttcgcattgtccgtcgtcgtcgttttcacacgctgctcttttctggaatcggtaaaagcttcaggtccagtcccggcaccagatccagatcccgatccagatcgagagtcgccgctcctcaccgtcatcatagtgcgaagaagaagaagctgaagcagaagccgccgcgcactttcgataaataaagtggaaaaaaaaaacagcaaaaacaagaaatccaaagggaaaaaacgtgagatccgagctcatccggcggaggaggaagccaagaagctatcaaaattaacgcggacacaactgcagagcgacgccgacgcgaacgccgcttctactacaaagcgatggcgacaatgttgacatcggacgaggcgggcaagctgctcgacttctcccagaagctggacattaatctgctggacaagatcgtcgaggttgtgtacacagcgcagggcgagcagttgcgtctagcccagagcatactgaccacgctgaaggagcatccagaggcatggacgcgggtggacagcatattggagtactcacagaaccagcggaccaagttttatgctctgcaaatcctcgaggaggtcatcaaaacgcgctggaaggtcctgccgcgcaaccagtgcgagggaatcaagaagtatgtggtcagtcttatcatcaagacctcgtcggatcccattgttatggagcagaacaaagtgtatctgaataagctaaacatgattctggtccacattctaaagcgcgaatggccacgcaactgggagacattcatcagtgacattgtcggtgcgtcgaaaacgaacgagagcctgtgcatgaacaacatggtaatcctgaagaaccttagtgaggaggtgttcgacttttcgcagggtcagatcacgcagactaaggccaagcacctgaaagacaccatgtgctcggagttctctcagatctttacactatgctccttcgtgctggagaactcgatgaatgccgccctaatccatgtcacgctggagactctgctgaggttccttaactggataccgctgggctacatctttgaaacgcagcaaattgaaacgctgatattcaaattccttagcgtacccatgttccgcaatgtgaccctgaagtgtctgtccgagatcgccggcctgactgcggcaaactacgacgagaatttcgcgacgctcttcaaggacacgatggttcagttggaacagatagtcggccagaatatgaacatgaaccatgtgtttaagcatggttccgacacagagcaggagctggtccttaatttggccatgttcctgtgcaccttcctcaaggagcacggcaaactggtggaggatgccaagtatgtggactacctgaatcaggcgctcatgtatttggtgatgattagcgaggtggaggacgtggaagtattcaagatctgtctggaatactggaacagccttgtggaggatctatacaattcggaattcttccaccccaccctggagtctacaaagaggcaacaagtgtatccccgtcgacgtttctacgcccccatcctgtccaaagtgcgattcattatgatctcgcgcatggccaagccggaggaggtgctggtggtggagaacgaaaacggggaagtggtgcgcgagttcatgaaggacacaaactcaataaacctgtacaagaacatgcgcgaaacgctggtctttcttacccatttggactctgtggacacggaccgcatcatgacgctaaagctgcttaatcaggtgaacggatcggaattctcttggaagaacctgaacacgttgtgctgggccattggttccatatccggtgctttttgtgaagaggacgaaaaacggttcctggtcaccgtgatcaaggatctattaggcctgtgcgaacagaagaagggcaaggacaacaaggccattattgcctccaatatcatgtatgtggtgggacagtatccacgcttcctgcgcgcccattggaagttcctcaagacggtggtaaacaaactcttcgaatttatgcacgaaacgcacgatggtgtccaggatatggcatgcgatacgttcatcaagatagccatcaaatgccgccgctactttgtcaccatccagccgaatgaggcatgcacctttattgacgagattctcacaacaatgagcagcatcatttgtgatctgcagccgcagcaggttcacacgttctatgaagctgtcggctacatgatctccgcccaggtggatcaggtacaacaggacgtcctcatcgagaggtacatgcaactgcccaaccaggtgtgggatgacatcatctcccgcgcctcgaaaaacgttgacttcttgaagaacatgaccgctgtcaagcagctgggcagcatccttaaaacgaatgtggctgcctgcaaagccctgggtcacgcgtatgtcattcaactgggccgcatatatctggacatgctgaatgtgtacaagataacatcagagaatatcattcaggccatcgaggtgaatggcgtcaatgtgaacaatcagcccctgatcaaaaccatgcatgtggtcaagaaggagacgcttaacttgatatccgagtgggtgtctcgttccaacgacaatcagttggtgatggacaatttcataccgcctttgctggacgctatactgctagattatcagcgctgcaaagttccatcggcacgggagcccaaggttttaagtgcgatggcaatcattgtgcataaactgcgtcagcatatcacaaatgaagtaccaaaaatatttgacgccgtcttcgagtgcacgctggacatgatcaacaagaactttgaagatttcccacagcacagacttagtttctacgagctactgcaggcggtcaatgcgcactgctttaaggcgttccttaatataccgccggctcagttcaaactggtcttcgactcggtggtgtgggcattcaagcataccatgcggaatgtggccgacatgggattgaatatcctatttaagatgcttcaaaacttagatcagcatcccggtgcggcgcagagcttctatcagacgtactttacagatattctaatgcagatattttcggtggtcactgacacctcacacacggccgggttgcccaatcatgccatcattctggcgtacatgttctcactggtggagaacaggaagattacggtgaacctgggtccgattccggataatatgatattcatacaggaatatgtcgcgtcgctgctgaaatcggcatttacccatctgtccgataatcaggtcaaagtctttgtcactggcttattcaatttagacgagaatgtgcaagcatttaaggagcatttgagagattttctcatacagattcgcgaggccaccggcgaggacgattccgatctgtacttggaagagcgtgaagcggctctggccgaggagcagtcaaataaacatcagatgcagcgtaatattccaggaatgttgaatccgcacgagttgcccgaggatatgcaggacgaatagatgtcgatgtcgatgtcgatgtcactgagctagaatgttttagttgatgcttgagaatgataaaaggatggtgatgtatgagtgtttctcgagcgagaaagtataaatgtttgtttgattgaatgcatataagtacgttatatatataaatacatccacacaagacccacaacacttgcatacacacacatacacatacacctatacagatatagctgcgttaaaaggtgaatgagtaaatggttattcgtgcgcaattacatacattaatatgattaacatatttttgcgcattgtcctcgacataccagcataaataagatgcccagccagttcccaactcccgctcccctatccacattatatagttgtaaaacgtcataataatactacacgcaaccgatacgaaagatgcaaactttattgtactaatataaaataatgtttgtttggaattttttaaatgagtaattgtagaaagatccgagtatgaatgaatatttgaacaaacacaaacacacctctcagagaaacccacacaaaaatgagcaaaggaaacaagaatattaagatgaagaaaaccttaaagtaaaaatttaattgtagtgacttaaacagatcagatgctggcaggagtaaacaaaattgtatgcaatctttttgcataaatctagcattaacccgacgttgaagacgatggacgccgcaataaggagacgatcaagaaagcacggcatcataaccagaatagagttcatgcaatgtgtgaaaaaaaaagaaaactaaaacgcaaatacccaaaacacaaatacatcaagaaaaacaaaagtaaccatagaaatgcgtattaaatcgtttaaatttttacataattagtttgtacatt

SEQ ID NO: 31119 - protein, 1060 aa, DROSOPHILA
MLTSDEAGKLLDFSQKLDINLLDKIVEVVYTAQGEQLRLAQSILTTLKEHPEAWTRVDSILEYSQNQRTKFYALQILEEVIKTRWKVLPRNQCEGIKKYVVSLIIKTSSDPIVMEQNKVYLNKLNMILVHILKREWPRNWETFISDIVGASKTNESLCMNNMVILKNLSEEVFDFSQGQITQTKAKHLKDTMCSEFSQIFTLCSFVLENSMNAALIHVTLETLLRFLNWIPLGYIFETQQIETLIFKFLSVPMFRNVTLKCLSEIAGLTAANYDENFATLFKDTMVQLEQIVGQNMNMNHVFKHGSDTEQELVLNLAMFLCTFLKEHGKLVEDAKYVDYLNQALMYLVMISEVEDVEVFKICLEYWNSLVEDLYNSEFFHPTLESTKRQQVYPRRRFYAPILSKVRFIMISRMAKPEEVLVVENENGEVVREFMKDTNSINLYKNMRETLVFLTHLDSVDTDRIMTLKLLNQVNGSEFSWKNLNTLCWAIGSISGAFCEEDEKRFLVTVIKDLLGLCEQKKGKDNKAIIASNIMYVVGQYPRFLRAHWKFLKTVVNKLFEFMHETHDGVQDMACDTFIKIAIKCRRYFVTIQPNEACTFIDEILTTMSSIICDLQPQQVHTFYEAVGYMISAQVDQVQQDVLIERYMQLPNQVWDDIISRASKNVDFLKNMTAVKQLGSILKTNVAACKALGHAYVIQLGRIYLDMLNVYKITSENIIQAIEVNGVNVNNQPLIKTMHVVKKETLNLISEWVSRSNDNQLVMDNFIPPLLDAILLDYQRCKVPSAREPKVLSAMAIIVHKLRQHITNEVPKIFDAVFECTLDMINKNFEDFPQHRLSFYELLQAVNAHCFKAFLNIPPAQFKLVFDSVVWAFKHTMRNVADMGLNILFKMLQNLDQHPGAAQSFYQTYFTDILMQIFSVVTDTSHTAGLPNHAIILAYMFSLVENRKITVNLGPIPDNMIFIQEYVASLLKSAFTHLSDNQVKVFVTGLFNLDENVQAFKEHLRDFLIQIREATGEDDSDLYLEEREAALAEEQSNKHQMQRNIPGMLNPHELPEDMQDE

SEQ ID NO: 31120 - DNA, 17004 bp, DROSOPHILA
gatgatgggcgtacccggggtgggttgcaggtgagccactcgcactcgaaacacattctcatgaccgcgcagctcatttaacttgctgctgctggtgatgcagcccatggtgttgcactgaaagacggagtattatgcattgaaggattatccactccagtcatgtacagtgcctattgaaatgcacacctggacaggcaagtccgcctggctgttatcgcagcgggcatggaagaaatcgcaggccgataagagcaccacccaccgcctccaccagctgaaatcagctacccagtggaactggaggctctggggtgcagtcgaattgtgttgctgttatcctggttgactcctcctgctttggttaactcctgatcgacgggactgctggctgattgttgttatttggccacggaaattccgttcttgtggtataaaatttcttctgcgacttttcccctcgcccgacagaacgcaattgtgagcaacgggcatgctaacttgattttcgcaaaaagacttacaagaaacgctttttaaaaaagtaaacggaaaatcaaagacaaattacaagtaattacacttaaagaatgaaaaactagtttagccaagtttaagccaaggaaatattaatatttcaaaatttatagaaaaatattgcaaatgtcagcttaatagaagttttctctcgtttaatagaataatcttgaagatttcttacgtcgtaatttttacgtttctgcaaatgtttactgcaattaacaagtaataaataggattcagatgtaaacaaatataatttataaaaaaattttaagttaaggcattttagtcatcttaattgtatggttaaccatttggcggaacatcaactttgtggacagcactataactagacccgaagccctaacgcgttctaactgcgaaaacatcctaacgcgacgtaaataccagacccgagcggacattttttatttgtggagcgcgcaacaagaacgagaaaagaaaccgaaacggaaagcaggcaaaaagagctgctgccagtgtagaatcgcaaagcaaagaaagaagcaagtgcgtgtgtttttaaaccgaaaccgagagaatcgagccaggtaaattccactttaagtcataagatcagaacataaaggagttaatttaaaaaaataaatgaaaaagaaaccaaagccaagcaggcagacggcttgcgtgtgtgtgtgtgcgtgagtggtgctacttttgaaattctctatacccgctttgaatttcgtgtttgtttaaaggaattgtgattgaaaaggagacaaagagttattgacgaaaagtttctaactggtttcaaaaatggtaactgtatttgaggcacaagtgtttgtaaaagagacgcccgccgacgctcacacacacaggcaggaaaaaggacgccatggaaggcggcttagtgtgcgtgaacggtgaagaatgggagaagcgaagactaaaagagatatttaaatggagttttatgcatttaaggagaactttctttgtcattaaccccgcccccgcaaaatacagcattcgaatttcgccaccttggagtagttgcctttttacaaaatttttgggtgtgccgccttcaatgcgtcggcgttgccaccacgtcggcgtccgcagcagcagcgcaggcagtgacggcggcagaggcaaacaccatgccggtgtggctttgtatccgtatccgtctcgctctctctctctctctttgtctcttcggctcaatctagcgctctctcctttttgtgcctcgccttccttcgcctcgcccgctcatcgctctggtcctttgtgccatcgcttcgccttgacttctggttcattgtcgttgtctcctctttgtttgcattgtacgcctgattacacttgccaacatgtttctaccttctcagccaaacatccttgtgcaaggtgcacgcacatagcgagtgcccactgtggccatttgatctttgtatacgtttcgatcccttttgcgtctcggtttactcagattatcgatacgaggaggatcgtctttttgtttttcctacacttttgttgcgaaaaactgcgtcgcactttctgcagcgtcggtttgtcagttcgtccgtccgtccgtcactcagtcgttcaatcgctcaatcgcagacgggcagacagccaccgccctaactggcgtcgcctacatgtctttgtgtgtgtggtgtatgtgcttgcgtgcctggggtagtgtgcctgtgtgcgtgcctcgctgcatgtgtgagtcctttacgaatggagtgggtgggcagaggccgaggaggaagaagcagaagcgcaatcacaagattttcgattgtcaactgcaatttatactactgctaagagaattttatgatctacttgcaacgctgaatgctaatgccttaaattttagtagcctctgtcaaggatcttaaattcaagttcttgtcacaatcatatttcttaagtatataattacttttattgttaaatatttgtactgtacttaatacgtaaaacgtatttgacaagtgaaatttcatgattgctctactgaaatcttttctttgaaaatgaatgctcttctttgtgttctaacctgaccaaatttatttgtcagtgacccaatttaggcaccaaaactgtaaatatttccgaaaatcttatcaatttgcctgttgaaaatttgattaggaatggagtttgcattctgaattttccccactcccgaaatttgagcaaattgaattatttcgctgcgatttcaggtagcggtcgccaaccgaatgtatctttgaaattggtttattgttaaggaggaggggagggcgccccatagaatttgtggcgggttttcccttgaagtcggctcgaatttcgtgtacatatttgccagtcgttcactgaggacgagcatatacatataatgctttttggtgtcgcctttattggcgaatttgtcaacgtttgctcaaactcgagtaaacattgcattgcgatacggtgtggagggactgggggcaaacatgccgtttcgtcaagtgcgattcgcggttaaccagcaatgctcgatcgcacaattggccttaaagctgtcgattagggtttaaatttaactgcgaactatttggaaataaacagaaatcttttccggaattacaatacagtaaaacttgatattctaagaagttatagatggttcacgtacggttatagaatttcttagtgcagtaaaggtggcaaagcatgtacgaaaaacatattttcgactatttactaacgcatgtaatgttattgacaactggaaagattccaggaacatgccttttgtttatcaacatagtaattatatatcaatgctcgtgcagctacttcctggaaatgagtgtaagtaagcatggtcattttggaagtaacccatacgatctaatgattcgcagaacggagacaccggtctgccagggcacatttgtgcgctaaacatatgaagctcaaagtccgaagctcaattggggagcatgggtagctgcgtatatatgtatgtatatgggtgtgtgtgtaagccaaagtgttgagaggtcctttgtcaccgctgccatacattcgtatatctacgaaagcgagcgaatttctcatttaatatgcaaacatctgtgtgaaagatgttcgaaggctgccgctgtgatgtgctgctgctggggctgtgtgagtggaaaacgtttgcagattgagctgattttcatttcacgttctcttctcgaacaactcgagtgatatagccctcggttcgaccacttgaggccactaattccgcaggaattcggtatggtttcaggcatactatcataattgctgggggtgcacattaaaattttttttttttttgtgttgtaggtgttgttgttttgggaggcatttggcgtgccgaatgggcattgtattaatgccaaatcaacagaaatgtggaaaatagaaatatatgtgtagtccgcactaaaaatcaatcgcagtaggccccagaaaccaaaataaacaaatagcgtccgaggcgaagataagcggccctggtcggatccaatgtgatccgatctccatcatatccctcattccgcccgccgatcatgaattttattcaaattgaagctcttggtggcgttcgatttcgttgctgcggttttcggatttgcctatttagcgcttcttatcaaagccgctatttgttctcagtccgcggaggtacagtaatcgaaacaagtaagaaaacatcgagtatcaattgtttcacaaattataaactgtatccataccataagtgaaactgattggattgaatctattggatttgatcgtagttttatgggaacacttccaacaggagtcagttccattaaccccgcgaccacagcagagatttatcttgaattgaagtggagtacccccacgaaatgcaatcccgttccccgatacacaattactttcccattcgagggcgataattaaataacaatacaagagtcccgttgactgttacaccacatattttggtatttcggtgattcttcacgccttctctttctcttaattttgtctctctgcgtgcgtgtgtgtgtgtgtgcgtgtgtgaggctccccctttgcatattgtttattcccgctgcctgcgcttgccgctgtttttgttgccttcgttgttgcatgtggggtcattgtgtgaatggcagcaaaataaagcaataaagcatacgcatcgacgccgccaaggctcattagtttgttattgactaaggagtgagaagaggaagaagaatcagatggaaaatgggtaggaggggtagaggttatggttggaaagggaaggggtggggagtggtggaggggcaccaggagcacgcctttatctttatcggcagctgacggtcagtaagtgtgtatttgtgagtatgcccgcatttctttgcagcttttttttcgactcctctgcttccggctgacgtcgctgcctctgctgccgctgacgtcgcagtctctgctggctgcatgagaagtttctgctgccattgatcgcgactcgctctctcagtcatcgtttttcgctcgactttaacggttctcgtggggatttaattccagcctgcatacacaaataaaagacgcgaagtgccaaacgactaaactattactctcactagttaattgcacagttaccacagttagttttcacctagttaagagagatagaaagagaccacccgcgcagttggcaaaaattgtaagtaccggaaatcgaagaatgggacagctaacgcagcacccccaaaggggtctaatgaattatgtataaaatccaagaggatccgtttacaacagacacacttcgagtgcccactgtgaatttctaatcagaaaagctgtgtgccgcggctgctctttgcggaaaatgaatgctaattggccacgctagctaacttgttgttgttaccactttttaatacacaacttacaactgtcgcacgcctctcggagttttaattaaccgcaacgatagagagagagagagagagcgagaactggagaccgagagaatcagcgaagagagttggagcagcaggaaaagagaagaaaagcgaaccggtttagtgggcgctctggttcttttttcgttgctgcttttctccgatttactttgtcttcgtttttatccttttttccactgagccatgaaaaagaagaagcagaagaaggtgactctgcgtgggcaggcgacaaatttattggcacttattcgcttattcccgcttttccgccctttcttgtctataaagaaaaaaggaagcccccaagctttgaatattcaaatatttattgtaattattttcaacaccggcccacagcgtagttgatttaagtgcgcgctcatttgataccctgtaatgattgagtgtggggggtatattatggtgccggtacgatgtgatagactgagaaaaaattgtatgaaatcaggaagatcaatttatattacgttactcagcaaagttaagtcttcagtttggattctatatagattaaatttatactatacaaaatcgttctctatcagaaagattaaaaagttatcataattagataactactccagacagaaagagaaagttaagcaaattaacttatctattcatatcagcttaaactatatctataacattgtcatggtttttttaaagcttaacacaactatataacttccaacggaattagaaagtacgaaaagaacagagtactgcacctatcttccattaaaagcgtatctcttgccctgaactgtaattttcttcgctacaaaaactagggttcttccatcattgctacttgtcttccagattacacattgttgaaatattttcaagtaccatacacgcatacagccccgcggcaacatatttcgtatgcgccatttcgggttttgcgccttgcaaaaaagaagttggcatacgtttctagccatcatacaattcatacatatatacatacatatatgtaaatagtgaaggaacggtcgtacaaagacatatcggacgttctcaacgagctcataaaattttacggttcttgctgatgattttatgcgttttgtgcctcattatatttcgtacatatgcgtgtgatgcccgattgtgtggcggttttgatagtttttgaatggcaggccaagaggaagaagatattttcaagtgcgtctaattttacgatcgatgccccatacccacactatgccccattctttcttctttccattctttgcatgtttgcttgtgtgtggcaaagtacgagaatatcttgaagatatgataaaaaccggctagataagccggtcgtatctgtatctgctgtcatgttgtgaaaaacttgactggagcacgtctccacaatgtgtacactctgcaagttcttattttgtggggcaggtaatgtttgccaagatcaccgagactggccaaacatgcctaaattcgggggaaatgtttcgctaaaacatggtggtatatatattaatcacgtagcacccgatcttggggccttttgctgtcaaaagtcccccgcatttagtgaatcacttgctgatatcgattttcctttgttattttacgaacactgcatttatcaattgaagagccgtgttcctgcacactaaactccacccatttcccaatcgcagccgaaacacgacttcctctggtgttatcgtcattattaatacagatatagaagaataggtttctgtgtaccgttaacaatgattgtatattttatttttggccctgtgaatgtatccatatcaaatgtgattgtaaagacacacgaaacttaaatggggagggagcatgtccgttgtccgctgtccgtacagaacattccgaattgaccggaaatgataattgaaaaaaatattttctcttttctttgggtcttgtcaaccaacttgtgcgtgtgacatgtgtgtgtgtgtgcaaaggaggagtgtggagtgtgtgtacttgcttgctactaattatggaatgcattcattttacgtatcgtatcattttcattatgccacaactccagtacagcactctcgcccagcaacaacaattgtatccggtggttacttgagacacactcggcttgttgtcaatgttttgatatagtggcctggcccattgctcttctcggtttcgttattgccttctggttcttgcatatttttggcttagtggtttggcttataaagttgacaaggcccgattcgggttaaaaagcacgaaaagtctttgtgaagttggacatggggtatttgcatgcaaacttgttttccagacagaacattcaattattttaatttttctgtagcttttctgattattggaattgattaagcatgaattttgtgtctattcataagatttgataagcaaaaatagcaccttgatcaatgtgataatacaaaattcaaactattattagtatattgcgtcttattttcatttattgtaaattaataatacatactgtaaactttcctttaaaaacctagcgattatatttcaggaagaatacatttctttcgcacgcttttcgggaatcataatctttataagattgcatccgcattgtgggtgtgcgcttgtgtgtgtgcgtactttttgcgtgggggccacaacaagaatgtttcttgatgacaattaaagtggactgcgactttatatgtatgctatgcgctcaataaagccaaatgcatcgtctgattgcggcttaggcgtggcttatcagcggcagcgaaggcaacaatgcaacgaaagtgcactctgctttcttctactgctccttcctcgccgtcttattgttctcccactcaaaacttgggtctacttgagcctgattgagggaaactttccactcaattgagaggaggatggctggacggactgacggatggattggatggatggatggatgtttgatgtgtgtgagcgatgccattaacgatctctcttgattagtttataaaagttcaattgcgctggtgcgcatgcactctgctctaaggcattgtccctaccacaaatggtgaaacttttcaattttaattgcacaacaatgtacacatcatgatgccacactgctgccactgatcttgggagggagtgcaaatggttttattggaatggagaaacggataatgggaatgggaatagtggctatgcgcctgcgctttaacaagccaggccagcatctcccaaacgcacacacattaatttgtttgaccggccggctagacattcagacggtcactcagccggcacattccagcacaatcaatttaatttacgtatcaaaacgtctcatccatcgctccctcgccggcaggcgagaatgagacggccagatggatagatagcgttggaaggaggtgactgagctgtcagcttggctatttttagctatattccaaaatcacttggctatcaaatctaattgtctcagaatagttagataaactagtcttagaatagcacctactataacaacacaaacccttgtttttatcccaccgctggtcagtttagttttgtgttacagtgtctaatgatgcattgatgtgttaaggggatgtgtttaaataagatataatgcaatatattttctcaacgttgtttacccatattactcagctgagtttctttcgtcagcactatttgcagaagaatgcaggagccagcaaagtgatacacagcagcttggagtgtcaaaattgataggcggctgcgtccgaaaggcagagggaatgtgaatgggaacgaattgaagctcacactcacgcctctttgtgctgttgcttcttttattttattttcgaatacactctccattgttgataaatgcgcttttatttatagaatgcggctgctgttttgtgagctgcgagctctgctctgcgttttcctttgtcgtcgtccatcggctcgacagctcgagggtaagggatcgggatccaaatggggggagggcgtgtgaaagtgggcgcacatgtcaaatgccatgtctaattgaattaaactaataaaaaacgaagacacaaaggccccgaaaacttttgttgttgtcgcccattaagtaattttcatagattacacattttagccggtcttccacccttgagtcacttcactccataacttcaaaactccccgccttctaaatcaattgggaaaaatgcagtggtacttttctaattcgaattttagacattcaattgcactttacttgacaacataagacagttgctataatttataaagtaaaggcaaagttgttaaagaacgtgctttcgaatagtttttctagtttattactgaaaggatgtattttctcgctgatctggcaacccggtgcatgtgtgtcctaatgcattgaatataaacgttggaccgcactcaattattttcacacgccccaccgcagggggttgtgggcagaggacgaggatggggacgatgacgataaaggggaagtgaaagaggaaggaacaacagttgttgctatgttggcatagcaacgtgcaatgaccagacccgctaatgttattattgttgtagttccctggcaaatgccggcaaccctcgcactctcgagtccttcggctcttactcactcacgctctgctctctttctctctctctctccttcggtttctctcgatgtccttttctttgatgcgtcatgcgcgccagtttacttgcgcttttatgttattaccttaccttctatgaccaaattcagtgggcacaatgggggagtatttcggcatatttcggccattactcatccggtttggatagacataggccagaaattaatagcctcattctttgcccatcggatatatgtggctcgctccgctatcactccgatcgaaatacataaacgaggagcttcagttggcccggtattgtatggtatacgtatggtattgtgtcgggttgtctcatattaattgcttcgctgagttcgttgaacccacagagtcttgaaacttgaggtctcttttcttgttacgtatttaaattgatatgatgtatttgtgccgagtgcacgattgtttgctttcggtgcaaatttaaagcttttggttttatatctaatcggaattccaaaaccctaagggcttgctgttctaaatatggtttgttgtactacgtattgaaggggggaaaggtgcacactcaagctgttcttgttatttgtttcttgtctcaaaatttatacatcgtatttgataaaggtgatgaatgacatattgctcacacctttgtttagttgacaacgccttagacatcgcaagtgagtcaaagctcttcggcgaaactccaatgtcagaacgtttttgcacctatcagtggggaatcattcacatcggtaatattttgcttcctgcctcgtccacgtcttgactcacgtccaactaactaggcaataataaattgaagctaatgagtcactgatggattcccagagaatttttaatttgcatatggcgcaccacgtgccggtggtgcgtgtgcttctgttaaaagtggaagtggaattggatggtggggcgggcatgtggatggttcggatgtgggaggctgttgattcaccgggtctagagaaagccgtcggaacagctgctcttttagcctttgttgtctgtgtgggtcgggtttggtgtgtgtgtttgtgtgtttgccgccattttttagctgcatacgagcacacacaacaccttccccatttcatttcccacttacaacccctaaaaatgcaaaaaacttcttgctgagccaactcttacggccgaaaaatgtgttggttctttgctacggtttctgtttcattcactctggcaaaaatgttgtgtgtgtaattcgatttagcttaaacatgacgcattgcacgctaaaaaaaaccctcctccccatttctcttttccttggtgcagcgtctgtttcgttgtttcatacaaacttcccagtataatgaaaaacattcaagtgtcgatgaatcatttgaggcgctgaaattgtttacgattactgccgtctcgttgggccgttacagtatttattgggtaattgtagacgatagtaaaattaattttattgaaattataattaataatttagagagaatattctttttaaaaatttttgtgtgaatcagttattaaactcatcgccaaaattatttcaaaatattgatttaagtaaacggtgtatttatgaaagaatgctattagcgtagtaaatacacattatcgcaattgttttcttcatggtctagcttatttgataagccctaagtggtggatgcaatcggcaatccttaatgaggtcatcgaattgcattgaaagatctagagtgcgtgtctgtgaaaatgtcaatcgcaaaaaataggagaaacactatctaaaaatataaattgccgccgtacttgtgccattttccactctacaatgcttcacatttaaactaattactcgcttcatttgctttcagtttacactagcgactaaaggaggatcagcaggaaaaaatgggtaaagctcagagcaagcgttcaatcgacatcaccaccgatcccaagaaggtcggagagggcgatgaggtcgccggcaaggtggagaaaatcgatgtggaccagaagacggacgcgccggctgtgaacggagacgctgccacgcccaaagagggtggtgatgaagcggcggcggtagaggtaagcaaatcatatcttcaaatgtgtacgtctcatgactgatgtgtttaatttacgccaatagaaaaaggaaactgaggagcattctgagaacgacaaagatctgaccaccgaaaagagtgccgcagtcgctgagggtggtgatgcggtcgctgaaacggccaagggcgaggagggatctcccaaggaggctgctgctggtgaggatataaccccgctggcagacgaaagcatcaagtccaagtccaagaaggacaaggtcaagaagaagtggtccttccgaagcatttcctttggcaagaaggacaaacagaaaccggccaagtcggaggaggctacgtcgcccacctctggcacaacgtcgcccacgacggccgaggcagaggctgctccagctggggatgcagctgtcgcagaaccatcggtggctacaaatggcgaggctgaaaagccagctgaggtaagttgacactcgaaatagttcaagaggaattttatttaatatctctaaatgttataagactgccactgccaccagcgagccggcgtccaaggatgagaagcccgccgaaaatggatcagcgaccgagcaggagaaacaggccaacggagaaaccgaaaaggcggcgccagcaccttccacagttgaggaagcggcgaagcccaagcccgccgaagaaccagccacagtcactgccaccgaatcgaacaccactgccaccgaagaagttcccgtgaaagagagccagccagagcccgaagtggtgaccaatggacatggagccggagaggcgctgaccaacggatcaagcaatggactggccgagtccccagtgaccgagacagcacctgtcgctgacaacattccgagcaacgttgatgacgagccaccgcaccagaatggcaccaatggcaccaccacgcccccgcccactcccgtggccaccgagatcgagaagggacagcaaattgaggtaaacaaccacacaagaacagacaacaccacacaacacaacagcaaaaacatcactgtaaatacaagtacaacaacaacaaaaacaaccgaaatcacagagaacactgcactaaaaacaataagtacagatacagaaagaacttgcacaagcactgtgaccgagaccgttgtagcagccgcagagttagttcagacccaaacaatcctaaccaaaacaacaaacacgatccttcccacctcccacacgcaggccagcagtgaagtgattgaaacagtgacccccagccaagcggaagaggaagttgtggcagcaatcatcaaggcggttagcagcgaacctgaagccgaaacggagactgagacagaggccgagggattcgtgcttgttgctcctgtgtccaccgaagtcgaagttcccgtttccatttcccccattgaacccgtggcagaggtttcccaagttaaaattgaaccacttgtcgaaattcccgaagttgaagccaagtccgtagccgatgtgtctgaagctgatacggaatccgtaccaaaagtttctgaattgaaaactgaagtttccgaaattgagttcgagtccgttattgtggagacgagaagcagcagtccgccacctccattgcccaaatccccgcctccgtctcgtgtctccgcatttgtgctgtccgaggatgttatcgaggagcaggttaccccgaatgtccccgaagtaaacgacgtgaagcccgatgagatcgaacagcaggcaatcagcatagtggctgaaatcaccgaacaggcagcagaaattgtcaccgaacaagagaaacaacaggaggaggccaaggtggattctgttcctgaaacaattgaggaatccagctccacggttgtggttgaggaagttttaccagttcaaaacgatgaagtaacggctccttctcctactcctgatgatgtccagaaacctattgaagatcaagatacacccgacgaaaaagagtcctacccagttccagatcccattgacccggcggccgtaaacgatgaggtcgctgttacagaagctgtagattgtgaagttgagaaagaaaccggtagcatcagctccaacgttgctgaatcttcttcagtatccgacgagcaggcggcaatcgaaaatcaagatgaaatcctccaaaaacagccagcagctgttaaggaaaccaccgatcaagagacatcagaccagcaagttatttccgaggaggcgcatagcgataacgataaggagaatgaaatcgacctggttgaaaacatcattagcgatctggatgctccgattaccaaagcaggcggcgatctgctggtagaattggatgcgagatccgcggaacaggagggcgagagcaacaacaaggtgaatagcaagtggcagtggttcttaaaactgcaacctcaagtcttcaaaacacatcgacttcaacacaccatataaccattcttgcatctggcgctccatttggtgggcatggagctatgtcctgggcgtgcttcttctgctttctccactctgtgtgtgtttcccattcaaatggcatcagatattctgctgctggtagcgcgcttgttgccgtagttgttaatacgtagttcgttagtgtttggtacattgattgatgttgattgaattgctcggggattgcatgatattttttggtgatataaagcgaatgaagtacgtaatactaaaccgaggatagcgactgcattgtattaaccgcaagataccaagtccataaacacaacctaaaacgcattcatcctaatcctccacacatgcacaccaaaatacaaatttagaaaacagaaaattattcaaaacccaacccatttataccccgctctgtcctaactcaatatctgtttggctgtcgtaactcttggctctcactaaaaccaaagaccataaatacacaactgtaccttaatgttaaaaacactacacacatacacacacactcgcacacacagttcgtaaatcgcttattattaaatacattattttgtatactatttcgttttgtttttgcgcctttgtcattgtcgcgaactttctttccccttaattgttgttgttgtgctttcagtttttaataattttttttttatgcaacacacaaagcaaaagccttgaccagataaacaactaataatttccattgcgtttgttcacaggtggatctcgccaaggatctgaaggagaagaatgccgccgcggcagacgttacaacacaggaacaactgcccgttacatgcgaataatcctactcataattattatatataatattacatattattaaaaacaaaacaacaaacgatacaagcaacaacaaaagaacgcaacgtaaaacaacaaacaattacaagataaacgagataaaaacaaaacaaaacaaaaaacaagcaaaaatacatttttaaacatttacatattttaaataatttttgtacgaacttcatatccctaatccaagatatacgcaagcaaaagtccgagttacacgcgacaccaccatccacgccaccaatgcaaccactgcaaccaatcaccacgccccactcaaacaccacccacgcgcaggaatcaatagttttttttattgatgcctctcaattccagatcgggttaagtccccaaaaacacatccatcacccatcaagcacacaccatccaccacacaagcgcatacataccattctcatattgatgatcttgatagcgaaagaatcaacaaatcatatacgatgaaatgatgaaagtgaggagaattttttgaataatttctactatacatttaactgtaagttcgaagaaatttgtaaagaatttttggacgaaatattggataaaatatatattataaaatataaaacccaaaagcgtgcttcactcatatccgccggctgaaaaaaaaaaacgagagagatagaaacgagatacgagatacgatgaaccgcagaaaggaaacaatgttttgaatgttttaattctgtttcgagtcgagtcccaatcctcttctttaatacactaccaaaatagtttttctttacaatatacacaatgtaacagagtgttacgaaaataatcacttgtcctggtaactggagtaagcgctaagattacattatatttcgtaatggttaatttaacgtaacaaaatgttactacaaacaaactacaaaagctccaacgaaagcttcaaaagcgaaacaaacgaaactaagaaatgataaagaaaagcaaatactaacttgtgcgtcttttgcaactaaatagaaaatcctactaagtacactaaatgtattcaataaattaaagcgttaattttacgctgcgcaacgtaaagaaatatggtcaacaagaatttgccatccaacaaagaggaggcttatataggtgaaaccaaattgtttccaaatcaaattctaaatctcagcatctgacaaaaaagcgctgcttatgcaggtgtagttgctgctgcttccggcgataatccggcacattgcggagcatgaaaacggctgcgaagagaacgtagagcgacgacagcatgaggagtacgggaaaggagaagacgatgtgcgccattcggaccttccgctgcgctgttggaggcgaatagatgtagtcacctgcaatgatcaatgagttcatttagttaccatg

SEQ ID NO: 31121 - DNA, 2998 bp, DROSOPHILA
aaaagaaaccgaaacggaaagcaggcaaaaagagctgctgccagtgtagaatcgcaaagcaaagaaagaagcaagtgcgtgtgtttttaaaccgaaaccgagagaatcgagccagctcgactttaacggttctcgtggggatttaattccagcctgcatacacaaataaaagacgcgaagtgccaaacgactaaactattactctcactagttaattgcacagttaccacagttagttttcacctagttaagagagatagaaagagaccacccgcgcagttggcaaaaatttttacactagcgactaaaggaggatcagcaggaaaaaatgggtaaagctcagagcaagcgttcaatcgacatcaccaccgatcccaagaaggtcggagagggcgatgaggtcgccggcaaggtggagaaaatcgatgtggaccagaagacggacgcgccggctgtgaacggagacgctgccacgcccaaagagggtggtgatgaagcggcggcggtagagaaaaaggaaactgaggagcattctgagaacgacaaagatctgaccaccgaaaagagtgccgcagtcgctgagggtggtgatgcggtcgctgaaacggccaagggcgaggagggatctcccaaggaggctgctgctggtgaggatataaccccgctggcagacgaaagcatcaagtccaagtccaagaaggacaaggtcaagaagaagtggtccttccgaagcatttcctttggcaagaaggacaaacagaaaccggccaagtcggaggaggctacgtcgcccacctctggcacaacgtcgcccacgacggccgaggcagaggctgctccagctggggatgcagctgtcgcagaaccatcggtggctacaaatggcgaggctgaaaagccagctgagactgccactgccaccagcgagccggcgtccaaggatgagaagcccgccgaaaatggatcagcgaccgagcaggagaaacaggccaacggagaaaccgaaaaggcggcgccagcaccttccacagttgaggaagcggcgaagcccaagcccgccgaagaaccagccacagtcactgccaccgaatcgaacaccactgccaccgaagaagttcccgtgaaagagagccagccagagcccgaagtggtgaccaatggacatggagccggagaggcgctgaccaacggatcaagcaatggactggccgagtccccagtgaccgagacagcacctgtcgctgacaacattccgagcaacgttgatgacgagccaccgcaccagaatggcaccaatggcaccaccacgcccccgcccactcccgtggccaccgagatcgagaagggacagcaaattgaggccagcagtgaagtgattgaaacagtgacccccagccaagcggaagaggaagttgtggcagcaatcatcaaggcggttagcagcgaacctgaagccgaaacggagactgagacagaggccgagggattcgtgcttgttgctcctgtgtccaccgaagtcgaagttcccgtttccatttcccccattgaacccgtggcagaggtttcccaagttaaaattgaaccacttgtcgaaattcccgaagttgaagccaagtccgtagccgatgtgtctgaagctgatacggaatccgtaccaaaagtttctgaattgaaaactgaagtttccgaaattgagttcgagtccgttattgtggagacgagaagcagcagtccgccacctccattgcccaaatccccgcctccgtctcgtgtctccgcatttgtgctgtccgaggatgttatcgaggagcaggttaccccgaatgtccccgaagtaaacgacgtgaagcccgatgagatcgaacagcaggcaatcagcatagtggctgaaatcaccgaacaggcagcagaaattgtcaccgaacaagagaaacaacaggaggaggccaaggtggattctgttcctgaaacaattgaggaatccagctccacggttgtggttgaggaagttttaccagttcaaaacgatgaagtaacggctccttctcctactcctgatgatgtccagaaacctattgaagatcaagatacacccgacgaaaaagagtcctacccagttccagatcccattgacccggcggccgtaaacgatgaggtcgctgttacagaagctgtagattgtgaagttgagaaagaaaccggtagcatcagctccaacgttgctgaatcttcttcagtatccgacgagcaggcggcaatcgaaaatcaagatgaaatcctccaaaaacagccagcagctgttaaggaaaccaccgatcaagagacatcagaccagcaagttatttccgaggaggcgcatagcgataacgataaggagaatgaaatcgacctggttgaaaacatcattagcgatctggatgctccgattaccaaagcaggcggcgatctgctggtagaattggatgcgagatccgcggaacaggagggcgagagcaacaacaaggtggatctcgccaaggatctgaaggagaagaatgccgccgcggcagacgttacaacacaggaacaactgcccgttacatgcgaataatcctactcataattattatatataatattacatattattaaaaacaaaacaacaaacgatacaagcaacaacaaaagaacgcaacgtaaaacaacaaacaattacaagataaacgagataaaaacaaaacaaaacaaaaaacaagcaaaaatacatttttaaacatttacatattttaaataatttttgtacgaacttcatatccctaatccaagatatacgcaagcaaaagtccgagttacacgcgacaccaccatccacgccaccaatgcaaccactgcaaccaatcaccacgccccactcaaacaccacccacgcgcaggaatcaatagttttttttattgatgcctctcaattccagatcgggttaagtccccaaaaacacatccatcacccatcaagcacaca

SEQ ID NO: 31122 - protein, 753 aa, DROSOPHILA
MGKAQSKRSIDITTDPKKVGEGDEVAGKVEKIDVDQKTDAPAVNGDAATPKEGGDEAAAVEKKETEEHSENDKDLTTEKSAAVAEGGDAVAETAKGEEGSPKEAAAGEDITPLADESIKSKSKKDKVKKKWSFRSISFGKKDKQKPAKSEEATSPTSGTTSPTTAEAEAAPAGDAAVAEPSVATNGEAEKPAETATATSEPASKDEKPAENGSATEQEKQANGETEKAAPAPSTVEEAAKPKPAEEPATVTATESNTTATEEVPVKESQPEPEVVTNGHGAGEALTNGSSNGLAESPVTETAPVADNIPSNVDDEPPHQNGTNGTTTPPPTPVATEIEKGQQIEASSEVIETVTPSQAEEEVVAAIIKAVSSEPEAETETETEAEGFVLVAPVSTEVEVPVSISPIEPVAEVSQVKIEPLVEIPEVEAKSVADVSEADTESVPKVSELKTEVSEIEFESVIVETRSSSPPPPLPKSPPPSRVSAFVLSEDVIEEQVTPNVPEVNDVKPDEIEQQAISIVAEITEQAAEIVTEQEKQQEEAKVDSVPETIEESSSTVVVEEVLPVQNDEVTAPSPTPDDVQKPIEDQDTPDEKESYPVPDPIDPAAVNDEVAVTEAVDCEVEKETGSISSNVAESSSVSDEQAAIENQDEILQKQPAAVKETTDQETSDQQVISEEAHSDNDKENEIDLVENIISDLDAPITKAGGDLLVELDARSAEQEGESNNKVDLAKDLKEKNAAAADVTTQEQLPVTCE

SEQ ID NO: 31123 - DNA, 2883 bp, DROSOPHILA
atgtatgaccggtgcgttatcttagttatttcgctgttctgagagcgcactgtgtatagcatcatcgttaggtagttttttccatcatcccaagacaaactccaactccaatcgggcttttaaacatgaaaccatctcaacaaaatttcttattagttgtatgtatgtatatatagcatacagtagtacatataatgtaagtatgtgaatttccaattttaatctacttaggattattgacaataagatttataacggaagcgcgataaccgtttgattttcacaaaaatattaatgttaatcaataacattattgtccacttctccccctcacatataaatacatgcatgtatttgaaattgaaaacgcgataagaggccatcagggttttaacatcctcagctattcacgttaaagaagtaccactgtaaaattgttacctgtgtgccccctagtgtggcacatacatacaaacatttgtatatatttatgtacatatgtgatttgcagtttcttgctgaaaaccatgcaacaagtgaatgttaaaggagtggaacattccaatttcgttatttcgataggtgttttttaaattattgcgcctaatctccatttcgaaatttaaaacacccccttaattgggaaataacgttgtaacacaccaggaataaaaacatacgttcagctctaacaattaaggcataatcgatgatcaatacatacttaaaagcattccccaaagcgcactttcaaaatgaatatatcatgttgttcctaaaagtattccggtatgaaacacccagactgggctgcacatatgtatttaaaagcattttgggttttagtccacatcctttaagctgtttcacaaagttccattattggagatgccgctgaatttgaattaaagctagccacaggtaaatagtatcaagtttgagtttggaaatcattgaagcagattactggaaattattgaagtaaataaaccacacataatttgtttagtctataaaatagttccgatttccagttttatttgttgggtttattggttgtacattgatggaaatgtaggaccccgcaagacttgaaaacaaactaccaactagcgaatcaagaacttaggcaaccagggcggaggcagtgctcgactcgtatttccagttggggggcaggacgctcttggtcttgtagtagcgggccaggcggtggatcctggactcgaccagaatcagacggaacttgccgtccttgtccttgcggttgcgctccaagtgcttgcggatggcgacggccttcttgatcatgtggtacagatcctcgggaatgtcgggcttcagacccaccgacttcatgatgcgcaggatcttgtttccgttgacgaaacgcacctgggcaactccgtgcgagtcacgcaggatgatgcctgtaaaaaccggattccggattaacataacctcaaacaacaacatactcggcagtgctcaccgattttggagggagtcagacccttcttgcccagcttcttaatctgctccttgacatcatctgcgttcagtttcagccaggatgggacagtgcgtctgtaggggagggctgattgggaaatacccttgctgtgaacgaaatacacaaatgttagtacgcgtttatggcggcgcctgtcaaatgcgaatacgtctgcaccatgtgcttgcctttgcggtcgataattaacacactaaaaccaccgtagaaacgcattaaacacattcattcgttcaacccgcacggcagacacattttgcatgcattcagcttggcacacaggcatcgaaaacaatgaaaaatttcatttttacccaggagcgtgcatacgacccatcttgatagtctagtttttgacaccgaaaagaaggtggagacttttggcacgttgacagctctacgatgtggagacctgtcaaagcagctatcgataacgggatgcttagcgatattttttttaatgcgcttacaatatgttgtgatattcaaaactttactttaagtgactattacaggatttattaaagggaaatagaaagctaatttgtgtaaaaataattcatttagctatcgatatatgtatactattgtcagctagactctacacaagcacaggagtgctttgggaaggtttcatttcttgcagcacgctaaacggtcacattattgtttcccgaccaagaatttaccaataaaatgcatttaaataaatatagtgaagtagtggagcggcttgagaacgaggaatttgaggtgagtgatcgtttaatatattcactacagatggaattctagaaaaccatacttttacagcaagtcgaactgggagctgaagtctaccagcaattacttgctatttacctctatcaaaacaaactgtaagtgattgatataaaagaaatacatattttaatcttgtgctacagggctgatgccaagttgttgtggatgagagttccagctaacctaagggatgacaaggaactgatccagctgaacctgctcaatattgccctgcagaacaataactatgccgatttcttcaaacacatcaagtatgagtggtcggaaagagtaaagtcacctgtggaggatcttctaagtatggctatgcctaaaagcttactaattggatataaaaacttataatgtatctacttagataagcaacgcgaagagctgttcaaactaatgggcagcgcatatatgtccatttaccagcacaatctactggaattgtcactaatgtcggaggacgaactgaaacacgcctgtgcggccttaaattggactgaggaactggacggtgaccgggtaatcctgaagcccaaggttcaggaagcaccgccagc

SEQ ID NO: 31124 - DNA, 596 bp, DROSOPHILA
aactagactatcaagatgggtcgtatgcacgctcctggcaagggtatttcccaatcagccctcccctacagacgcactgtcccatcctggctgaaactgaacgcagatgatgtcaaggagcagattaagaagctgggcaagaagggtctgactccctccaaaatcggcatcatcctgcgtgactcgcacggagttgcccaggtgcgtttcgtcaacggaaacaagatcctgcgcatcatgaagtcggtgggtctgaagcccgacattcccgaggatctgtaccacatgatcaagaaggccgtcgccatccgcaagcacttggagcgcaaccgcaaggacaaggacggcaagttccgtctgattctggtcgagtccaggatccaccgcctggcccgctactacaagaccaagagcgtcctgccccccaactggaaatacgagtcgagcactgcctccgccctggttgcctaagttcttgattcgctagttggtagtttgttttcaagtcttgcggggtcctacatttccatcaatgtacaaccaataaacccaacaaataaaactggaaatcggaactattttatagactaaacaaa

SEQ ID NO: 31125 - protein, 151 aa, DROSOPHILA
MGRMHAPGKGISQSALPYRRTVPSWLKLNADDVKEQIKKLGKKGLTPSKIGIILRDSHGVAQVRFVNGNKILRIMKSVGLKPDIPEDLYHMIKKAVAIRKHLERNRKDKDGKFRLILVESRIHRLARYYKTKSVLPPNWKYESSTASALVA

SEQ ID NO: 31126 - DNA, 3212 bp, DROSOPHILA
ttttaaggtggccaagatcttccgagagaacacggacaagatcaacgccatcgattttgcgcccaacggcgaacatctaatatcctgcagcgaggatgaccagatcgtgatctacgactgcgaaaaggggacgcagtcgcgcacggtgaactcgaagaagtatggagtggatttaatccactttacgcacgccaacaacacggccatccatagctccaccaaggtggacgacaccatacgctatctcagcctgcacgacaacaaatatctgcgctacttccccggccacaccaagaaggttatctcgctgtgcatttcgccggtggaggacacctttctctccggctcgctggacaagacgctgcgcctgtgggacttgcgctcgcccaactgccagggactgatgcatctctctggacgacccattgctgcctacgatcccgagggcttgatcttcgccgctggcgttaactcggaaagcattaaattgtacgaccttcgctctttcgacaaaggccccttcgtcacatttaaacttaatcaggagaaggaatgcgactggactggccttaagttctcccgtgacggcaaaacaattctgatcagcacgaatggatcggtcatccggctcgtagatgccttccacggcactccgctacaaacgttcacgggctatccaaacaacaagggcattcccatcgaggcaagcttcagcccagactcgcagttcatcttttcaggcagcaccgatggacgagtgcacatctggaatgccgacactggcaataaggtgtccgtactgaatggtgaccatccgggaccggtgcaatgcgttcagttcaatccaaaatacatgatgctggcgtccgcgtgcaccaacatggctttttggctgcccacatccgaggagggcttgtaggcaatgattcccgcttgcttagcttataagattacaatttaatttataaataataaatcaacataacataaacagaggcctctaactggattcctggggctggtccttgtggcggtcgtatcctctacgtatgctgttcaggagttgtccaagattatgacccattttggcactaatgccgagcacgggattttgcaggcgacgttgcagttcctcaaagttgttttggccctcttccacgtccagcttattggccaccaccaattgcgggcgactcgccagacgtccgccaaactggcggagttcgtgcattagctgctcatagtgcgtccatggctccggtgcactggcatctaacacgaacagcaacaaggtgcaacgctcggcgtgctttaggaactgtatgcccaagcccttattgcgatgagcatcgggcacgagtccgggaagatcggcaatggtgagctggacatgatcatcgtactggacggttcccaagtgcggacgcagcgtggtgaaggcgtagggagcaacctttggcttggcccgtgtcagtgcattcagtagggtgcttttgccagcattggggtaaccaatcaaacccacatccgccatgctgcgcagttccagagtgtatgatagatcttcacccctaggaccgtattcgctgaccttgggacttgtttccttgtccgtggtaaagaaacggttgcccttgccaccggctcctcctcgagcggccacaaacataagatccgcttgtcccagatccccgacaatttgaccttgcgcattcctgatcaccgtcccgattggaaccttgatcacagaatgcttggcgttcttgccatgacaatccttggagctgcccggctctccttcttcagctttcagaacactccccacgtggttaaagttgcgcacatcgttagaggcctggaacaccacatgcccgccgtggccaccgtctccgccatctggaccggccctttcattgcaccatagctgcaggaaggacacgcaaccgtcgccaccctttccgccgatggcacgtatcctcttggcatcggagaagtactgcgcctggaaatgtggacacaaaagtgtggcattagttatgtaaattccattgcaatcttatgattctacctctttccgggtggacttcgccttcttcggacgcagcgctgatgccacctgacagtagttggctatgagaccaattggttttgcatttctggatatattcaatgaaaatcgcgcaagaaacgatttgccggtagagaataacattgctgaagtcttgtgaccatgggcatagtcagaaaaatatgtaatagggattgatatatcttaatcaagtgaaattaaattaaatgatctaaaggttcgagaaatgtattatataaatatattaagatgtatttttagggcggctagaattttttacttttaaaaaagtattcgaatccccgtctacacctgtggaaaatcacctgctgatacataaacatatcgcgacgactatcgaaagctatcgaaccagctggaaattatgtttttgttatccagaggaacgagaagctttcaacagttgagaaagatgtctattaaaggagcactcattgatctcagtggcaccttgcatgtggaggatgaacctactccgaatgctgtcgaggcgttaaaaaggtgcttagtttaaaccaaggtattcgtaattattttcaaagttgccgtgtagattgcgtgactctggcgtactggtgaaattcgttacaaacaccacgaaggattcaaaggccactcttcacgaacggctatgcaggattggcttccaacttgacgcctctgagatctacagctccttgagtgccgcagtctcgtatgtggaaaatgagagactaaatccgtactatattctgtctgaggatgcacgacaggactttccgccggaggacactaggcgctataaggattcagttgtaatcggtctggcacccaaggcctttaactatgaacagctgaatgaggcttttaagtgagcatccgagcaaggatattcttatctcaattaacgattatctctgcaatagcgttctattggaaaacaagaatcacaaactgatcgccgtgcatcagggtaagtactacaaacgagcagaaggcctagccttgggcccagggtgctttgtcaagggtttggagttcgctacaggacgaactgccaaagtgattggcaagcccaatccttatttcttcgaaggagctctggctggtcgggatccagcct

SEQ ID NO: 31127 - DNA, 1146 bp, DROSOPHILA
atgttattctctaccggcaaatcgtttcttgcgcgattttcattgaatatatccagaaatgcaaaaccaattggtctcatagccaactactgtcaggtggcatcagcgctgcgtccgaagaaggcgaagtccacccggaaagaggcgcagtacttctccgatgccaagaggatacgtgccatcggcggaaagggtggcgacggttgcgtgtccttcctgcagctatggtgcaatgaaagggccggtccagatggcggagacggtggccacggcgggcatgtggtgttccaggcctctaacgatgtgcgcaactttaaccacgtggggagtgttctgaaagctgaagaaggagagccgggcagctccaaggattgtcatggcaagaacgccaagcattctgtgatcaaggttccaatcgggacggtgatcaggaatgcgcaaggtcaaattgtcggggatctgggacaagcggatcttatgtttgtggccgctcgaggaggagccggtggcaagggcaaccgtttctttaccacggacaaggaaacaagtcccaaggtcagcgaatacggtcctaggggtgaagatctatcatacactctggaactgcgcagcatggcggatgtgggtttgattggttaccccaatgctggcaaaagcaccctactgaatgcactgacacgggccaagccaaaggttgctccctacgccttcaccacgctgcgtccgcacttgggaaccgtccagtacgatgatcatgtccagctcaccattgccgatcttcccggactcgtgcccgatgctcatcgcaataagggcttgggcatacagttcctaaagcacgccgagcgttgcaccttgttgctgttcgtgttagatgccagtgcaccggagccatggacgcactatgagcagctaatgcacgaactccgccagtttggcggacgtctggcgagtcgcccgcaattggtggtggccaataagctggacgtggaagagggccaaaacaactttgaggaactgcaacgtcgcctgcaaaatcccgtgctcggcattagtgccaaaatgggtcataatcttggacaactcctgaacagcatacgtagaggatacgaccgccacaaggaccagccccaggaatccagttag

SEQ ID NO: 31128 - protein, 381 aa, DROSOPHILA
MLFSTGKSFLARFSLNISRNAKPIGLIANYCQVASALRPKKAKSTRKEAQYFSDAKRIRAIGGKGGDGCVSFLQLWCNERAGPDGGDGGHGGHVVFQASNDVRNFNHVGSVLKAEEGEPGSSKDCHGKNAKHSVIKVPIGTVIRNAQGQIVGDLGQADLMFVAARGGAGGKGNRFFTTDKETSPKVSEYGPRGEDLSYTLELRSMADVGLIGYPNAGKSTLLNALTRAKPKVAPYAFTTLRPHLGTVQYDDHVQLTIADLPGLVPDAHRNKGLGIQFLKHAERCTLLLFVLDASAPEPWTHYEQLMHELRQFGGRLASRPQLVVANKLDVEEGQNNFEELQRRLQNPVLGISAKMGHNLGQLLNSIRRGYDRHKDQPQESS

SEQ ID NO: 31129 - DNA, 5467 bp, DROSOPHILA
aaggattcaaaggccactcttcacgaacggctatgcaggattggcttccaacttgacgcctctgagatctacagctccttgagtgccgcagtctcgtatgtggaaaatgagagactaaatccgtactatattctgtctgaggatgcacgacaggactttccgccggaggacactaggcgctataaggattcagttgtaatcggtctggcacccaaggcctttaactatgaacagctgaatgaggcttttaagtgagcatccgagcaaggatattcttatctcaattaacgattatctctgcaatagcgttctattggaaaacaagaatcacaaactgatcgccgtgcatcagggtaagtactacaaacgagcagaaggcctagccttgggcccagggtgctttgtcaagggtttggagttcgctacaggacgaactgccaaagtgattggcaagcccaatccttatttcttcgaaggagctctggctggtcgggatccagcctcatgcgttatgattggagatgtatgtaaagtaaggaatacattttgaaaacttaacgaattcttgattcgcaggatgccaatgatgacatagtgggcgccatgagcatgggcatgcagggaattctggtcaagaccggcaaatatctgccggatgtcaaaccatccccacctccaacagcgttgttggaaaactttgcagaggctgtcgattggattatacagaaaaaccaatcttaggctttattgggcttctgcaaatgtttatcgtgtttaaaacatagatactgacgaattttttatttaaaatagttacttaaaaagactttactgatataggtaaggcttagatataattaaatgctcaaaataagttcagttctgattataaacttttcatgtggaacataataaaggacccgtttttaaagtgtgaactagcccgaatcatttttcaacgatgtacgaatacagccaaacacaattatgtaattaatttagtgtataaatgcttttattttataaatagccgtaaaaattcatctgaaatgctgtttaaaacagatcaacggattaagattaagcatagttgtgtatcaaaattgtgagtaattgaaggtcttgccgctttcgaatcctttatgctcttaagacagtttcgactgagcgaatttgctggccaattggacaatttcgtccaccttttcgtaatttgtgcccgatgcctgggcggattccggtttgccacctcccttgcctcccagcgtggcggaaacatgctgcacccactcgttggccttcagacccttttccacggcacttttcggcaccgagctgagacagaagatcttcttggagtccgcatccactgacagaaacatggcggcagcgtcgggcagctggctgcgcacttgcttcagtgcggcatccagcgccttggtgttgttaaaggcttccaactgctcgaccagcacggtggcattgggattggcttcgcacagagtcttggcgcgctccacaacagtgaccgagacagcggcacgcagggcacgttccttatcgtccaatgttttcttcaagcccttcagcagattgcgcatctcgtcctttttcacgtagggaatcgtagcatgcgagatctgttcagtcagctcaacaatctccttcacatgcgacttggagtccttaccggacttatcgttatcaatggtggccttaagccggacgatttcttgttcaaatgcttcagatttcttcagtgccttcagagcttcgggtcctgtaagagccacaattcttcggatacccttggcaatggcctcttcgctgctgataacaaagtccattatgtgacccgagcgcctcaaatgggtgccgccgcaaaactcgacggaggtttgttcgccggcttcagaatcgggattctgctccagttcatctacgggcactccgaaggagattaccctaacgggatccgggtacacttcgtcgaagaccgatcgcaggcctcggatcttcttggccagggccaatttcgactcctttgcgtagatcggcacattcttgtacaccatctccttagtcagctgctccgtcttggacacctgctcgatggtcattgccgccttgctgttgaagtcaaagcgtagcttctctggcactaccagagagcctttctgttcggtgtccttacccaatacttgcagcaagcaatggttgagggcatgggtggccgagtggtttttcatggtcaaccagcgacgctccacgtcgatgtgcagttccaactcatcacccaccttaagggtgccctctacaacgccaatgtgaagaatgtagcctccgcggttgtagacacggtccacaaggaactcgttcgcctcgtcattgactttaaccagtgcaccttggtcgtagatttgaccaccgctctctgcatagaaatttgttttgtccagaacgatgcccgccttctgtccgctggtgatctcgttcacaaactggttttcgaagcgcagggcaacaattttactattgcacacaccgtagttgtaggcggagtcacgttcgtcagacacagcctcgtacttgtacttgaaggtgtcgttggttggtggcacaccttgctcctgcagctgcgaaatggcgtgcacatccagattgatctcctcgattttgctagcacctttgccctgcgaaagcacatatgaattatgcttggctgcctcatagccatccatatcgattttcaaggatttctcctctgccataagctgggttagatcgactgggaagccgtaggtgtcgtacagccgccaagcaacatctccgggaatggtagtctggttacccaacttttcgattgtgcggttcagcaagttgcgcccgcgcgttaacgtcttaaggaactgcaactcttcctcgttgataatatcaatgatgtgttggggatcttttttcacctccgggaaggcatcaccaagcagatcaaccactgtgttcaccagggtggcgaagaaaccgggcttggcattcaacttctcagtggcataactgtgggaagataatgtcaagattattattgcttagagagtgtaattttttaattgatcaagaataatgactaatgactaatgtaatataatgtatataagacgtagtattaagttatcttaccgcacagcgcgacgaaggatgcgtcgcagcacatagcctcggccagtgttgtccggagtgccgccatcagccaaagcaatggtgatggtgcgggcgtgatcggcaagcacgcggtaggccatgtcaatgccgtccacatcgtcggcacccacacgaccctggtaaggtggggcaccagtgcccgcctggatggcatcgaaaagtggcacaaacagatcggtatcgtagttagatcgcttattctggatgacggacaccagccgctcgaaacccatgccgcaatcaatgtgcttcttgggaagttgcttcaagctgccatcagattcacggttgtactggatgaacacgagattccagatctccaggacatcgggatcgtccatgttgaccagctccggaacgctgcgcccgccgatccggtcgaagtgcagctcagagcatggtccgcagggcccagtctcgcccatctcccagaagttgtccttcatgctgcccggcaggatgtgttccggtttcaggcccaagtccagccacatttgcttgcactccagatcgggctccagaccgctggccgcgtcaccaccaaagtaagtcacatacagacgatccttgggtagggcgagtcgctgcgtgagaaactcccaggcccaggagcagatctccttcttaaagtagtcaccgaaggaccagtttcccagcatttcaaagaaggtgtgatgatagacatccttgcccacgtcgtccagatcgttgtgcttgccaccggcgcgaatgcacttctgcgtgttggccacgcgcacccacttggacatttcgctgttgggatcagcggtgcccagaaaaatgggcttgaactgattcatgccggcgttggcgaacaacagcgtgggatcgtccaatggaatcgtgctggacgagtgaacatagatgtgcttctgctccttgaagaagtccagataggcgttgcgcacctcctttgctgtgagtaacttcatattgctggttctgcaaaggacaaatcgtgagtgtaaacgttgccacgcgacaattggggctccctaaccccttaaaacggccacaaatcggagcagtgaaagtgcactttgcacagtacgtgacaaagttatacaatttggaagcgaattgaatcaaaaaacgtttacttgtttatttttcgtatatgtaaatagaccacactggtacctaaccaaaacaagttatgtattactcacgtttcaaacagtaaatgcaaatgcaaacaatttcgtcagccgactgcagcaacgtgtgagattggctcgatagacaatgcggcaaactggatgagatatcgatagatttagagatggcataatgaagaaaataatttttttatatttaaaattaagtccacttgcttaatttacattaattgcactctagaaccctccagatatatgtaaaaaatcacaaattttaaaaaatgcatttagaataagctcttaaatgcgcctctatttgagctagttaacaatgtgtaacaattaaaagtccattcgctgtggcaagtgttcctcctccacctggtgctcgatctccctcatgcgtaacataagtttaaagttctgcttgtcctcctggccagtaaggaacatggttagcagggcctgcaggccgattaaggttcctaaggctgggacaatggggcgtgtaaatttccgccacaacagaaacacttctctgggattttccgtaatcgagggaatacggtacgtgtagcagcgggttgcgaacagaaatgcggcgaatggggccagaattgtgggatatacgatgcccagacttgtctgaaaggcagcactgcgcatctggatgcacaccgggcactcgcccagcggatttagtaggatgggccgctgaataaagaacttgtgcgccagcatggtaaatatggcgggaacggcgacaatcgggaggtaagtggacaatcgaccatgtcctccaagtcgcagcttggtgcgataatgattatttatgtaggcgcccgttcccgcagccaaagcactcagaattccgggcgtgtagcgcaacgaccatctacaaggcaatattttgatcgcttgttaggtaagcggcaactttagaaggcttcatgcactcacacttcgcctattttgtcccaggaagttataatcttccattggtatttgagggcctgatcctctgttatgaccaccgcgtccctgggcagttcgtcgggcttggcgcgtgataatgccatttttcattaatttatcaaaatatttggttc

SEQ ID NO: 31130 - DNA, 3117 bp, DROSOPHILA
cacacgttgctgcagtcggctgacgaaattgtttgcatttgcatttactgtttgaaacaaccagcaatatgaagttactcacagcaaaggaggtgcgcaacgcctatctggacttcttcaaggagcagaagcacatctatgttcactcgtccagcacgattccattggacgatcccacgctgttgttcgccaacgccggcatgaatcagttcaagcccatttttctgggcaccgctgatcccaacagcgaaatgtccaagtgggtgcgcgtggccaacacgcagaagtgcattcgcgccggtggcaagcacaacgatctggacgacgtgggcaaggatgtctatcatcacaccttctttgaaatgctgggaaactggtccttcggtgactactttaagaaggagatctgctcctgggcctgggagtttctcacgcagcgactcgccctacccaaggatcgtctgtatgtgacttactttggtggtgacgcggccagcggtctggagcccgatctggagtgcaagcaaatgtggctggacttgggcctgaaaccggaacacatcctgccgggcagcatgaaggacaacttctgggagatgggcgagactgggccctgcggaccatgctctgagctgcacttcgaccggatcggcgggcgcagcgttccggagctggtcaacatggacgatcccgatgtcctggagatctggaatctcgtgttcatccagtacaaccgtgaatctgatggcagcttgaagcaacttcccaagaagcacattgattgcggcatgggtttcgagcggctggtgtccgtcatccagaataagcgatctaactacgataccgatctgtttgtgccacttttcgatgccatccaggcgggcactggtgccccaccttaccagggtcgtgtgggtgccgacgatgtggacggcattgacatggcctaccgcgtgcttgccgatcacgcccgcaccatcaccattgctttggctgatggcggcactccggacaacactggccgaggctatgtgctgcgacgcatccttcgtcgcgctgtgcgttatgccactgagaagttgaatgccaagcccggtttcttcgccaccctggtgaacacagtggttgatctgcttggtgatgccttcccggaggtgaaaaaagatccccaacacatcattgatattatcaacgaggaagagttgcagttccttaagacgttaacgcgcgggcgcaacttgctgaaccgcacaatcgaaaagttgggtaaccagactaccattcccggagatgttgcttggcggctgtacgacacctacggcttcccagtcgatctaacccagcttatggcagaggagaaatccttgaaaatcgatatggatggctatgaggcagccaagcataattcatatgtgctttcgcagggcaaaggtgctagcaaaatcgaggagatcaatctggatgtgcacgccatttcgcagctgcaggagcaaggtgtgccaccaaccaacgacaccttcaagtacaagtacgaggctgtgtctgacgaacgtgactccgcctacaactacggtgtgtgcaatagtaaaattgttgccctgcgcttcgaaaaccagtttgtgaacgagatcaccagcggacagaaggcgggcatcgttctggacaaaacaaatttctatgcagagagcggtggtcaaatctacgaccaaggtgcactggttaaagtcaatgacgaggcgaacgagttccttgtggaccgtgtctacaaccgcggaggctacattcttcacattggcgttgtagagggcacccttaaggtgggtgatgagttggaactgcacatcgacgtggagcgtcgctggttgaccatgaaaaaccactcggccacccatgccctcaaccattgcttgctgcaagtattgggtaaggacaccgaacagaaaggctctctggtagtgccagagaagctacgctttgacttcaacagcaaggcggcaatgaccatcgagcaggtgtccaagacggagcagctgactaaggagatggtgtacaagaatgtgccgatctacgcaaaggagtcgaaattggccctggccaagaagatccgaggcctgcgatcggtcttcgacgaagtgtacccggatcccgttagggtaatctccttcggagtgcccgtagatgaactggagcagaatcccgattctgaagccggcgaacaaacctccgtcgagttttgcggcggcacccatttgaggcgctcgggtcacataatggactttgttatcagcagcgaagaggccattgccaagggtatccgaagaattgtggctcttacaggacccgaagctctgaaggcactgaagaaatctgaagcatttgaacaagaaatcgtccggcttaaggccaccattgataacgataagtccggtaaggactccaagtcgcatgtgaaggagattgttgagctgactgaacagatctcgcatgctacgattccctacgtgaaaaaggacgagatgcgcaatctgctgaagggcttgaagaaaacattggacgataaggaacgtgccctgcgtgccgctgtctcggtcactgttgtggagcgcgccaagactctgtgcgaagccaatcccaatgccaccgtgctggtcgagcagttggaagcctttaacaacaccaaggcgctggatgccgcactgaagcaagtgcgcagccagctgcccgacgctgccgccatgtttctgtcagtggatgcggactccaagaagatcttctgtctcagctcggtgccgaaaagtgccgtggaaaagggtctgaaggccaacgagtgggtgcagcatgtttccgccacgctgggaggcaagggaggtggcaaaccggaatccgcccaggcatcgggcacaaattacgaaaaggtggacgaaattgtccaattggccagcaaattcgctcagtcgaaactgtcttaagagcataaaggattcgaaagcggcaagaccttcaattactcacaattttgatacacaactatgcttaatcttaatccgttgatctgttttaaacagcatttcagatgaatttttacggctatttataaaataaaagcatttatacact

SEQ ID NO: 31131 - protein, 966 aa, DROSOPHILA
MKLLTAKEVRNAYLDFFKEQKHIYVHSSSTIPLDDPTLLFANAGMNQFKPIFLGTADPNSEMSKWVRVANTQKCIRAGGKHNDLDDVGKDVYHHTFFEMLGNWSFGDYFKKEICSWAWEFLTQRLALPKDRLYVTYFGGDAASGLEPDLECKQMWLDLGLKPEHILPGSMKDNFWEMGETGPCGPCSELHFDRIGGRSVPELVNMDDPDVLEIWNLVFIQYNRESDGSLKQLPKKHIDCGMGFERLVSVIQNKRSNYDTDLFVPLFDAIQAGTGAPPYQGRVGADDVDGIDMAYRVLADHARTITIALADGGTPDNTGRGYVLRRILRRAVRYATEKLNAKPGFFATLVNTVVDLLGDAFPEVKKDPQHIIDIINEEELQFLKTLTRGRNLLNRTIEKLGNQTTIPGDVAWRLYDTYGFPVDLTQLMAEEKSLKIDMDGYEAAKHNSYVLSQGKGASKIEEINLDVHAISQLQEQGVPPTNDTFKYKYEAVSDERDSAYNYGVCNSKIVALRFENQFVNEITSGQKAGIVLDKTNFYAESGGQIYDQGALVKVNDEANEFLVDRVYNRGGYILHIGVVEGTLKVGDELELHIDVERRWLTMKNHSATHALNHCLLQVLGKDTEQKGSLVVPEKLRFDFNSKAAMTIEQVSKTEQLTKEMVYKNVPIYAKESKLALAKKIRGLRSVFDEVYPDPVRVISFGVPVDELEQNPDSEAGEQTSVEFCGGTHLRRSGHIMDFVISSEEAIAKGIRRIVALTGPEALKALKKSEAFEQEIVRLKATIDNDKSGKDSKSHVKEIVELTEQISHATIPYVKKDEMRNLLKGLKKTLDDKERALRAAVSVTVVERAKTLCEANPNATVLVEQLEAFNNTKALDAALKQVRSQLPDAAAMFLSVDADSKKIFCLSSVPKSAVEKGLKANEWVQHVSATLGGKGGGKPESAQASGTNYEKVDEIVQLASKFAQSKLS

SEQ ID NO: 31132 - DNA, 2737 bp, DROSOPHILA
agtccagccacatttgcttgcactccagatcgggctccagaccgctggccgcgtcaccaccaaagtaagtcacatacagacgatccttgggtagggcgagtcgctgcgtgagaaactcccaggcccaggagcagatctccttcttaaagtagtcaccgaaggaccagtttcccagcatttcaaagaaggtgtgatgatagacatccttgcccacgtcgtccagatcgttgtgcttgccaccggcgcgaatgcacttctgcgtgttggccacgcgcacccacttggacatttcgctgttgggatcagcggtgcccagaaaaatgggcttgaactgattcatgccggcgttggcgaacaacagcgtgggatcgtccaatggaatcgtgctggacgagtgaacatagatgtgcttctgctccttgaagaagtccagataggcgttgcgcacctcctttgctgtgagtaacttcatattgctggttctgcaaaggacaaatcgtgagtgtaaacgttgccacgcgacaattggggctccctaaccccttaaaacggccacaaatcggagcagtgaaagtgcactttgcacagtacgtgacaaagttatacaatttggaagcgaattgaatcaaaaaacgtttacttgtttatttttcgtatatgtaaatagaccacactggtacctaaccaaaacaagttatgtattactcacgtttcaaacagtaaatgcaaatgcaaacaatttcgtcagccgactgcagcaacgtgtgagattggctcgatagacaatgcggcaaactggatgagatatcgatagatttagagatggcataatgaagaaaataatttttttatatttaaaattaagtccacttgcttaatttacattaattgcactctagaaccctccagatatatgtaaaaaatcacaaattttaaaaaatgcatttagaataagctcttaaatgcgcctctatttgagctagttaacaatgtgtaacaattaaaagtccattcgctgtggcaagtgttcctcctccacctggtgctcgatctccctcatgcgtaacataagtttaaagttctgcttgtcctcctggccagtaaggaacatggttagcagggcctgcaggccgattaaggttcctaaggctgggacaatggggcgtgtaaatttccgccacaacagaaacacttctctgggattttccgtaatcgagggaatacggtacgtgtagcagcgggttgcgaacagaaatgcggcgaatggggccagaattgtgggatatacgatgcccagacttgtctgaaaggcagcactgcgcatctggatgcacaccgggcactcgcccagcggatttagtaggatgggccgctgaataaagaacttgtgcgccagcatggtaaatatggcgggaacggcgacaatcgggaggtaagtggacaatcgaccatgtcctccaagtcgcagcttggtgcgataatgattatttatgtaggcgcccgttcccgcagccaaagcactcagaattccgggcgtgtagcgcaacgaccatctacaaggcaatattttgatcgcttgttaggtaagcggcaactttagaaggcttcatgcactcacacttcgcctattttgtcccaggaagttataatcttccattggtatttgagggcctgatcctctgttatgaccaccgcgtccctgggcagttcgtcgggcttggcgcgtgataatgccatttttcattaatttatcaaaatatttggttctcagaaaacagctgcttatgggtcagtgttgtataagtcccgaaccggtgtgagaatgttgaatacagtgggtatcggaaaaaggtctcggaaagtaacgcgaaatttacagatgatgacatatcagtgctgttaaatggtcaaatcagtgttgcgtgctgttttatatcagaggcgaattgaagtgtactaccataattcttgcgagtctgcttaaaatgcctcacaaacgtaggaaccgagtacatgcgaaccaaaggaatttcacagcgcgacgcgtttctgtggccaaactgtcgtctgcaccgccgaatgtgctcgtcgaatcctgcaacggttctcatgcggataacagttcgccggacagtccgaaagccaaagaaggtgcaatgaccaacgggaaaaacccggagatcaagttagccgtgcccaaatgcaacaccaccgtgcgcaagcagaacgaggcccatatcatatccaacattaagctggatatgaaccttaataaggattctaactttatcgccccacaggttaattaaggttttcaattatgtatactgttttataataacatattctgtaactaccccaaagatcaccaaaaagatgaacttcgctccgaatcgtgttgtattcggggtcctggtgcctctcaatgtcaacgattctgtgctggtgccgcacaatagaaaaccggatgccttaaagcacacatcgaaagaatcggaatcatgcaaggccataagcgagccccagctagccgactatgcggagaaagtagatcccatgatcatggctgttaaggaaccagtactccacttggattgggaaccaggacccttcgattttttcggcgcatataggagaacatacaattagagttacattttatttataaatatatccgagaatatcagaatgtttgtagctttgttaaccgatgaagttcatgaccaccagatgaagg

SEQ ID NO: 31133 - DNA, 672 bp, DROSOPHILA
atggcattatcacgcgccaagcccgacgaactgcccagggacgcggtggtcataacagaggatcaggccctcaaataccaatggaagattataacttcctgggacaaaataggcgaagtatggtcgttgcgctacacgcccggaattctgagtgctttggctgcgggaacgggcgcctacataaataatcattatcgcaccaagctgcgacttggaggacatggtcgattgtccacttacctcccgattgtcgccgttcccgccatatttaccatgctggcgcacaagttctttattcagcggcccatcctactaaatccgctgggcgagtgcccggtgtgcatccagatgcgcagtgctgcctttcagacaagtctgggcatcgtatatcccacaattctggccccattcgccgcatttctgttcgcaacccgctgctacacgtaccgtattccctcgattacggaaaatcccagagaagtgtttctgttgtggcggaaatttacacgccccattgtcccagccttaggaaccttaatcggcctgcaggccctgctaaccatgttccttactggccaggaggacaagcagaactttaaacttatgttacgcatgagggagatcgagcaccaggtggaggaggaacacttgccacagcgaatggacttttaa

SEQ ID NO: 31134 - protein, 223 aa, DROSOPHILA
MALSRAKPDELPRDAVVITEDQALKYQWKIITSWDKIGEVWSLRYTPGILSALAAGTGAYINNHYRTKLRLGGHGRLSTYLPIVAVPAIFTMLAHKFFIQRPILLNPLGECPVCIQMRSAAFQTSLGIVYPTILAPFAAFLFATRCYTYRIPSITENPREVFLLWRKFTRPIVPALGTLIGLQALLTMFLTGQEDKQNFKLMLRMREIEHQVEEEHLPQRMDF

SEQ ID NO: 31135 - DNA, 2339 bp, DROSOPHILA
gcagttcgtcgggcttggcgcgtgataatgccatttttcattaatttatcaaaatatttggttctcagaaaacagctgcttatgggtcagtgttgtataagtcccgaaccggtgtgagaatgttgaatacagtgggtatcggaaaaaggtctcggaaagtaacgcgaaatttacagatgatgacatatcagtgctgttaaatggtcaaatcagtgttgcgtgctgttttatatcagaggcgaattgaagtgtactaccataattcttgcgagtctgcttaaaatgcctcacaaacgtaggaaccgagtacatgcgaaccaaaggaatttcacagcgcgacgcgtttctgtggccaaactgtcgtctgcaccgccgaatgtgctcgtcgaatcctgcaacggttctcatgcggataacagttcgccggacagtccgaaagccaaagaaggtgcaatgaccaacgggaaaaacccggagatcaagttagccgtgcccaaatgcaacaccaccgtgcgcaagcagaacgaggcccatatcatatccaacattaagctggatatgaaccttaataaggattctaactttatcgccccacaggttaattaaggttttcaattatgtatactgttttataataacatattctgtaactaccccaaagatcaccaaaaagatgaacttcgctccgaatcgtgttgtattcggggtcctggtgcctctcaatgtcaacgattctgtgctggtgccgcacaatagaaaaccggatgccttaaagcacacatcgaaagaatcggaatcatgcaaggccataagcgagccccagctagccgactatgcggagaaagtagatcccatgatcatggctgttaaggaaccagtactccacttggattgggaaccaggacccttcgattttttcggcgcatataggagaacatacaattagagttacattttatttataaatatatccgagaatatcagaatgtttgtagctttgttaaccgatgaagttcatgaccaccagatgaaggatcacatgagcgaagatgaagtcggcgaaaccgcgttccggcgaaatgccggcaaacacgctcttgttctggggattggcctgcaggcgtaggcacactgccaggacgaaacagctgacggtgctgatgaaaccagataggaaggagttgaacgggaaggttccaaccaggcagcagtaaacaaactggatgatgccggtgagcagaatgtagccgaggtagatgtccaccagcttcagtttcttgggcgtattctgcacgtagtcgttgtagaacttggaaatgacgctcgacagctccaccattttgctattttatgtgatatttgtccggatatttaaggataaaggcgctttttaacaaattaatcgcagacacgtcacaaattgggagagaactcaaaagtaggaccgttcgtctagtttgaaaataatactgatagctttatcgatgaaggcgcaagtacagtgggcactcaataccttgaagtttaataaagaataggtttatatattaaaaaatttttgtgttttagttaaaactaaaacataacaaatcttatagattaatgaccgctatcgattcttttttaatgttgcatatgtttgagaggtaatgttataatttaatttatataaaaagaaacacaaattctttttctaacccgttaataaagttttctatccgattttcactgtaccgccaaatcagcgaattaatcgatagatacggaaagtcatcctcgattgttgtgtcttgctttgcttcttcagtgcttgttttggggtgagaggcaattgttattgcgagttgagttcgaagaaattagtaacgtatgtatttaaaacaccacaaaagggtatgatgtgcgttgcaacgttacaataaacatttgctatccaatgtgcaacagtgatgcagcgtgttatcaaacttcttttatatgaacacaacatgattcattgctgatgttttctctgttcgattcgcagactgggagaagataattgccatagcctcctcccaccacgcaccccaaactcagcaataaatgaactttataatttgattggctcttcgcattgataaaccagcgttgtgaccttcgcaggagcacccatttcattgtcagtgtcaagcgggaaaaaatcaatggaggacctgacacctttgaccaaccttcaacaggtagagcagagccagacacatctggtcatcaaattgcgcatgctgaatgggtttattttgatttcgtatccgtacatctgttaattatgtttttgtttcagttttagtttcaacatt

SEQ ID NO: 31136 - DNA, 339 bp, DROSOPHILA
atggtggagctgtcgagcgtcatttccaagttctacaacgactacgtgcagaatacgcccaagaaactgaagctggtggacatctacctcggctacattctgctcaccggcatcatccagtttgtttactgctgcctggttggaaccttcccgttcaactccttcctatctggtttcatcagcaccgtcagctgtttcgtcctggcagtgtgcctacgcctgcaggccaatccccagaacaagagcgtgtttgccggcatttcgccggaacgcggtttcgccgacttcatcttcgctcatgtgatccttcatctggtggtcatgaacttcatcggttaa

SEQ ID NO: 31137 - protein, 112 aa, DROSOPHILA
MVELSSVISKFYNDYVQNTPKKLKLVDIYLGYILLTGIIQFVYCCLVGTFPFNSFLSGFISTVSCFVLAVCLRLQANPQNKSVFAGISPERGFADFIFAHVILHLVVMNFIG

SEQ ID NO: 31138 - DNA, 5508 bp, DROSOPHILA
cctgtacgcatagatagtcaatatttaaaatgttccaattatcatcgtattttatttcacagtcctgctggccacctgcattcccaatctaggctccattatctcgctggtaggagccgtcagcagctcagctttggccctaattgcaccacccataattgaagttattacattttacaacgttggctatggacgcttcaattggatgctatggaaggacgttttaatcctgatctttggactctgtggctttgtgtttggcacctgggccagcttagctcaaatcctgaacgacagaacccactgagtttaatcgaaataagcgaatcgaaaacagaacctggctagttctgcctacaaatgtgtgcgaatttatgacgaaggctttatgtagttacactcagactacgaatatgtttaccattagttgtttaccatttcccaactggtatcggtccagtccagtggcggtgctttagtgtgattaatttatatttatggcaaattagttgcatttttttttgttgttatcagccagctgcaatcgtaccagacaataactagcattttaagtagaaagtttttcaacatttgttcagtttgtcagttggagattatttctgtgttaactcgatgaccgcacaatgccaaacgtgattttacgtagtattcttaactaaattattatttagcttttactatgtagtctaggtcggggcagatcattccaaagcaactgctaagaatttcccaaaaaccgaaattagctaatgttatctgcatacttttatcgttcgattatttgtaattatacaactataaatacatatatatgtatacccctagccgtactggtcccgaaatgggaccttcgataaagttttgtaaatacatcaattcggtgtatcaacaaatgttctttaatagttcaatcggtaacaaagacaataattaatataatgtttataaaaatcagtacaattgatgttatttagtattcctaccacagggcttgaatggtcactgggaatgggattccattggaattagccactctcaatggactcgatgagagcagaatcagtccttgagctcgtggaccgttcctaatctgcttggtcaggcgagcgggtgcctgctggacaggctgaacttcctctgcatccggatcgggtgtaaagtcttgcggctcctcatcgctgggtagctgctcaactgcatcggtaggcggtgggccgtaggtcagatccggtggtccatatgtctgatccggaactccttcctcgaatggcacctccggcttcagttcgtcggcggatggatagggtgctgcctgctgtttctgaagttgctttgccagccgtgctggctgagctgaaaccgctccaagtgccaggaccagaaccagcaaggaacaggatgacttcacgtagctgcgcatattggctttgacgcaagagatacacgaacttatgagggaaccgttgttgattgattgataactttgctgttcattacctgtctttttatatgtttttcgggtactacgtggatggattaatcaatttttggtggtaaaacgtggtcgtttggttaatgactgggtcatccagtggcccttgtggtcatttggagttgtcgtcaatgtcacgttgcaggtgcccaaaacgggaaatcaatcagcccattaatttcagtgtcaatgttagccagaataattttttttatgagttatggaaaattataataaatacacattgcataaatatgttttaatacattattaaaagttgttatatgcatatcactaattttcatgcaatgggctcttaaaattcccaagttctttttccgcatggagtgcttataaagcgcgacaagtgtgtggtccaaacgtgttgtttggaaggagagcaagttagcactcccctagacaaggatggaacacataaacggtcggctaggcacagacaaaagccgtccacaaatttttttaaatcttatgatagcttaatgccaaatatcccttaataaaatagaaaaaacacatcaaacatatacatttctatattcagaagctctacttgtcaaatggtaaaaatagtcagaggtataaaaacatatcaatttagtcttgaacttatcactacgcactagagattcaaataattgaatgtcagtcagtcatgaccactacatcgggtattgtaaaatcttgttcttacaaaaaatcctgatttaggagctaaggtgtgcttagccatttttacgagctaagtagtagctgaaggtgggatctatactcctgacagaactgggcagataagtaaaaaaggtacgacgaatcctggaactgttgacaaagcgcaggctgtgctgcgcctgccagcagagacgggattgcttcaggacgatctgaaggacttcatcgcgaaatgacttcttaaatttgttggatttttccataatttccttgtgcagtgcatatggaatgggattttgttttacgatcagcggatctatattagttagcagcggaatcaatttcttttccatctccgacaatttagccatattgtgtctgtagctttcgaaatccgcatggctttgtggaccatatcgcttaccatatctcctacaaatccattcccgtacttccggaatttgatggccattgtggaggctggccagcaccagtttgctgtcgcgacgcaagatttcaaagccatcgcttagcatttggtccatgaacttgtcatcatcgggatcgattcgctcgcgattgtagacgaggcgttcgatggaatccttgggtgtcggcgtagtcggcaccgccagcaaactcttctcaaagatttttctcacacatcgggacacggcttcgttgatgtgacttctccttatcggccccgatgcaaggactccttgtcgatgctcatttttttggccaccgagtgcttccattaaggacttcttaacgacatcatttgtgtccaaagactgcttgctgttccttttgaaaacgtgtggatagttgaaggcgaagggcttgtggtctccgggtgacgtgaaatattcaggtatggcaatagaatcctcctcctcctcctgctcctcctccgccaatacatctggttcgccatcctcaccagcgcagagtcgcatcagcgcaccactcctgtcgtacagacgtccccattcaccttcgaggagtagcacctggggaggagtgtccaagcttacgtgcaccaattcgttgcaagcaacacaaccggctttccggaaagcaggcacaccaggactccagcccttgtcaccaaactttagaaggtactcatccacgtcgcgattaatgtgatgcaaaatccgttcccttgtaagcttcaccagagaaatgaatgtcaacaattattcataaattaattatagataattttgttaataggattactcactcgctttgcggtcccttccaagtcaatcatatccaaatagcgtcgtcgctgctcttgcaggaacgcctgtcgctcctgggttcgagtttcctcatggaacccgcacagatccctcgctttctgtgcaggatccgtggtaacctcgtctatgtggtcgaaaaggtgacacagttcgtgtttgataactgccttaactgttcgctggatgggatgaaactggaagtcggcataccaacggtcctcatcttctttgggatcgcccacttcgttagggatctgaatctttaacagcggcgaatccgacaaaaactgattagaccgacggggagtggttttgggacgtggttgcttttgaaagtagtagcttttgcgcgaagacgatggtttctttttagttgtatgcgaggaaagaactttgtccagagctcgaaatgtagccggtagatccagtggcatttcttcatctatattttgtggataggtcttagaattcggtattatgatggaaggccgagcagagcgattctgaaagagggcaaaagaccaaaacttctttttaatataatagttttaactctaattagcagcttacattattaatctgtcgatttttcatctgtatcttggtttgcccacataaaacaccgggtagaggtagcactttgtctagagctcgaaaagttgcaggcaaatccagataggcgatggccgagagcagaagttgtccattaactgagtactttccgcacgaagtgccggtgtcgtagtgctcctggaatagaaagtagagaaaggccagtttctggccacgactgaaacgccaaattctatggagttcacgatttctgatcaaaggttgcactcccaggcgcagcagacaatcccgaatggacctaatatcgaattgcagtgccgttcccagctcatcggccgcctgcatctgatcgagcgatagaccacgataccaactagccacgggtagtcccaaatcaacacctgtattctttaccatgttcctagcaagtggataaattcacaagtaaaacgaagaacaaacaatttaagaaacttggtaaattttgtgggtgttgcaaatagcttgaatgagtgaatttggaaataatactcagtgcagacctgtctacactgtgttcatatacaataaaatcattaaacgagctgtttttttttattcaagctacaaaacaatattttctttatgtttaggcccactggtctgcttggcaaacgaaagattttttttcaaaacactcatcataggacatctctttagcatagatgtaaacgcattgattctttttttttgtatcctgattactcttccatttgacaaagaagggttctcgtccggttagggtggagacgaatgtgccgccattttcaaccagtttggatatatctatccagtagctattgttgggtgctaacgccaagatgccatccagctccatctcatcctggatgttcgccagatgaccgttcattttacgacatgtgacatatgcctcaaaccaagtttgcattagattcttctcgatgtgaaaatgtctggagccaactttctcgaatcgtctcatcttgatgttgttagacgctttgatgttggatgcatggtgtcgcattataatctttaacggctgaagctggatttccatctgggccttaaactccagcaagctacttgctatgcgcatttccattgtatcaataattgccaatgtttcgttttgtttaagcgcgttgtatgtaaaccaataattctggttaataccaatctgatcgattgtattttgcggcgtttgtggacttggcaatgtagcctttccgttcggaatgtcctgctgcccaccactgagatcccaaaggttccataatgccaacaggtataagaggttagatgcgtacatgtccagtttggaagatttcaagcgtgtgagatccaatctggctaaagaacttccaatgagctcaactaattttgtcacgctttttaatgataatgtaaccgttttaaagcatcactgtgaaaagc

SEQ ID NO: 31139 - DNA, 2543 bp, DROSOPHILA
gttcttcgttttacttgtgaatttatccacttgctaggaacatggtaaagaatacaggtgttgatttgggactacccgtggctagttggtatcgtggtctatcgctcgatcagatgcaggcggccgatgagctgggaacggcactgcaattcgatattaggtccattcgggattgtctgctgcgcctgggagtgcaacctttgatcagaaatcgtgaactccatagaatttggcgtttcagtcgtggccagaaactggcctttctctactttctattccaggagcactacgacaccggcacttcgtgcggaaagtactcagttaatggacaacttctgctctcggccatcgcctatctggatttgcctgcaacttttcgagctctagacaaagtgctacctctacccggtgttttatgtgggcaaaccaagatacagatgaaaaatcgacagattaataataatcgctctgctcggccttccatcataataccgaattctaagacctatccacaaaatatagatgaagaaatgccactggatctaccggctacatttcgagctctggacaaagttctttcctcgcatacaactaaaaagaaaccatcgtcttcgcgcaaaagctactactttcaaaagcaaccacgtcccaaaaccactccccgtcggtctaatcagtttttgtcggattcgccgctgttaaagattcagatccctaacgaagtgggcgatcccaaagaagatgaggaccgttggtatgccgacttccagtttcatcccatccagcgaacagttaaggcagttatcaaacacgaactgtgtcaccttttcgaccacatagacgaggttaccacggatcctgcacagaaagcgagggatctgtgcgggttccatgaggaaactcgaacccaggagcgacaggcgttcctgcaagagcagcgacgacgctatttggatatgattgacttggaagggaccgcaaagcgacttacaagggaacggattttgcatcacattaatcgcgacgtggatgagtaccttctaaagtttggtgacaagggctggagtcctggtgtgcctgctttccggaaagccggttgtgttgcttgcaacgaattggtgcacgtaagcttggacactcctccccaggtgctactcctcgaaggtgaatggggacgtctgtacgacaggagtggtgcgctgatgcgactctgcgctggtgaggatggcgaaccagatgtattggcggaggaggagcaggaggaggaggaggattctattgccatacctgaatatttcacgtcacccggagaccacaagcccttcgccttcaactatccacacgttttcaaaaggaacagcaagcagtctttggacacaaatgatgtcgttaagaagtccttaatggaagcactcggtggccaaaaaaatgagcatcgacaaggagtccttgcatcggggccgataaggagaagtcacatcaacgaagccgtgtcccgatgtgtgagaaaaatctttgagaagagtttgctggcggtgccgactacgccgacacccaaggattccatcgaacgcctcgtctacaatcgcgagcgaatcgatcccgatgatgacaagttcatggaccaaatgctaagcgatggctttgaaatcttgcgtcgcgacagcaaactggtgctggccagcctccacaatggccatcaaattccggaagtacgggaatggatttgtaggagatatggtaagcgatatggtccacaaagccatgcggatttcgaaagctacagacacaatatggctaaattgtcggagatggaaaagaaattgattccgctgctaactaatatagatccgctgatcgtaaaacaaaatcccattccatatgcactgcacaaggaaattatggaaaaatccaacaaatttaagaagtcatttcgcgatgaagtccttcagatcgtcctgaagcaatcccgtctctgctggcaggcgcagcacagcctgcgctttgtcaacagttccaggattcgtcgtaccttttttacttatctgcccagttctgtcaggagtatagatcccaccttcagctactacttagctcccaatatgcgcagctacgtgaagtcatcctgttccttgctggttctggtcctggcacttggagcggtttcagctcagccagcacggctggcaaagcaacttcagaaacagcaggcagcaccctatccatccgccgacgaactgaagccggaggtgccattcgaggaaggagttccggatcagacatatggaccaccggatctgacctacggcccaccgcctaccgatgcagttgagcagctacccagcgatgaggagccgcaagactttacacccgatccggatgcagaggaagttcagcctgtccagcaggcacccgctcgcctgaccaagcagattaggaacggtccacgagctcaaggactgattctgctctcatcgagtccattgagagtggctaattccaatggaatcccattcccagtgaccattcaagccctgtggtag

SEQ ID NO: 31140 - protein, 833 aa, DROSOPHILA
MVKNTGVDLGLPVASWYRGLSLDQMQAADELGTALQFDIRSIRDCLLRLGVQPLIRNRELHRIWRFSRGQKLAFLYFLFQEHYDTGTSCGKYSVNGQLLLSAIAYLDLPATFRALDKVLPLPGVLCGQTKIQMKNRQINNNRSARPSIIIPNSKTYPQNIDEEMPLDLPATFRALDKVLSSHTTKKKPSSSRKSYYFQKQPRPKTTPRRSNQFLSDSPLLKIQIPNEVGDPKEDEDRWYADFQFHPIQRTVKAVIKHELCHLFDHIDEVTTDPAQKARDLCGFHEETRTQERQAFLQEQRRRYLDMIDLEGTAKRLTRERILHHINRDVDEYLLKFGDKGWSPGVPAFRKAGCVACNELVHVSLDTPPQVLLLEGEWGRLYDRSGALMRLCAGEDGEPDVLAEEEQEEEEDSIAIPEYFTSPGDHKPFAFNYPHVFKRNSKQSLDTNDVVKKSLMEALGGQKNEHRQGVLASGPIRRSHINEAVSRCVRKIFEKSLLAVPTTPTPKDSIERLVYNRERIDPDDDKFMDQMLSDGFEILRRDSKLVLASLHNGHQIPEVREWICRRYGKRYGPQSHADFESYRHNMAKLSEMEKKLIPLLTNIDPLIVKQNPIPYALHKEIMEKSNKFKKSFRDEVLQIVLKQSRLCWQAQHSLRFVNSSRIRRTFFTYLPSSVRSIDPTFSYYLAPNMRSYVKSSCSLLVLVLALGAVSAQPARLAKQLQKQQAAPYPSADELKPEVPFEEGVPDQTYGPPDLTYGPPPTDAVEQLPSDEEPQDFTPDPDAEEVQPVQQAPARLTKQIRNGPRAQGLILLSSSPLRVANSNGIPFPVTIQALW

SEQ ID NO: 31141 - DNA, 2349 bp, DROSOPHILA
atagttctaaaaatcaatgctcgatattcaggcccattgctcggcttggcaagcaaaatagttatcattggcacaattttcaaagtacatttcattggaattgatatacacgcaatggttatgtatatttgtggccagatttggcttccatttcagaaatggtacatcccttccggatagtgtagaaatccaggacgctccatcgttggcacggctgttgatatctacccagtacttttttttggtttcctctgagaatatttcattcagctccttctcatcgaggatattcgccaggtgaccgcccatttgacgacacgtgtcgtatgcgctatcccagggcatcttcttttgcttttctaagtaaaagtgccgggagccaatcttcttgaatacggacattttgattttgttggacattttaacgttttccatgtagggttcaatttgttgctttagagcccgaagtttagtttccatctggttttgaaaggactgcaatcgcatttctaagcgttgctccatattaccaattctccacaaagttccattttgtcttagcgaattgtaggtaaaccagtgctgctggtgcatatcaatattctcgattgtataatacggcattggtgcttttggcaattcatttgttcctgtggaagtatcctgctttttggcactgacgccccaaaagttccataaagcgaaaatggagaaaatgcaagttgcgtacttgtacatttcgagggctaatagtctgtgagatcaattatttaattcctcctcggactaacccttttttttacacttcccaacgagataatcacccggaacattaaccttttcaagcattaaatactctgttaaaaattcgataaagatccgagaaatctagagatatattctagacttcattcaagcccatcttcccagttaaataccattacaaatgaaccaaaaaaagttaatgaaaaacgtataaactgcaagagaagtttattgcttaagtggatgcttcggaacatggaggataccactgccaaacgctccaatcgacgcagcttccagttttcggatcgaatccagtgttctgctcgcaggcaactagctcggcctgtccggtgctagagcactgccagtagtgggttggatcccagaagtcacgggaaatctctccggagcgtcccacgcaatcgggctcaccattgccatcgggattgcagtcaaggtcggcgtagatggcaacgcagagggtcaggaagagaaggactaaagctgaaacagaattccgctattggcatctcaatggtttcagcgatgtgaggtcatcaatgaaactcacctgctttcattgtggtttgttcgagtgattaataccgaatgcgattggaacgcaacgttcgacattttatagccacctgctatctattccctgacatattgtctgagacaatcggagctatacattctatttcttaaagaacatgaaatcgtttaaaaataatctcatgatcacgattggtatctgtatctcgacaattcgaacatttgacgccgtcgtacaattcgttttcaaacaaagaagtatatttcaccaagtgttgtagtatacttagttatgatattaaaatattattgaacaaaaaatttgcatatgatttgtttgaattgaccggctcctatttagacaatttataccctgtaaaactttacacactgagacacagtgtttttgaaataaacaaacaaattttgaaaccaagctctagttaaaaaataaagttgtttgtaaaattaaagtatattgtttatactttatatgataaagtataatttacttttctctcgttcataaacattttattgcattaaatgcaaattagtagcaatacgagtactgtctaatctttataggtttccaagatatcatttggacaaaaacatctcaaaaatgttatttacaaataataatgaaactcgttaacactcaactgtactcaacatcctatagaaagcgactgagcagaaacaaaatattctatataccaatctaggttgctctataacattttcccatatcttcgaatactcgcaagaacatgagatattttaaaaatccaaacaatgtatgtaatcatttagtttgccatatattttcatttttgttgttattaaaaatgcaatcaacagtaagcagtccaagaccattcgctccatgaaacgcactccttctttgtggggtcgaatccagtggacaacgggcacaacacagccgtggccgtggaggtggaggactcacaccaccagtagcgagtgggatcccagaagttgcggatgttcgtttgcacgttg

SEQ ID NO: 31142 - DNA, 282 bp, DROSOPHILA
atgaaagcagctttagtccttctcttcctgaccctctgcgttgccatctacgccgaccttgactgcaatcccgatggcaatggtgagcccgattgcgtgggacgctccggagagatttcccgtgacttctgggatccaacccactactggcagtgctctagcaccggacaggccgagctagttgcctgcgagcagaacactggattcgatccgaaaactggaagctgcgtcgattggagcgtttggcagtggtatcctccatgttccgaagcatccacttaa

SEQ ID NO: 31143 - protein, 93 aa, DROSOPHILA
MKAALVLLFLTLCVAIYADLDCNPDGNGEPDCVGRSGEISRDFWDPTHYWQCSSTGQAELVACEQNTGFDPKTGSCVDWSVWQWYPPCSEAST

SEQ ID NO: 31144 - DNA, 3997 bp, DROSOPHILA
ataaatataatgtagttcttctatagaaatatgggctccaagcgtaggcttagattccttttggatgaatccgatcagcaggagaacagcccggatggcaatggtccaaagaaaaagcggctgtttacaccaacggactttaatattccaaaagcgaatcaaaggagttttttggcggaatccacatcaaatcatcaaaagaacactccttccaggtttcagacaatgtggcagacgctaaacaagtccggcagcagcagcagtcaacccgattctctaggaaactccagtttctcatcatgttcccagcttctgaacaccagttggccaggaacgagacgaagagcaaaagcattgccccttgctatccagatttccccaagaactcctccctcagtttcatatgaaggacgtgagacaagctctttattccaaagttcttggaaatcattaattaaccaaaccgcttcctgcaacgggtcgtcagagaacattgactctgatccacctactcctcaacgattgccaacgtcttcattccaaacttcttggaaatcgttaagtcaaagctcgctgaataaatctaactgctctggattgaccgaggatagctataccgaatcttctccagctattcaacttgttcctagtgaaagtcctaggcagtatctgccaagtagccaaaatagagtcaatttgaaggcaaaccctcgctgtgttaaaggaggctatgctgaggagttccgtaaagtcctcaaaaaagtaagaatggatcagcgtcaacttaaaaaccatgcagccactcacacggctaaaattttgtctgttacaaaccagtatggtgttaccattgccctagtggcttccgataatggacgtagtttcaatattcttcctccaaaaggagaaaccacacaacttacagttggatctatagtacaattttttctggatccaaggataaagcccttagagctaaacaagaaacaactggtctattgtcgcccatacaatgttgtaataaaaggataaggacatattgtatatttaaaatatataaatagtatttgtaaggacggaattgtaagtcattaaagccatattagtatgtagcatatacatataagatttgtcaaaaattacgcttaactttagaaaaggagttgtaccctattgttcgttaaatataatgtcatttaaaaaaaaacattatttcatggaaaagtagtaacaaaaatcagtctttaggcttagaaagaaatatcgtatcaccaacatactgacttctcctggagtatattagcatggatgcgttgcgcaaggaatctgtaaatacaatactgattttaaaaccttgtcatcaaagtaaataattataatcgcacctcattgcgtgcgagggcaccgctgccacaaacaacaagaatatgacattgcccagctcatccatatgggcatagcacttgtggtagtccgagcagctatattggtccactaacgtagttttattgctggacgactgggtttcaaattggtggactgcatccatagtttgatcgaaaaacttctttagaatgtccaagcgctgtagatcgcccacaatgatgcgcttgacactcgccgactggtttagatttctggtaaagagactttttcgcgtgtgtcggttaattagaatgatggccagcacatttccatcgatctccagatgctcgggcagactgcgcggcacgcatcgctcggcggctgccaaaaggttgccttcattccggtaggcactcatggcatgtgcatgcaactctcggaacgaggcattctcagcgccacacaggacacacagagcactgttcgacgccacaggaatactgacaaagcggtaggctatatggggacttttcacgggcaaatagaccggcacatcgtgttgcattgtgctcgacgaattcaacagaaacagcagcagctcgcggtcccgagtgtccagatcccaccagccctcagtggccacagcgatacggtgtcccacaaccaggcagcaaaagagcgagccacagtggccactaaattcatttagacactgcagcagctgggcgttttccgccgccagcagacagtccgtgtagcccaggagttgtgtacccgcacaggcggcttccagaatagcgtcaacaatcgggacatacttcttggcgtccttcttcagtctatcgaggagcgttgcatgtgccatttctgcggcccgggtaatgaacatgcctatcgctccaaagacaagatcagccagcgtctgaagcagttgctccgacccaacaccgcagccgcacacgatcagggtgatggattcccggtcgcgccatatgtaagtccactcctcggcatccgcgggagcctgattctggataggctgctgtttgctggtcgtcgtggcctccagttggattcccagcgacttaaagaacatgtgaaagccgtttaaggaggccaccgtcgagaagggcagctggatatggagaaagggtattaactaagtgaataggtaggcaatatgttactcttacattttcgcattctcccttctttcgtgtaaacactggcaatccgccgtttgttgtcaaacataacaaatagatggacatcgcagctcttcttcttcgccgaacctgctacgtatgatgcttacatcgattaaatcgattcgttttgaattatcgaaaataagcgatgcactagtaaattaatatgatttattttaaacttttatctgaattacttgcatacttttagtgttttaatgtaataaatcagtaagatgcagtattttgtagctgattcaggagaacagatcaaattcaaatatatttatgtcaatttatgcatgcatgcatactggtttgtttttccattaaattaaacagataatatttttttgtatttttttttaaaacatcgctgcttaaaacatcgatgtttttcgatatcagggacatcgatgtttctggcagtaagtaagccaacaaactaagcatcttcatccatgccatttgattattttattcgatcaacgttatcgatcactttgcgtgcatgcctgtagaccagggctgtggacgtatgtttgttcagcaccatacgggcacactgttctcacaaattgcatttcgcattgtccgtcgtcgtcgttttcacacgctgctcttttctggaatcggtaaaaggtaagcttgatatgtgaattacatgttcatgattgttaattaattacacactgcgtcctcgctggcgcgttttgaaaagctaagaaaatttgggaaatgccgccgcagtcttgtcgcatttgcggcggcgatgcgttcgcctgtgccagtgtgtgcgtatgtgtggtgtgccgagcgcttgtatgtgtgcgagtgcgaaaaagtgtagcgcgcgcaggcaacagcgtgcgcttgtagttgtgtgttccaaaaaaatgaaacaagaaaacaaaaaagaaatatggttgcctgtcgacaggcgtaaaagtacgcaatatgtataaccaacggtcttatttccacagcttcaggtccagtcccggcaccagatccagatcccgatccagatcgagagtcgccgctcctcaccgtcatcatagtgcgaagaagaagaagctgaagcagaagccgccgcgcactttcgataaataaagtggaaaaaaaaaacagcaaaaacaagaaatccaaagggaaaaaacgtgagatccgagctcatccggcggaggaggaagccaagaagctatcaaaattaacgcggacacaactgcagagcgacgccgacgcgaacgccgcttctactacaaagcgatggcgacaatgttgacatcggacgaggcgggcaagctgctcgacttctcccagaagctggacattaatctgctggacaagatcgtcgaggttgtgtacacagcgcagggcgagcagttgcgtctagcccagagcatactgaccacgctgaagga

SEQ ID NO: 31145 - DNA, 1880 bp, DROSOPHILA
agaaacatcgatgtccctgatatcgaaaaacatcgatgttttaagcagcgatgttttaaaaaaaaatacaaaaaaatattatctgtttaatttaatggaaaaacaaaccagtatgcatgcatgcataaattgacataaatatatttgaatttgatctgttctcctgaatcagctacaaaatactgcatcttactgatttattacattaaaacactaaaagtatgcaagtaattcagataaaagtttaaaataaatcatattaatttactagtgcatcgcttattttcgataattcaaaacgaatcgatttaatcgatgtaagcatcatacgtagcaggttcggcgaagaagaagagctgcgatgtccatctatttgttatgtttgacaacaaacggcggattgccagtgtttacacgaaagaagggagaatgcgaaaatctgcccttctcgacggtggcctccttaaacggctttcacatgttctttaagtcgctgggaatccaactggaggccacgacgaccagcaaacagcagcctatccagaatcaggctcccgcggatgccgaggagtggacttacatatggcgcgaccgggaatccatcaccctgatcgtgtgcggctgcggtgttgggtcggagcaactgcttcagacgctggctgatcttgtctttggagcgataggcatgttcattacccgggccgcagaaatggcacatgcaacgctcctcgatagactgaagaaggacgccaagaagtatgtcccgattgttgacgctattctggaagccgcctgtgcgggtacacaactcctgggctacacggactgtctgctggcggcggaaaacgcccagctgctgcagtgtctaaatgaatttagtggccactgtggctcgctcttttgctgcctggttgtgggacaccgtatcgctgtggccactgagggctggtgggatctggacactcgggaccgcgagctgctgctgtttctgttgaattcgtcgagcacaatgcaacacgatgtgccggtctatttgcccgtgaaaagtccccatatagcctaccgctttgtcagtattcctgtggcgtcgaacagtgctctgtgtgtcctgtgtggcgctgagaatgcctcgttccgagagttgcatgcacatgccatgagtgcctaccggaatgaaggcaaccttttggcagccgccgagcgatgcgtgccgcgcagtctgcccgagcatctggagatcgatggaaatgtgctggccatcattctaattaaccgacacacgcgaaaaagtctctttaccagaaatctaaaccagtcggcgagtgtcaagcgcatcattgtgggcgatctacagcgcttggacattctaaagaagtttttcgatcaaactatggatgcagtccaccaatttgaaacccagtcgtccagcaataaaactacgttagtggaccaatatagctgctcggactaccacaagtgctatgcccatatggatgagctgggcaatgtcatattcttgttgtttgtggcagcggtgccctcgcacgcaatgagattccttgcgcaacgcatccatgctaatatactccaggagaagtcagtatgttggtgatacgatatttctttctaagcctaaagactgatttttgttactacttttccatgaaataatgtttttttttaaatgacattatatttaacgaacaatagggtacaactccttttctaaagttaagcgtaatttttgacaaatcttatatgtatatgctacatactaatatggctttaatgacttacaattccgtccttacaaatactatttatatattttaaatatacaatatgtccttatccttttattacaacattgtatgggcgac

SEQ ID NO: 31146 - protein, 416 aa, DROSOPHILA
MSIYLLCLTTNGGLPVFTRKKGECENLPFSTVASLNGFHMFFKSLGIQLEATTTSKQQPIQNQAPADAEEWTYIWRDRESITLIVCGCGVGSEQLLQTLADLVFGAIGMFITRAAEMAHATLLDRLKKDAKKYVPIVDAILEAACAGTQLLGYTDCLLAAENAQLLQCLNEFSGHCGSLFCCLVVGHRIAVATEGWWDLDTRDRELLLFLLNSSSTMQHDVPVYLPVKSPHIAYRFVSIPVASNSALCVLCGAENASFRELHAHAMSAYRNEGNLLAAAERCVPRSLPEHLEIDGNVLAIILINRHTRKSLFTRNLNQSASVKRIIVGDLQRLDILKKFFDQTMDAVHQFETQSSSNKTTLVDQYSCSDYHKCYAHMDELGNVIFLLFVAAVPSHAMRFLAQRIHANILQEKSVCW

SEQ ID NO: 31147 - DNA, 4740 bp, DROSOPHILA
tacagatatagctgcgttaaaaggtgaatgagtaaatggttattcgtgcgcaattacatacattaatatgattaacatatttttgcgcattgtcctcgacataccagcataaataagatgcccagccagttcccaactcccgctcccctatccacattatatagttgtaaaacgtcataataatactacacgcaaccgatacgaaagatgcaaactttattgtactaatataaaataatgtttgtttggaattttttaaatgagtaattgtagaaagatccgagtatgaatgaatatttgaacaaacacaaacacacctctcagagaaacccacacaaaaatgagcaaaggaaacaagaatattaagatgaagaaaaccttaaagtaaaaatttaattgtagtgacttaaacagatcagatgctggcaggagtaaacaaaattgtatgcaatctttttgcataaatctagcattaacccgacgttgaagacgatggacgccgcaataaggagacgatcaagaaagcacggcatcataaccagaatagagttcatgcaatgtgtgaaaaaaaaagaaaactaaaacgcaaatacccaaaacacaaatacatcaagaaaaacaaaagtaaccatagaaatgcgtattaaatcgtttaaatttttacataattagtttgtacattaatttaaataaaaatcaattaaaactacattgatgtatgatgcaaagccacatttaagtttcaattgtaacgattttgatagtaatatagtgtacgtatctaatctcgtggaatttcgcaattgattgaaacattattggattgatgccaatcaattttgaaagtttggtgggatatctgtatatctgaaatgttttcgtttaatccttgagcaactagtgtcaaaagatttttatttcgaatatttaaagtcaattttagagaaaagtttattaaacgtttgttgtggcagttgtattgaactataggtagatacaattatttaggtcccgctttttgaggcactgataatctgttgttatgtagaaagagcgtgtccttagagtagcccttccaggtttcgaaaatgtcctgggaaataagccaggtgttgccaactggcgtcacgggataaacgtcgtctttgttgctaaaaggcagctcgatttcgtgcgagactttcagcttgaaagcggtaccattaaagggtcgtccagcatggagagccactgtcacatcttccaggaagagtctccaccgaggcctatagtagtcgctcaccaagccggaccactgtttgcacgcatagtccaggatctgaccatcaggaccccaggcggtaatttggtttctcgcattgaattcgaagtttctttgttgcccagtgttcggtgccgcttgcttggcctgctgcagccagttgccgagcagaaaattcctgctgctcgccaggatcagctccatgtcatcgaacagtttcaacagcttgacgctaaggaattcgaaacgcgaaacctgtcgctttctataggccgaccttagattgatatacaactgatctgcgctgatctgcaggaattgcctggttatgtccaccaaatcgtgttcgtatatctcgtatctgttatcctctagcggtatgatggctctgaaggtcagcaacaagtgccaggcatccagcactgcacttgcattgtaccaagtgaagggttcttggttgaaggaaggcctgcgcgtcactacatactgtccccgcattttctgcagaccacggaaggaatagacgctattctttaggagcagccacgcctgctccaaacgctcatccttaacgccataccggctgtgtgagaaattcgtaaaccagctatccagatctagggatgtattactccagccgcgctccaaggtgaacgaatacatcacatagttctggccaatgccctcgggtgtgattcccgtgcccaccaaactgctgttgggcaagcgacgcgcctcttctattccggaatttatcagcttcgctgatccaaacattccaagtgtgccgccgaaattgtgaagcatgcaccatataaagggctgcccaaagtaggagcgcgttagctcgtattgcggaaactgttcgctctgcagatcgagcaccaaaatgcgaccacgtggtgcggccgtgaggaaagcttcagccatgtccgtggtccaaaagggattcttcacgaacatccagccctgaagcaaccaaatggcctgaggatcaatgccgcgcatagattcataaatcgccgccgccgttgaacgcatgtattccggcttggctaccggtggctccagttcgttgaagggatcgcagaagaagatgtgattcgaaccatatttcgtaatgatattatgcaaaaaacgcgaggctatctccttgaaaagattctccgtgggttccacaaataaaccgcagcagtatcgatcggggaactggttccatcgctgcacttccatgaacgtcgattcgggattcagacgcttcagagcacgtggcacatgaccagcaaaggcgggcaaggccacgctcatgcccagattgcgttgggcagtgataatctcctgctggaggagtaattgatagcgtcgccatgccggtgtcagtggtcccgcccatccccgtatgttgcccatgcgctgccaggcctgaaaagctggtccagccagatgctcgtcgatttcctccatcctgaggcccatatccgtgtacaccttcacccaaatggcttcctggaccggcgcaatagtcagactgatgcccatcagggccatccagtccaggtgacggcgccactgctcaatgccccaccatgcaaagctatagctccaagtgcacacgttctggtgatagataatcgggcttgctgacttggactcgatggtcacattgggcagctgcaaattggtgggcaactcaatgcgcatcttgaaccaatccacgtccttgtttaaaacatatttgaggtagtgatggagggccttgcacacggaaacaccatcccatcccatcagcagaatccggccatcatccaacatgctaatctgtaaggtatttaaagattgaaacatttgtattgtttatttacttaaaagtaaatacttaataaataaatattattacctgaaagcttcgtaaatccatatttttattgacttgcaccttaaacaattgagaagatcgttcgccgattactctactgattaccgccatggctgcggtttcctggacatctttgggtgtgctgggtgccaagtgggcagccatttggagtcccatttcaggacctgaagccgcatcccagttaagttctgatccctgcgcgagttgcaggcaaagcaccgctagcaaggccaaggccagcttccaattcagctgcatttctccgtccgtctatttactgccgtgtgtgtcaatgtcaacggggcccaagtgactgactgactgacagcttctccttctctcgcaattggggctctcccgaagaatgcgggaacggaggaaagagcgctaagtgaacccgatgagaacacaatggaagagaagagcagctggattccgatcactttcttcttatcgccagattgaacaatgacgcagtagagttctgaaatgcgagggatcatcggatacactcactaagagtatattacaactttgataagaagtttgtagatcaatttttcccttattgagttttaaaaataatattaagttctgatttaaaattaattggtaagcaatgaaaaggtaaaaaatatattatcaactaaaataattgtttgatatttatgcaacaaaaaacaaagaacgtcagattttggaaactatacaatttagaatggtatttaaatgttggtcttcgtcgatatccttatattgtaatccgtgttataatgcatttgttaagaaattaactgaaaatcgcaaggcaaatccatatatctcggaaaatatcaaaaaatatatagtatatatacagggtcatttgagctttattgcacgtatttcgtcttagacactaacaataatttagtttatgccgccgactaagcagcgattttaagtacatgtaaacgaaagaacattcatttcttctcgttcgtgtgaaacgatgaatgctcagtgtatataactcctaacaaattgaataacaattcagcgatatatatatgtaaaaaattataaactcacagcggacaatgcaacgcgatgctttctaccattgtttttttttttttttttttgtttggcaacagaatacaatttcaaagccttggccaacaacaaacgtacgtgtacgtcgatgatgtatcttctggtgcttatgagctactcttaccatatctaccatgtacaattttaatgttaaaagcctttcgtgttgctcactattttatatgcacaaaatcaaaaatgactagctctaaacagccgctggcaattacacaaatcaactaatcgctaagtaatgctattgttaatatccttaaatacaagttatgtacgtatgcaattcatgtctatgtgttttggttttttggctgtgtgagtttactgtactgactacaaaaaacaacctggttataatattgttaatcgtttgcgttttagcttggcgcagttggaagcaaacatatctttggacaaatcactcttcaaatttcactttaccacaatctcgtgcagtaaattcgttgtgcaa

SEQ ID NO: 31148 - DNA, 2661 bp, DROSOPHILA
tttttaaaactcaataagggaaaaattgatctacaaacttcttatcaaagttgtaatatactcttagtgagtgtatccgatgatccctcgcatttcagaactctactgcgtcattgttcaatctggcgataagaagaaagtgatcggaatccagctgctcttctcttccattgtgttctcatcgggttcacttagcgctctttcctccgttcccgcattcttcgggagagccccaattgcgagagaaggagaagctgtcagtcagtcagtcacttgggccccgttgacattgacacacacggcagtaaatagacggacggagaaatgcagctgaattggaagctggccttggccttgctagcggtgctttgcctgcaactcgcgcagggatcagaacttaactgggatgcggcttcaggtcctgaaatgggactccaaatggctgcccacttggcacccagcacacccaaagatgtccaggaaaccgcagccatggcggtaatcagtagagtaatcggcgaacgatcttctcaattgtttaaggtgcaagtcaataaaaatatggatttacgaagctttcagattagcatgttggatgatggccggattctgctgatgggatgggatggtgtttccgtgtgcaaggccctccatcactacctcaaatatgttttaaacaaggacgtggattggttcaagatgcgcattgagttgcccaccaatttgcagctgcccaatgtgaccatcgagtccaagtcagcaagcccgattatctatcaccagaacgtgtgcacttggagctatagctttgcatggtggggcattgagcagtggcgccgtcacctggactggatggccctgatgggcatcagtctgactattgcgccggtccaggaagccatttgggtgaaggtgtacacggatatgggcctcaggatggaggaaatcgacgagcatctggctggaccagcttttcaggcctggcagcgcatgggcaacatacggggatgggcgggaccactgacaccggcatggcgacgctatcaattactcctccagcaggagattatcactgcccaacgcaatctgggcatgagcgtggccttgcccgcctttgctggtcatgtgccacgtgctctgaagcgtctgaatcccgaatcgacgttcatggaagtgcagcgatggaaccagttccccgatcgatactgctgcggtttatttgtggaacccacggagaatcttttcaaggagatagcctcgcgttttttgcataatatcattacgaaatatggttcgaatcacatcttcttctgcgatcccttcaacgaactggagccaccggtagccaagccggaatacatgcgttcaacggcggcggcgatttatgaatctatgcgcggcattgatcctcaggccatttggttgcttcagggctggatgttcgtgaagaatcccttttggaccacggacatggctgaagctttcctcacggccgcaccacgtggtcgcattttggtgctcgatctgcagagcgaacagtttccgcaatacgagctaacgcgctcctactttgggcagccctttatatggtgcatgcttcacaatttcggcggcacacttggaatgtttggatcagcgaagctgataaattccggaatagaagaggcgcgtcgcttgcccaacagcagtttggtgggcacgggaatcacacccgagggcattggccagaactatgtgatgtattcgttcaccttggagcgcggctggagtaatacatccctagatctggatagctggtttacgaatttctcacacagccggtatggcgttaaggatgagcgtttggagcaggcgtggctgctcctaaagaatagcgtctattccttccgtggtctgcagaaaatgcggggacagtatgtagtgacgcgcaggccttccttcaaccaagaacccttcacttggtacaatgcaagtgcagtgctggatgcctggcacttgttgctgaccttcagagccatcataccgctagaggataacagatacgagatatacgaacacgatttggtggacataaccaggcaattcctgcagatcagcgcagatcagttgtatatcaatctaaggtcggcctatagaaagcgacaggtttcgcgtttcgaattccttagcgtcaagctgttgaaactgttcgatgacatggagctgatcctggcgagcagcaggaattttctgctcggcaactggctgcagcaggccaagcaagcggcaccgaacactgggcaacaaagaaacttcgaattcaatgcgagaaaccaaattaccgcctggggtcctgatggtcagatcctggactatgcgtgcaaacagtggtccggcttggtgagcgactactataggcctcggtggagactcttcctggaagatgtgacagtggctctccatgctggacgaccctttaatggtaccgctttcaagctgaaagtctcgcacgaaatcgagctgccttttagcaacaaagacgacgtttatcccgtgacgccagttggcaacacctggcttatttcccaggacattttcgaaacctggaagggctactctaaggacacgctctttctacataacaacagattatcagtgcctcaaaaagcgggacctaaataa

SEQ ID NO: 31149 - protein, 690 aa, DROSOPHILA
MLDDGRILLMGWDGVSVCKALHHYLKYVLNKDVDWFKMRIELPTNLQLPNVTIESKSASPIIYHQNVCTWSYSFAWWGIEQWRRHLDWMALMGISLTIAPVQEAIWVKVYTDMGLRMEEIDEHLAGPAFQAWQRMGNIRGWAGPLTPAWRRYQLLLQQEIITAQRNLGMSVALPAFAGHVPRALKRLNPESTFMEVQRWNQFPDRYCCGLFVEPTENLFKEIASRFLHNIITKYGSNHIFFCDPFNELEPPVAKPEYMRSTAAAIYESMRGIDPQAIWLLQGWMFVKNPFWTTDMAEAFLTAAPRGRILVLDLQSEQFPQYELTRSYFGQPFIWCMLHNFGGTLGMFGSAKLINSGIEEARRLPNSSLVGTGITPEGIGQNYVMYSFTLERGWSNTSLDLDSWFTNFSHSRYGVKDERLEQAWLLLKNSVYSFRGLQKMRGQYVVTRRPSFNQEPFTWYNASAVLDAWHLLLTFRAIIPLEDNRYEIYEHDLVDITRQFLQISADQLYINLRSAYRKRQVSRFEFLSVKLLKLFDDMELILASSRNFLLGNWLQQAKQAAPNTGQQRNFEFNARNQITAWGPDGQILDYACKQWSGLVSDYYRPRWRLFLEDVTVALHAGRPFNGTAFKLKVSHEIELPFSNKDDVYPVTPVGNTWLISQDIFETWKGYSKDTLFLHNNRLSVPQKAGPK

SEQ ID NO: 31150 - DNA, 3329 bp, DROSOPHILA
ctcactattttatatgcacaaaatcaaaaatgactagctctaaacagccgctggcaattacacaaatcaactaatcgctaagtaatgctattgttaatatccttaaatacaagttatgtacgtatgcaattcatgtctatgtgttttggttttttggctgtgtgagtttactgtactgactacaaaaaacaacctggttataatattgttaatcgtttgcgttttagcttggcgcagttggaagcaaacatatctttggacaaatcactcttcaaatttcactttaccacaatctcgtgcagtaaattcgttgtgcaacacgttcttttcaacctccatagctttttactccccaatccgagagagatccatttcaattttatcatattcccttgaaaatccattgaaaatagtaggaaagttacttagctccttcttaagtatgcttttcaaaatcaaaagtaacagcatcacgaaaatttgtgggcaaaaaagttaaaacgtcatttggaaacattaaaatattgtatgctgtatcaataaaatcctgtttgatcccatgtgtggttaattttagtagttaatctcgatattttttaacaagctatccatttgatctgctcaacttttaagttgcacagcatgtgtttttatacgctttcatcttcatagttggtcagttggtcactttagttggtttactttaaatcgagcatttaacaattaggacctaacaaatcttgtggccactgttcttttacttttgtactctttccgatctggctgtttttcctttcttcgtgatctgttgtcctctttacttcccggcattatgatttttctttcaaaagctccttacatctttttggtactcagatttggcacaaataaatgtggggttagatccatttcgccagcgatctggtgtccattatgctttctgtaaattcgttgtgcactcgcggtctcctccaccaatcctattcctgctgcctccaattcactcacttatggagtaagcctttcgtatgcacttgctgtgcctggtgattctcagctcctcggcatcgtgcgacgaatgctgtcgatgcgtcactgtttctggcagttcagtcgaagacttgttcaacgcgtatgtgcggatgaagtcgatggttgaatagccttgtgtcccggagcattctgttaccttcttcgcctgcgtatctcccgtatcagcagagatgctattcaggctttgggtctgcatgggcggtgggggaacgtccaacgtagtacctgcctctggagttactggtgcggtgacagctgctggggtggagatcagtgataagccgctgccaaatccattgatcgcctttgatgaacccgccggtcccacgggacttcgcggctgatcaagatccagcactatatagtttactccgcagctgcccgctaagctggtgggcgtggccggctcttgattggaaattggttccctcggcagcagagggagctccaagcgatttacgttctcatagcagcgctcattgttcagatcaaagatcagagcttccacattggcgtacatgtgcacagcatcgttgggactcagaactggagctggtgctggggccgattccagaggtggcaagtccatcgtgcgcctacgtgatgtcaacctattgccggagggcggggtggaaagcaaatccgaggcggtgccttccagacaacagtcctgcaaagcccgcaatggctgatccaaataggcactgggtatcaggactggtgattgcaaattgggcggagagtcatcgacttgcgaatcgttggcctgcagcggatacgatgcacttgtgctcgagggctcactgtggaagttgcccaactggcggctcattaggggagccggctctagatagttattgccctcagtacggcccatatttacggacaccgaatgagcggagttaaccctttctcgttcgccctgcacaaaggcatctgtattcaccgcgttgatgtagcgctgaaacatcggatacagctgctcggcattgtggactcgaaacgtgtagatccctggcccagacatacacctacgtcctgcttcgaaggagaagagatcgttattcaacccataacgtcggaggtgttgcagtgcccagacaatgggctcacagccaggcgactggaatattagttcccggggcgttagctccaggtagccactccggatgatgggcgtacccggggtgggttgcaggtgagccactcgcactcgaaacacattctcatgaccgcgcagctcatttaacttgctgctgctggtgatgcagcccatggtgttgcactgaaagacggagtattatgcattgaaggattatccactccagtcatgtacagtgcctattgaaatgcacacctggacaggcaagtccgcctggctgttatcgcagcgggcatggaagaaatcgcaggccgataagagcaccacccaccgcctccaccagctgaaatcagctacccagtggaactggaggctctggggtgcagtcgaattgtgttgctgttatcctggttgactcctcctgctttggttaactcctgatcgacgggactgctggctgattgttgttatttggccacggaaattccgttcttgtggtataaaatttcttctgcgacttttcccctcgcccgacagaacgcaattgtgagcaacgggcatgctaacttgattttcgcaaaaagacttacaagaaacgctttttaaaaaagtaaacggaaaatcaaagacaaattacaagtaattacacttaaagaatgaaaaactagtttagccaagtttaagccaaggaaatattaatatttcaaaatttatagaaaaatattgcaaatgtcagcttaatagaagttttctctcgtttaatagaataatcttgaagatttcttacgtcgtaatttttacgtttctgcaaatgtttactgcaattaacaagtaataaataggattcagatgtaaacaaatataatttataaaaaaattttaagttaaggcattttagtcatcttaattgtatggttaaccatttggcggaacatcaactttgtggacagcactataactagacccgaagccctaacgcgttctaactgcgaaaacatcctaacgcgacgtaaataccagacccgagcggacattttttatttgtggagcgcgcaacaagaacgagaaaagaaaccgaaacggaaagcaggcaaaaagagctgctgccagtgtagaatcgcaaagcaaagaaagaagcaagtgcgtgtgtttttaaaccgaaaccgagagaatc

SEQ ID NO: 31151 - DNA, 1329 bp, DROSOPHILA
atgggctgcatcaccagcagcagcaagttaaatgagctgcgcggtcatgagaatgtgtttcgagtgcgagtggctcacctgcaacccaccccgggtacgcccatcatccggagtggctacctggagctaacgccccgggaactaatattccagtcgcctggctgtgagcccattgtctgggcactgcaacacctccgacgttatgggttgaataacgatctcttctccttcgaagcaggacgtaggtgtatgtctgggccagggatctacacgtttcgagtccacaatgccgagcagctgtatccgatgtttcagcgctacatcaacgcggtgaatacagatgcctttgtgcagggcgaacgagaaagggttaactccgctcattcggtgtccgtaaatatgggccgtactgagggcaataactatctagagccggctcccctaatgagccgccagttgggcaacttccacagtgagccctcgagcacaagtgcatcgtatccgctgcaggccaacgattcgcaagtcgatgactctccgcccaatttgcaatcaccagtcctgatacccagtgcctatttggatcagccattgcgggctttgcaggactgttgtctggaaggcaccgcctcggatttgctttccaccccgccctccggcaataggttgacatcacgtaggcgcacgatggacttgccacctctggaatcggccccagcaccagctccagttctgagtcccaacgatgctgtgcacatgtacgccaatgtggaagctctgatctttgatctgaacaatgagcgctgctatgagaacgtaaatcgcttggagctccctctgctgccgagggaaccaatttccaatcaagagccggccacgcccaccagcttagcgggcagctgcggagtaaactatatagtgctggatcttgatcagccgcgaagtcccgtgggaccggcgggttcatcaaaggcgatcaatggatttggcagcggcttatcactgatctccaccccagcagctgtcaccgcaccagtaactccagaggcaggtactacgttggacgttcccccaccgcccatgcagacccaaagcctgaatagcatctctgctgatacgggagatacgcaggcgaagaaggtaacagaatgctccgggacacaaggctattcaaccatcgacttcatccgcacatacgcgttgaacaagtcttcgactgaactgccagaaacagtgacgcatcgacagcattcgtcgcacgatgccgaggagctgagaatcaccaggcacagcaagtgcatacgaaaggcttactccataagtgagtga

SEQ ID NO: 31152 - protein, 442 aa, DROSOPHILA
MGCITSSSKLNELRGHENVFRVRVAHLQPTPGTPIIRSGYLELTPRELIFQSPGCEPIVWALQHLRRYGLNNDLFSFEAGRRCMSGPGIYTFRVHNAEQLYPMFQRYINAVNTDAFVQGERERVNSAHSVSVNMGRTEGNNYLEPAPLMSRQLGNFHSEPSSTSASYPLQANDSQVDDSPPNLQSPVLIPSAYLDQPLRALQDCCLEGTASDLLSTPPSGNRLTSRRRTMDLPPLESAPAPAPVLSPNDAVHMYANVEALIFDLNNERCYENVNRLELPLLPREPISNQEPATPTSLAGSCGVNYIVLDLDQPRSPVGPAGSSKAINGFGSGLSLISTPAAVTAPVTPEAGTTLDVPPPPMQTQSLNSISADTGDTQAKKVTECSGTQGYSTIDFIRTYALNKSSTELPETVTHRQHSSHDAEELRITRHSKCIRKAYSISE

SEQ ID NO: 31153 - DNA, 2570 bp, DROSOPHILA
gaatttgttcttgttattcagccgcgaggcattcagctccacttgcctttcgtgggcctgtcggctggtgcacggctgctcgtcctccaacttaacggaaatgggaggttcctgctctggctgatcttttttgtccttggagtgatcggttacgatgccctgctccttgatcttctgttgccgccttcgttccgcccgacgatgagccggattcctcagtcggatggtttctttggccaaggtggccgccgtgcgctctggcaaatgattttggatgacaacagggcgcttgccaacgatttttttaatggctggatgcagtggcagctgcggagcggctatgtcgtccccaaaaaggctgtcgccgcgcactttcgcaatatccgcgccggtgagggggacctgctgctttcggtaatattcgctgaccacctgatagcgtagtctgtccaacagttgtcgtccttgcagcagtcgtcggtcgatctcggccagctgctcgaccttctgagagatttcgcgctggaactccagacgaagcagctcccggatgcgctgaaatttgtcggacaacggcagcatgccatccgactgttccgtcttggtccactttctttgaccgggcgactcggcttctgcgcaggtttcttcctcatcctggctagaaacttccgtttgctgataatctggatcgtggtactcgctgtgcctgcgtttttttggcggcgtcgcttgttgctggtccatgtgcgtggtagctggcacacgcacaggacttgtatcacgttagttcggaggggaacagcttcaagtttggcccgaatcgctccgtgcacatttaggccggggtaattggctgttatttataaaaatgtgtaaacaattgatgcgaacgaggcggcgcaaacagaattgagtgggggagttgccacatcgctggtgtagatgcgtgcacgctggccttgtccaacactgttcagccagctgtttactctttacgcgggaagcaaagacgccgaaatctagacggaaaatcaaaagtgcccaccaagtaaaagcagataagcagcagcaaaatggtcgagcgcatcgaggatcttaacctgccgaatgccgtgattggccggctcatcaaggaagcactgccggagtcagctagtgtcagcaaggaagcgcgagcagcgatcgcccgagcggcatctgtgtttgccatcttcgtgacatcctcgtcgacggcgttggcccacaagcagaaccacaagaccatcacggccaaggatattctacagaccctcaccgagctagacttcgaaagcttcgtgccctctctgacgcaggatctcgaggtctatcgtaaagtggtcaaggagaaaaaggagagcaaggccagcaagaaggattccaacactgccgaaaatgccaacgccagtgccaccgcaacagcagaggaagcccccgagtgattacgaataggagaaactatacggatcaattatcctcttcagtcattaagaacaaagctagtattgagcattaacaaaaaacattaaacataggcattatctaagaacttcacttgtgttttgtcactttcctcaaagactaaattatgttgttagtcaacgtttacatgggattaatttgggattgtaagtgacggttggaattacacccttaaataatgccgcatttcaatccagtccgatctagttttttacgccttcattcaaagtatataaaggtgtcagaataatatttaagtatttcagtaattatttgtttatatatgtgatcagaaaatcactgttttaaaaatcatccagatagataaccgcgtgttctttccagcactggaaacagctgtttaaaaaagcgcgtcttatcgcaacaaaaagtttagttagttattattttgcatgttttatacaattaatattttagtagaaaatgggagttacgggcttgtggaagctcattgagccgtgcggcaagccagtccccgtagagactttggagggcaaaatcctagcagtgggtaagcatcgtttttcgccacctaatgaaatacttgctgattggagtacttttcgtcctgcagatatatcgatttggttgcatcaggttgtgaagggctttcaggacaacaagggatcggccctgagtaatgcccatttactgggtctattccatcgtctctgtaaattgctatactatcgtgtgcgaccggttttcattttcgatggatgcgtgccgcagcttaaaagggacactattgtgagttataataggggaatatatcaaattcactctctaaattaaatcctctttatgtcaccccttcaggcacgtcgccagcagcagaggaataagctcagcaacgaagctgatcgcattcaggctttgctccttcaatccctggccaaagaaaaagtagtgcagcaagcgctgggcaagaatgcagagctactgttgaaatccccggttaagcgaccgcctccagctaagaagaacgacgaggatgacttgtttaagcttcccgaactgccggctgcatcggtgcaagataatca

SEQ ID NO: 31154 - DNA, 570 bp, DROSOPHILA
cgggaagcaaagacgccgaaatctagacggaaaatcaaaagtgcccaccaagtaaaagcagataagcagcagcaaaatggtcgagcgcatcgaggatcttaacctgccgaatgccgtgattggccggctcatcaaggaagcactgccggagtcagctagtgtcagcaaggaagcgcgagcagcgatcgcccgagcggcatctgtgtttgccatcttcgtgacatcctcgtcgacggcgttggcccacaagcagaaccacaagaccatcacggccaaggatattctacagaccctcaccgagctagacttcgaaagcttcgtgccctctctgacgcaggatctcgaggtctatcgtaaagtggtcaaggagaaaaaggagagcaaggccagcaagaaggattccaacactgccgaaaatgccaacgccagtgccaccgcaacagcagaggaagcccccgagtgattacgaataggagaaactatacggatcaattatcctcttcagtcattaagaacaaagctagtattgagcattaacaaaaaacattaaacataggcattatctaagaa

SEQ ID NO: 31155 - protein, 128 aa, DROSOPHILA
MVERIEDLNLPNAVIGRLIKEALPESASVSKEARAAIARAASVFAIFVTSSSTALAHKQNHKTITAKDILQTLTELDFESFVPSLTQDLEVYRKVVKEKKESKASKKDSNTAENANASATATAEEAPE

SEQ ID NO: 31156 - DNA, 4485 bp, DROSOPHILA
tattttgtatactatttcgttttgtttttgcgcctttgtcattgtcgcgaactttctttccccttaattgttgttgttgtgctttcagtttttaataattttttttttatgcaacacacaaagcaaaagccttgaccagataaacaactaataatttccattgcgtttgttcacaggtggatctcgccaaggatctgaaggagaagaatgccgccgcggcagacgttacaacacaggaacaactgcccgttacatgcgaataatcctactcataattattatatataatattacatattattaaaaacaaaacaacaaacgatacaagcaacaacaaaagaacgcaacgtaaaacaacaaacaattacaagataaacgagataaaaacaaaacaaaacaaaaaacaagcaaaaatacatttttaaacatttacatattttaaataatttttgtacgaacttcatatccctaatccaagatatacgcaagcaaaagtccgagttacacgcgacaccaccatccacgccaccaatgcaaccactgcaaccaatcaccacgccccactcaaacaccacccacgcgcaggaatcaatagttttttttattgatgcctctcaattccagatcgggttaagtccccaaaaacacatccatcacccatcaagcacacaccatccaccacacaagcgcatacataccattctcatattgatgatcttgatagcgaaagaatcaacaaatcatatacgatgaaatgatgaaagtgaggagaattttttgaataatttctactatacatttaactgtaagttcgaagaaatttgtaaagaatttttggacgaaatattggataaaatatatattataaaatataaaacccaaaagcgtgcttcactcatatccgccggctgaaaaaaaaaaacgagagagatagaaacgagatacgagatacgatgaaccgcagaaaggaaacaatgttttgaatgttttaattctgtttcgagtcgagtcccaatcctcttctttaatacactaccaaaatagtttttctttacaatatacacaatgtaacagagtgttacgaaaataatcacttgtcctggtaactggagtaagcgctaagattacattatatttcgtaatggttaatttaacgtaacaaaatgttactacaaacaaactacaaaagctccaacgaaagcttcaaaagcgaaacaaacgaaactaagaaatgataaagaaaagcaaatactaacttgtgcgtcttttgcaactaaatagaaaatcctactaagtacactaaatgtattcaataaattaaagcgttaattttacgctgcgcaacgtaaagaaatatggtcaacaagaatttgccatccaacaaagaggaggcttatataggtgaaaccaaattgtttccaaatcaaattctaaatctcagcatctgacaaaaaagcgctgcttatgcaggtgtagttgctgctgcttccggcgataatccggcacattgcggagcatgaaaacggctgcgaagagaacgtagagcgacgacagcatgaggagtacgggaaaggagaagacgatgtgcgccattcggaccttccgctgcgctgttggaggcgaatagatgtagtcacctgcaatgatcaatgagttcatttagttaccatgtactgggtacagactaatagatatcgttagttccatccgttccatacaacacaggaagagacttctgtgaatggatggctatgctagagtagagtacctaccattccagctcttgtaggcgcaccgctctccatcgtagtcgttaacgcagaggcaggaatggaagactgtgttgttcaccatcggatgctggaagcagtggccgccgttcaggcaaaagctagtattgtaagcttcgctgcagggcagcatctgaatctctgtctccttgtcgttcgggctgggagtcgtggagtcaggcgtgctggacgaactggggtcaggtggcggttctccggtgtgggtaacagtttcgggtgttgtcactgtctcggaatcagtgattggtgtgctgctttcgctggccaaccaggtgtcggtactggatccgagaattatcccatcctgttccggatccgcagcaatggagtcgtctgcgtttggcagttggccgcccgagtccggattgggatccgtatcgggatgcagctggtctgcctcctcctgggccgaggcctccagttgcttgcgctgcagctccaggcgattgagcaactcaaccgcggtctcctggatctgctgctgcagctcgtgcgcatgctcgtgcatgtggctgtgctgatgctgcacaattttcagcgtatgctctcggagaagtaagattcggctcgaacaacaatctgcagaatacagaagagggggtgcgattaagaaaacaggacatttccagtgatcgcaaagatacagaatagataccgttgtaaagctcaagttgaagtacaaaaagctttcagtttttagtgcggcaacttttgaaattatcataaaaatgtctccctatggtattattattactaatttttttaatttttaagaatgcaaagtttgttcataaggacagtatttaaatgaaactcaaaaaaatctttagaaataattcacaaatatgtatattatctgaagtttacttcattcatcatccacgaacagaaagctaatacaggattttacacagttttcaaggaagttttagttttttagcataacaagtatataatcagcactgcaaatattttatgatttgttgtagctgttttccagttttttcgacgctagaaatagctttttttgtgggagagcctggcaatactggccgtaatattggaatctaaaaatcaggtggagattatgtacgtacctgtgacggcgacaattgttgagagcacgaaaattactttgaaaatccgagtaaatgggatttgcatcattggaaaacgcttggggtggcgctccgaaaaatattgattgggtggaccgattgtccaccactaggaaaactgagtcaatgaaggggtctaaacgatcgagggatcgagcggcgtgctggccgcaaatgcaatttggcgtcgcaacagaagctgaaacatactacacacttgcatctccttgtggattttactgcaaaataaaaatagaacattttagcgcctccacattttctgtcgcacgaacgcacacacacgaaacaaaaaaaaaaggaaaagaaatagcattcaaaattggtgatccaaaagcttttcatagattatcttagacgtactggagctgctatatggcctgtagaaggcttcgacattataattattataatgactcgtgaatcattttatatatcaggcaagtaattaattagttaatctaaagagcagcaagcgcgggaagcgggctcttctctgctccactttgattttaggtcttgttgcgcgcacgtcggaaaagagactgaggaaaacagagccagagaaacagatggacctcatccctacattggcggcattggcatgcgccatgaatgaaatcgatcggtgagcggggagagcgaagagagcgcccccaaaagagatgcgattgcgaccgataatagtcgaagaatcatatggatatgctaagagctgcaaaaaaaaaccgccctttaacagttattcaatttgttaacggcacttttcactgcatacttctagggcactataaagatatattactctgtgaagatagctgataagacttaaaaatgtttacatgtttcgtacaaatatgcaattgtagcgattattatttatattgataaaacaatttaaaagtcttcagccagatattcaaaatttaaaaattaatgaccactcatctcatgatttcgtccaaaatatgataatcgttgataattaaaaacgcagtattcatttcttcggacattaatttagttaatttattgcttagatttatgcttaccaacgagtacaaggctctaattagatatcaactaatatcccagtagaatttgaactatgacgcggacttgataaaaaataaattcaaaacaatggcaactgcacattagatttgtggttctatcggagcaactcccaagtgactgtttccgaggaaatccaattcggaacacagactgatgacacggcctatgtcctgaggttggagacacaacggagcattggccgccgccggtggcaactgttccaaagtctcctgttgcagtttcgccgccaaggagcggcgcaccaatttctcaataaaagtgcgcagcacttgtccgagcatcgagagagccagtggctgggagacgccaggcggagattcctccggttccagtgtgatattaatgtccttgcacatttcctggaccagctgcaaggtcgaatccaagtgcttcggcggaggtagataaagtagttggcgatgattcaccatttggaaaga

SEQ ID NO: 31157 - DNA, 1690 bp, DROSOPHILA
tccgacgtgcgcgcaacaagacctaaaatcaaagtggagcagagaagagcccgcttcccgcgcttgctgctctttagattaactaattaattacttgcctgatatataaaatgattcacgagtcattataataattataatgtcgaagccttctacaggccatatagcagctccataaaatccacaaggagatgcaagtgtgtagtatgtttcagcttctgttgcgacgccaaattgcatttgcggccagcacgccgctcgatccctcgatcgtttagaccccttcattgactcagttttcctagtggtggacaatcggtccacccaatcaatatttttcggagcgccaccccaagcgttttccaatgatgcaaatcccatttactcggattttcaaagtaattttcgtgctctcaacaattgtcgccgtcacagattgttgttcgagccgaatcttacttctccgagagcatacgctgaaaattgtgcagcatcagcacagccacatgcacgagcatgcgcacgagctgcagcagcagatccaggagaccgcggttgagttgctcaatcgcctggagctgcagcgcaagcaactggaggcctcggcccaggaggaggcagaccagctgcatcccgatacggatcccaatccggactcgggcggccaactgccaaacgcagacgactccattgctgcggatccggaacaggatgggataattctcggatccagtaccgacacctggttggccagcgaaagcagcacaccaatcactgattccgagacagtgacaacacccgaaactgttacccacaccggagaaccgccacctgaccccagttcgtccagcacgcctgactccacgactcccagcccgaacgacaaggagacagagattcagatgctgccctgcagcgaagcttacaatactagcttttgcctgaacggcggccactgcttccagcatccgatggtgaacaacacagtcttccattcctgcctctgcgttaacgactacgatggagagcggtgcgcctacaagagctggaatggtgactacatctattcgcctccaacagcgcagcggaaggtccgaatggcgcacatcgtcttctcctttcccgtactcctcatgctgtcgtcgctctacgttctcttcgcagccgttttcatgctccgcaatgtgccggattatcgccggaagcagcagcaactacacctgcataagcagcgcttttttgtcagatgctgagatttagaatttgatttggaaacaatttggtttcacctatataagcctcctctttgttggatggcaaattcttgttgaccatatttctttacgttgcgcagcgtaaaattaacgctttaatttattgaatacatttagtgtacttagtaggattttctatttagttgcaaaagacgcacaagttagtatttgcttttctttatcatttcttagtttcgtttgtttcgcttttgaagctttcgttggagcttttgtagtttgtttgtagtaacattttgttacgttaaattaaccattacgaaatataatgtaatcttagcgcttactccagttaccaggacaagtgattattttcgtaacactctgttacattgtgtatattgtaaagaaaaactattttggtagtgtattaaagaagaggattgggactcgactcg

SEQ ID NO: 31158 - protein, 295 aa, DROSOPHILA
MMQIPFTRIFKVIFVLSTIVAVTDCCSSRILLLREHTLKIVQHQHSHMHEHAHELQQQIQETAVELLNRLELQRKQLEASAQEEADQLHPDTDPNPDSGGQLPNADDSIAADPEQDGIILGSSTDTWLASESSTPITDSETVTTPETVTHTGEPPPDPSSSSTPDSTTPSPNDKETEIQMLPCSEAYNTSFCLNGGHCFQHPMVNNTVFHSCLCVNDYDGERCAYKSWNGDYIYSPPTAQRKVRMAHIVFSFPVLLMLSSLYVLFAAVFMLRNVPDYRRKQQQLHLHKQRFFVRC

SEQ ID NO: 31159 - DNA, 5268 bp, DROSOPHILA
tccgagtaaatgggatttgcatcattggaaaacgcttggggtggcgctccgaaaaatattgattgggtggaccgattgtccaccactaggaaaactgagtcaatgaaggggtctaaacgatcgagggatcgagcggcgtgctggccgcaaatgcaatttggcgtcgcaacagaagctgaaacatactacacacttgcatctccttgtggattttactgcaaaataaaaatagaacattttagcgcctccacattttctgtcgcacgaacgcacacacacgaaacaaaaaaaaaaggaaaagaaatagcattcaaaattggtgatccaaaagcttttcatagattatcttagacgtactggagctgctatatggcctgtagaaggcttcgacattataattattataatgactcgtgaatcattttatatatcaggcaagtaattaattagttaatctaaagagcagcaagcgcgggaagcgggctcttctctgctccactttgattttaggtcttgttgcgcgcacgtcggaaaagagactgaggaaaacagagccagagaaacagatggacctcatccctacattggcggcattggcatgcgccatgaatgaaatcgatcggtgagcggggagagcgaagagagcgcccccaaaagagatgcgattgcgaccgataatagtcgaagaatcatatggatatgctaagagctgcaaaaaaaaaccgccctttaacagttattcaatttgttaacggcacttttcactgcatacttctagggcactataaagatatattactctgtgaagatagctgataagacttaaaaatgtttacatgtttcgtacaaatatgcaattgtagcgattattatttatattgataaaacaatttaaaagtcttcagccagatattcaaaatttaaaaattaatgaccactcatctcatgatttcgtccaaaatatgataatcgttgataattaaaaacgcagtattcatttcttcggacattaatttagttaatttattgcttagatttatgcttaccaacgagtacaaggctctaattagatatcaactaatatcccagtagaatttgaactatgacgcggacttgataaaaaataaattcaaaacaatggcaactgcacattagatttgtggttctatcggagcaactcccaagtgactgtttccgaggaaatccaattcggaacacagactgatgacacggcctatgtcctgaggttggagacacaacggagcattggccgccgccggtggcaactgttccaaagtctcctgttgcagtttcgccgccaaggagcggcgcaccaatttctcaataaaagtgcgcagcacttgtccgagcatcgagagagccagtggctgggagacgccaggcggagattcctccggttccagtgtgatattaatgtccttgcacatttcctggaccagctgcaaggtcgaatccaagtgcttcggcggaggtagataaagtagttggcgatgattcaccatttggaaagatacatctgctgagtttgttaacctggacgcaagcggatgaggtttgtccacacccaacacatcgatgaactccttatcccgcatctgttgatcatgaccaagcagacgatcggattgcttggttatccaagcttccagccgattgcctgagctgagactgctataggccgacagttgcggttggggctcgccctttagttgcgcctgaacacgccgagccagttgctcctcatcgctcagtttttgttttctcttttcatgcacgacaggtaaaacatctttgagagctggcgtataaccatgaaccctggcgaacgccactatctcccgtaaactccagtagtgttcctttccactaatgtccaacttatgcagctcgtggtgctgcatcagacagcgacggagcatacgtgcgcgcaggtactcaaagcaacgttgttttagagcagtgtgattgtggaactcttcgagggttatacaagtgaatggatactccttttgctgatcaatcgacgcaagcgggaggcggctcagcaggaactccacagcactgcgcatatttcggaattgtgcacttctaaagatgtgctccagccttcggggtcgcgattgtatggtagtgtccacaattggaggtaacagcattggcttttcctccatctcgccgctcatgttggcgtacccatgatcgtgctgcatgcactgcagcatatgccatcgcgtttctgacggtggcttaagaagactcaattgtggtttcagcagggattgttgctttgcagcctgcttaagcttgcgctgcaagggatcgataatgtacagctttcctgctctctgaaacacaacattcttcttgccctggtgatggccattgggcacaggctttattggtggccgatccgacgaggattccttccacgctctctgcggagatgccggtggatagtgctttactggcgaaaactcctgccgctgcctttctggcaaggattcctgcctaggacttcggccgtttactggcagatagaccacagaaggcttcgaagcggtgacctgagccgcatttaaccgaagttgagtcctaggaggcgatgacggagtgggtggctgctttcttggactgtagtttaacttcaggggctctgaaaccaacacagttggttcaattttctcaatgtcgtcgctgagttcaattttgttgataccagcaaacagattgtcatcaagttcctccttattttgagtgattgaaatggtgcgcggtttgcatgactctccaggaaaggcgaaaaccgaaggctctaaaacattcggagcagccagaggtggagcaggaactgcagtctcctgttcatggggaggatgaggtttgccgcttttctgtttcgttatcgcctgttttgctctcagccatatttccacagtggtctctgcgcccatcgtgtgcagtccacacattgttttatccagcaccaccgtgtgcattagttgcacgggtttctgctgcaagtgctcttggaaaaatagctggatgcgcatcggaaactcgccccaaccatgtcggttaagctgaaacggagacctgtgcacgtccacgatgtcgtttgggcggtatgacggatggaggtggaagcgcacctagaattgcgaagaagagattgaatcactccgtacgtgcttatgggaattacttacctttttaatgtatttttcaagtggttcaggtagatctttgccttgcacatagaccaaccacttataggtcaaagcattcccacctgtgccattctctcgagagtcttcgccaatgtatttggaagtattacccaccacgaagttgaatttgttcttgttattcagccgcgaggcattcagctccacttgcctttcgtgggcctgtcggctggtgcacggctgctcgtcctccaacttaacggaaatgggaggttcctgctctggctgatcttttttgtccttggagtgatcggttacgatgccctgctccttgatcttctgttgccgccttcgttccgcccgacgatgagccggattcctcagtcggatggtttctttggccaaggtggccgccgtgcgctctggcaaatgattttggatgacaacagggcgcttgccaacgatttttttaatggctggatgcagtggcagctgcggagcggctatgtcgtccccaaaaaggctgtcgccgcgcactttcgcaatatccgcgccggtgagggggacctgctgctttcggtaatattcgctgaccacctgatagcgtagtctgtccaacagttgtcgtccttgcagcagtcgtcggtcgatctcggccagctgctcgaccttctgagagatttcgcgctggaactccagacgaagcagctcccggatgcgctgaaatttgtcggacaacggcagcatgccatccgactgttccgtcttggtccactttctttgaccgggcgactcggcttctgcgcaggtttcttcctcatcctggctagaaacttccgtttgctgataatctggatcgtggtactcgctgtgcctgcgtttttttggcggcgtcgcttgttgctggtccatgtgcgtggtagctggcacacgcacaggacttgtatcacgttagttcggaggggaacagcttcaagtttggcccgaatcgctccgtgcacatttaggccggggtaattggctgttatttataaaaatgtgtaaacaattgatgcgaacgaggcggcgcaaacagaattgagtgggggagttgccacatcgctggtgtagatgcgtgcacgctggccttgtccaacactgttcagccagctgtttactctttacgcgggaagcaaagacgccgaaatctagacggaaaatcaaaagtgcccaccaagtaaaagcagataagcagcagcaaaatggtcgagcgcatcgaggatcttaacctgccgaatgccgtgattggccggctcatcaaggaagcactgccggagtcagctagtgtcagcaaggaagcgcgagcagcgatcgcccgagcggcatctgtgtttgccatcttcgtgacatcctcgtcgacggcgttggcccacaagcagaaccacaagaccatcacggccaaggatattctacagaccctcaccgagctagacttcgaaagcttcgtgccctctctgacgcaggatctcgaggtctatcgtaaagtggtcaaggagaaaaaggagagcaaggccagcaagaaggattccaacactgccgaaaatgccaacgccagtgccaccgcaacagcagaggaagcccccgagtgattacgaataggagaaactatacggatcaattatcctcttcagtcattaagaacaaagctagtattgagcattaacaaaaaacattaaacataggcattatctaagaacttcacttgtgttttgtcactttcctcaaagactaaattatgttgttagtcaacgtttacatgggattaatttgggattgtaagtgacggttggaattacacccttaaataatgccgcatttcaatccagtccgatctagttttttacgccttcattcaaagtatataaaggtgtcagaataatatttaagtatttcagtaattatttgtttatatatgtgatcagaaaatcactgttttaaaaatcatccagatagataaccgcgtgttctttccagcactggaaacagctgtttaaaaaagcgcgtcttatcgcaacaaaaagtt

SEQ ID NO: 31160 - DNA, 3211 bp, DROSOPHILA
ctcgttcgcatcaattgtttacacatttttataaataacagccaattaccccggcctaaatgtgcacggagcgattcgggccaaacttgaagctgttcccctccgaactaacgtgatacaagtcctgtgcgtgtgccagctaccacgcacatggaccagcaacaagcgacgccgccaaaaaaacgcaggcacagcgagtaccacgatccagattatcagcaaacggaagtttctagccaggatgaggaagaaacctgcgcagaagccgagtcgcccggtcaaagaaagtggaccaagacggaacagtcggatggcatgctgccgttgtccgacaaatttcagcgcatccgggagctgcttcgtctggagttccagcgcgaaatctctcagaaggtcgagcagctggccgagatcgaccgacgactgctgcaaggacgacaactgttggacagactacgctatcaggtggtcagcgaatattaccgaaagcagcaggtccccctcaccggcgcggatattgcgaaagtgcgcggcgacagcctttttggggacgacatagccgctccgcagctgccactgcatccagccattaaaaaaatcgttggcaagcgccctgttgtcatccaaaatcatttgccagagcgcacggcggccaccttggccaaagaaaccatccgactgaggaatccggctcatcgtcgggcggaacgaaggcggcaacagaagatcaaggagcagggcatcgtaaccgatcactccaaggacaaaaaagatcagccagagcaggaacctcccatttccgttaagttggaggacgagcagccgtgcaccagccgacaggcccacgaaaggcaagtggagctgaatgcctcgcggctgaataacaagaacaaattcaacttcgtggtgggtaatacttccaaatacattggcgaagactctcgagagaatggcacaggtgggaatgctttgacctataagtggttggtctatgtgcaaggcaaagatctacctgaaccacttgaaaaatacattaaaaaggtgcgcttccacctccatccgtcataccgcccaaacgacatcgtggacgtgcacaggtctccgtttcagcttaaccgacatggttggggcgagtttccgatgcgcatccagctatttttccaagagcacttgcagcagaaacccgtgcaactaatgcacacggtggtgctggataaaacaatgtgtggactgcacacgatgggcgcagagaccactgtggaaatatggctgagagcaaaacaggcgataacgaaacagaaaagcggcaaacctcatcctccccatgaacaggagactgcagttcctgctccacctctggctgctccgaatgttttagagccttcggttttcgcctttcctggagagtcatgcaaaccgcgcaccatttcaatcactcaaaataaggaggaacttgatgacaatctgtttgctggtatcaacaaaattgaactcagcgacgacattgagaaaattgaaccaactgtgttggtttcagagcccctgaagttaaactacagtccaagaaagcagccacccactccgtcatcgcctcctaggactcaacttcggttaaatgcggctcaggtcaccgcttcgaagccttctgtggtctatctgccagtaaacggccgaagtcctaggcaggaatccttgccagaaaggcagcggcaggagttttcgccagtaaagcactatccaccggcatctccgcagagagcgtggaaggaatcctcgtcggatcggccaccaataaagcctgtgcccaatggccatcaccagggcaagaagaatgttgtgtttcagagagcaggaaagctgtacattatcgatcccttgcagcgcaagcttaagcaggctgcaaagcaacaatccctgctgaaaccacaattgagtcttcttaagccaccgtcagaaacgcgatggcatatgctgcagtgcatgcagcacgatcatgggtacgccaacatgagcggcgagatggaggaaaagccaatgctgttacctccaattgtggacactaccatacaatcgcgaccccgaaggctggagcacatctttagaagtgcacaattccgaaatatgcgcagtgctgtggagttcctgctgagccgcctcccgcttgcgtcgattgatcagcaaaaggagtatccattcacttgtataaccctcgaagagttccacaatcacactgctctaaaacaacgttgctttgagtacctgcgcgcacgtatgctccgtcgctgtctgatgcagcaccacgagctgcataagttggacattagtggaaaggaacactactggagtttacgggagatagtggcgttcgccagggttcatggttatacgccagctctcaaagatgttttacctgtcgtgcatgaaaagagaaaacaaaaactgagcgatgaggagcaactggctcggcgtgttcaggcgcaactaaagggcgagccccaaccgcaactgtcggcctatagcagtctcagctcaggcaatcggctggaagcttggataaccaagcaatccgatcgtctgcttggtcatgatcaacagatgcgggataaggagttcatcgatgtgttgggtgtggacaaacctcatccgcttgcgtccaggttaacaaactcagcagatgtatctttccaaatggtgaatcatcgccaactactttatctacctccgccgaagcacttggattcgaccttgcagctggtccaggaaatgtgcaaggacattaatatcacactggaaccggaggaatctccgcctggcgtctcccagccactggctctctcgatgctcggacaagtgctgcgcacttttattgagaaattggtgcgccgctccttggcggcgaaactgcaacaggagactttggaacagttgccaccggcggcggccaatgctccgttgtgtctccaacctcaggacataggccgtgtcatcagtctgtgttccgaattggatttcctcggaaacagtcacttgggagttgctccgatagaaccacaaatctaatgtgcagttgccattgttttgaatttattttttatcaagtccgcgtcatagttcaaattctactgggatattagttgatatctaattagagccttgtactcgttggtaagcataaatctaagcaataaattaactaaattaatgtccgaag

SEQ ID NO: 31161 - protein, 969 aa, DROSOPHILA
MDQQQATPPKKRRHSEYHDPDYQQTEVSSQDEEETCAEAESPGQRKWTKTEQSDGMLPLSDKFQRIRELLRLEFQREISQKVEQLAEIDRRLLQGRQLLDRLRYQVVSEYYRKQQVPLTGADIAKVRGDSLFGDDIAAPQLPLHPAIKKIVGKRPVVIQNHLPERTAATLAKETIRLRNPAHRRAERRRQQKIKEQGIVTDHSKDKKDQPEQEPPISVKLEDEQPCTSRQAHERQVELNASRLNNKNKFNFVVGNTSKYIGEDSRENGTGGNALTYKWLVYVQGKDLPEPLEKYIKKVRFHLHPSYRPNDIVDVHRSPFQLNRHGWGEFPMRIQLFFQEHLQQKPVQLMHTVVLDKTMCGLHTMGAETTVEIWLRAKQAITKQKSGKPHPPHEQETAVPAPPLAAPNVLEPSVFAFPGESCKPRTISITQNKEELDDNLFAGINKIELSDDIEKIEPTVLVSEPLKLNYSPRKQPPTPSSPPRTQLRLNAAQVTASKPSVVYLPVNGRSPRQESLPERQRQEFSPVKHYPPASPQRAWKESSSDRPPIKPVPNGHHQGKKNVVFQRAGKLYIIDPLQRKLKQAAKQQSLLKPQLSLLKPPSETRWHMLQCMQHDHGYANMSGEMEEKPMLLPPIVDTTIQSRPRRLEHIFRSAQFRNMRSAVEFLLSRLPLASIDQQKEYPFTCITLEEFHNHTALKQRCFEYLRARMLRRCLMQHHELHKLDISGKEHYWSLREIVAFARVHGYTPALKDVLPVVHEKRKQKLSDEEQLARRVQAQLKGEPQPQLSAYSSLSSGNRLEAWITKQSDRLLGHDQQMRDKEFIDVLGVDKPHPLASRLTNSADVSFQMVNHRQLLYLPPPKHLDSTLQLVQEMCKDINITLEPEESPPGVSQPLALSMLGQVLRTFIEKLVRRSLAAKLQQETLEQLPPAAANAPLCLQPQDIGRVISLCSELDFLGNSHLGVAPIEPQI

SEQ ID NO: 31162 - DNA, 5439 bp, DROSOPHILA
tgccgattctggagaaaaattttcaatttataaacgaacaattaatgatactttccagggaaaagcgggttcaggaaatgaaattccgaaacgaaatacaaagaacggaagaagaagtaatgtcaaaagtttccggcgaaagctgccatatggatcgcacagatttaaatgaagcatatctggaggcaaggagaaaaatttgggcagcctacattgccaaacaggacaagactcctacagagattctgttggcccaagtacggtataagaaacgaatggagcagctggccagaaaacgtgaggagcgcgagcagcgatgcctgcaggagcagcggcttcacaagaaaagaagatcacttagtgatctatttcgagctccaaggcgaacgaaccgcgagcgacaagccatcgaggacatcaagctggagggcaggaaatctaaatgctcgctaacgtcattttgttgccgacagtgtagcaggtgcggcttgatctggacacataagtgctccgaaggatccgacgatacttcagcagaacacatctgtcaaaatgtaaaaacaaggtaggtcttaggatttgaacaaattccttgggcaagtcttttttcgtggtggtacagaaatctccttccatcaaattctaaccaaaagtttttatgaattttgtagaaagcgatttttctaccaccaatgaaaatggaaattttgaatgtgtgaggtataacgaagatgaggaattcataataaatacaaccaaagctactatcaaagcaaatttttcaatgtagagaaaaatgtttgggtatacattcaaaaaatataacatgcgttttcttatgtatgtactttaacaactggacattgtgcttaaattgtagttatacaagtaaattctgtattcctctgtaaattaatgtatttaatcaggcacacttttctatcttactgctaagcaacaagttgattgtaaatggaaatgtatcagttgcagttgatatctagatgcccagacagtaaaggaaattgtctcggcatcccacgaaaacacgacgcaggtcctcaataaagcatgcactggaaaagacttgaccgggtagtttatccgaccactgaatctcgccatttctaaagtttatcagcatgacgcgtccatcggtggcggcgcaccaaaccaaaagaccgttcggctgcactgttagcaaagttggcgtggcatatatgggtgcacccacatcgaccttccagtgcagctcaagctcaacagatttgccacccggtccggttttgcatcgcaggcaatacaaatgttggtctatgcaaccaaaaatggcaaaggaatgtcccataaaagtcggtggggtcttgaccactagcgaagagaaaatgtttccttctgtgctgaaggtagccagctgaagattgaaattgttatgaccatgtttgcaattgggaacacaaaaagagtactcacaattttgccattgcccacatgacaggcatggactcgcccagccacttccgcgcttagaaaaatattggatacggattccaaaagaacaggtgtggagaatactggttctctaaatttctgcgtccactccactgagccatcggtaatggccacacgtgagtagctgccgtccaaagtgcagactatcagcgactgttccctcggcagctccaaaggactcgcaaagatcggtttttcaccgatccttaggcaccacagcacctcctgccgctcggctgacaagcaatagacattgtagtcatcggcatagctgcatactatgattcggcgaccatcggcggttagcatgggctgcgacttaattaagccaccaattccaacgcgaaatacaatgttaccggtttggggattgaaaccgtagagacatccatcgtagcagcccaccatggcaagctgctcggtgaggaacgtcaccttacactcgatacgttcgggaagtttcactacactgtattcgctgcccgtctggggattaagcgtccggaggattttcgaatgtgcgcccacgcaaatgaagcgtccctcgtattcggtcactggggagtctatgcacttctcgaagttgaccttccagtagatctgaagcttgaggaccggctgttcgatacgtttaataatcaagccactttggcaggctgagacaactaccgctgtctcaacattctttcgcttaatattgttggccaccaacttggctgtgtccaagaatcttagcactgtgcgcaacggaatgttctcatccagtagcatttcgaacaagtggcgttgctcatcatcgatgcacatttgtaaacctatctctcggcaaatggtgatggcatggaatgatgtgccacccgcctggcgaaaactcaaatcatagccacagggagcggcgtcatcaagtcgctgctttttcgaagcgctatcatcaggctcttccacacattctagcctatcgtgtagatagctctttaatatctgctgagctggttgtgcaaggggaatgcacattttaagaagctgttgcttgtctagcttgccgtgtacgttgcagggaaagtgttgcagatagacaaatctatctggctgctcggcaatcgataccttggaaagtatatcaaaggtttggacccgctgctgaactctagtcttcgactctagggttcgaatgcagcaaatgagtttctgcaaatcttcgagccataggcaagtagtcagttccgagctaggcagacatttttgaatttttctggtgattaaacctacatataaataaaaaattaattgtgcacaccttaaatggggaaacttacccaagctaatgcgattaccagctcgctttaccacatcgttcgatctctcactatagaacaatgtgccatcctgctgtcgtgttaccaaatctcctgtcgccctgaaacaaatacctgaatcgtcttgtgaagcattcgcctggtcatcaacttctgggatatagcaacgccgcttgacactacccagaaacagctctccttgctgtgaggtttcattgtcttcggattcaatccgcagaaccgtgtcctcttcgataggcgtgcccaaaggcacaggagattgtaatgactgaacgatgtgcagtaggctccaacaggatatttccgtgattccatatatgttgcatatgtgcttctgcatcaggacacttggatgcatccaagtaacaagctcgacattgctgggaaatggttcgccaccaaggagcagtactctaaaaacaatctaattgtcaatctcttataatagacctaaagacctaaaactatataaatcaaaaagcacctcaatgaactggacccgctgagcactcgatctttgatggaagatgcaccaaattgccgaaacagcgaaggagtcatctgcagaacagtgattcccggtgtggccaggttgtcggggaagagggcacttagcaccttgcttggcgagtccctcatggagtgacgactggtcagtaaagtagcaccattttgaagagctaggaagaactccaccacgaagggatcgaaggtaattggtgtgccaaggtaaatgatgtcggccatggagacgtttaacttttggcttgggggcatggtgatcagtatgggttttagtatattcattggatatttacctgagccccactatgttgggcgctatgcattcatagggcacatgtatgagctttggcttacccgtagtgcccgtcgtggagattgtgtagcacatattggctggtaacggctttttggattgtacagtctcatcagcggatttcaactttaccctgtatagcctacagtcctccttaaacaccaagatgctccccagaaatgtgaagtacaagggtgcaacggttaaatgtttgttggccacgaggtagtccactccggccgtgctcatctgtgagtatagatcctgtgacagcatcatcttatccgtgggaaaaaagtggcacttgttgttgaggatcctggatgattataatcgtgatttcatattatagcaatggtaaaacctatgtaaatccctacgccaaaatcataagagaagaggccggcgtgtgctccgtgactcgtagagcaattcctgcctcatctgggaccccgttctttcgcagaaaattcatcaaaacttgaatctcatctgcagcatcggcgtatgacacgatcgtgtccttggactccgtgcgccttatcaggaagggaacatctttaaacgctcggattctgttgatgttgtagagtttgtccggctgctccgcggttgattcaattaggtccatatctgatggaatcataggcaccaagtgcggaggggaatgactgtgtcctggtgccgaatctgccgccgtgttgtttttaagaacacaacatttaatcagtaaaaaaactaaattgtatggtcggcaatccacaacaacaatcgaaacagctgttcgtctgtggatgggatgaaaacgataggcatgtaccgcgcttttggcgggaaataataaaattcaaaaagtaagccaatccaccaagtattaaaactctgaaggcccacaaaattgaacaatctgttcagtgcaaaatgttttattaaataggtctcatttcattattcacatataaatcaatacaatatttgcataaagctaaacatccaacaaatgcgcttacttcgtttgtaaaatttatcttcctgtttttatctcgcttagtcgaaaaaagctctgggcatacacatgcatgtactggaggtaaaacagttaatattaatcgaaaattcacccatggagtgatattgtgtaacttaacactaggccaacggttttacgtccctcaagtaacggcattctgttgcctttgatttttctcatccatggataggcaaatcttgtggatcgattgtaaatttaaacccgaaacgtttgggtgtaacttttttataacctgagtttgatcgtaacctatccagtcctatgcctgcttctttgagctcaaggcttggccttctttgctcagctttgtgtactccgtctgcatgatggactggcattcgtcgatcagcagctgcacgtcctccctcttgtacttctcggtggacacctcgggtaggatgtggattagggcgtggccaggacggaatgtctttttctcgtcatccatgaatgagtacttcgatatgaccaccggctgaacggggctcttgccctgcagtgcgatgtggaatgagcccttcttgaagggcagcaacgagtccttggagttgcgcgttccctcagggaagagcagtagcttgcagttgcgctcctgtatcgccttcgcctccttttgcagagagttgatcgagtcggtcttgcgggagcggtcgatgtatagggtaccccagagccatgctccaatgccaaagaatgggatg

SEQ ID NO: 31163 - DNA, 3145 bp, DROSOPHILA
accatacaatttagtttttttactgattaaatgttgtgttcttaaaaacaacacggcggcagattcggcaccaggacacagtcattcccctccgcacttggtgcctatgattccatcagatatggacctaattgaatcaaccgcggagcagccggacaaactctacaacatcaacagaatccgagcgtttaaagatgttcccttcctgataaggcgcacggagtccaaggacacgatcgtgtcatacgccgatgctgcagatgagattcaagttttgatgaattttctgcgaaagaacggggtcccagatgaggcaggaattgctctacgagtcacggagcacacgccggcctcttctcttatgattttggcgatcctcaacaacaagtgccacttttttcccacggataagatgatgctgtcacaggatctatactcacagatgagcacggccggagtggactacctcgtggccaacaaacatttaaccgttgcacccttgtacttcacatttctggggagcatcttggtgtttaaggaggactgtaggctatacagggtaaagttgaaatccgctgatgagactgtacaatccaaaaagccgttaccagccaatatgtgctacacaatctccacgacgggcactacgggtaagccaaagctcatacatgtgccctatgaatgcatagcgcccaacatagtggggctcagccaaaagttaaacgtctccatggccgacatcatttaccttggcacaccaattaccttcgatcccttcgtggtggagttcttcctagctcttcaaaatggtgctactttactgaccagtcgtcactccatgagggactcgccaagcaaggtgctaagtgccctcttccccgacaacctggccacaccgggaatcactgttctgcagatgactccttcgctgtttcggcaatttggtgcatcttccatcaaagatcgagtgctcagcgggtccagttcattgagagtactgctccttggtggcgaaccatttcccagcaatgtcgagcttgttacttggatgcatccaagtgtcctgatgcagaagcacatatgcaacatatatggaatcacggaaatatcctgttggagcctactgcacatcgttcagtcattacaatctcctgtgcctttgggcacgcctatcgaagaggacacggttctgcggattgaatccgaagacaatgaaacctcacagcaaggagagctgtttctgggtagtgtcaagcggcgttgctatatcccagaagttgatgaccaggcgaatgcttcacaagacgattcaggtatttgtttcagggcgacaggagatttggtaacacgacagcaggatggcacattgttctatagtgagagatcgaacgatgtggtaaagcgagctggtaatcgcattagcttgggtttaatcaccagaaaaattcaaaaatgtctgcctagctcggaactgactacttgcctatggctcgaagatttgcagaaactcatttgctgcattcgaaccctagagtcgaagactagagttcagcagcgggtccaaacctttgatatactttccaaggtatcgattgccgagcagccagatagatttgtctatctgcaacactttccctgcaacgtacacggcaagctagacaagcaacagcttcttaaaatgtgcattccccttgcacaaccagctcagcagatattaaagagctatctacacgataggctagaatgtgtggaagagcctgatgatagcgcttcgaaaaagcagcgacttgatgacgccgctccctgtggctatgatttgagttttcgccaggcgggtggcacatcattccatgccatcaccatttgccgagagataggtttacaaatgtgcatcgatgatgagcaacgccacttgttcgaaatgctactggatgagaacattccgttgcgcacagtgctaagattcttggacacagccaagttggtggccaacaatattaagcgaaagaatgttgagacagcggtagttgtctcagcctgccaaagtggcttgattattaaacgtatcgaacagccggtcctcaagcttcagatctactggaaggtcaacttcgagaagtgcatagactccccagtgaccgaatacgagggacgcttcatttgcgtgggcgcacattcgaaaatcctccggacgcttaatccccagacgggcagcgaatacagtgtagtgaaacttcccgaacgtatcgagtgtaaggtgacgttcctcaccgagcagcttgccatggtgggctgctacgatggatgtctctacggtttcaatccccaaaccggtaacattgtatttcgcgttggaattggtggcttaattaagtcgcagcccatgctaaccgccgatggtcgccgaatcatagtatgcagctatgccgatgactacaatgtctattgcttgtcagccgagcggcaggaggtgctgtggtgcctaaggatcggtgaaaaaccgatctttgcgagtcctttggagctgccgagggaacagtcgctgatagtctgcactttggacggcagctactcacgtgtggccattaccgatggctcagtggagtggacgcagaaatttagagaaccagtattctccacacctgttcttttggaatccgtatccaatatttttctaagcgcggaagtggctgggcgagtccatgcctgtcatgtgggcaatggcaaaattctggctaccttcagcacagaaggaaacattttctcttcgctagtggtcaagaccccaccgacttttatgggacattcctttgccatttttggttgcatagaccaacatttgtattgcctgcgatgcaaaaccggaccgggtggcaaatctgttgagcttgagctgcactggaaggtcgatgtgggtgcacccatatatgccacgccaactttgctaacagtgcagccgaacggtcttttggtttggtgcgccgccaccgatggacgcgtcatgctgataaactttagaaatggcgagattcagtggtcggataaactacccggtcaagtcttttccagtgcatgctttattgaggacctgcgtcgtgttttcgtgggatgccgagacaatttcctttactgtctgggcatctag

SEQ ID NO: 31164 - protein, 1007 aa, DROSOPHILA
MDLIESTAEQPDKLYNINRIRAFKDVPFLIRRTESKDTIVSYADAADEIQVLMNFLRKNGVPDEAGIALRVTEHTPASSLMILAILNNKCHFFPTDKMMLSQDLYSQMSTAGVDYLVANKHLTVAPLYFTFLGSILVFKEDCRLYRVKLKSADETVQSKKPLPANMCYTISTTGTTGKPKLIHVPYECIAPNIVGLSQKLNVSMADIIYLGTPITFDPFVVEFFLALQNGATLLTSRHSMRDSPSKVLSALFPDNLATPGITVLQMTPSLFRQFGASSIKDRVLSGSSSLRVLLLGGEPFPSNVELVTWMHPSVLMQKHICNIYGITEISCWSLLHIVQSLQSPVPLGTPIEEDTVLRIESEDNETSQQGELFLGSVKRRCYIPEVDDQANASQDDSGICFRATGDLVTRQQDGTLFYSERSNDVVKRAGNRISLGLITRKIQKCLPSSELTTCLWLEDLQKLICCIRTLESKTRVQQRVQTFDILSKVSIAEQPDRFVYLQHFPCNVHGKLDKQQLLKMCIPLAQPAQQILKSYLHDRLECVEEPDDSASKKQRLDDAAPCGYDLSFRQAGGTSFHAITICREIGLQMCIDDEQRHLFEMLLDENIPLRTVLRFLDTAKLVANNIKRKNVETAVVVSACQSGLIIKRIEQPVLKLQIYWKVNFEKCIDSPVTEYEGRFICVGAHSKILRTLNPQTGSEYSVVKLPERIECKVTFLTEQLAMVGCYDGCLYGFNPQTGNIVFRVGIGGLIKSQPMLTADGRRIIVCSYADDYNVYCLSAERQEVLWCLRIGEKPIFASPLELPREQSLIVCTLDGSYSRVAITDGSVEWTQKFREPVFSTPVLLESVSNIFLSAEVAGRVHACHVGNGKILATFSTEGNIFSSLVVKTPPTFMGHSFAIFGCIDQHLYCLRCKTGPGGKSVELELHWKVDVGAPIYATPTLLTVQPNGLLVWCAATDGRVMLINFRNGEIQWSDKLPGQVFSSACFIEDLRRVFVGCRDNFLYCLGI

SEQ ID NO: 31165 - DNA, 3367 bp, DROSOPHILA
gagacgtttaacttttggcttgggggcatggtgatcagtatgggttttagtatattcattggatatttacctgagccccactatgttgggcgctatgcattcatagggcacatgtatgagctttggcttacccgtagtgcccgtcgtggagattgtgtagcacatattggctggtaacggctttttggattgtacagtctcatcagcggatttcaactttaccctgtatagcctacagtcctccttaaacaccaagatgctccccagaaatgtgaagtacaagggtgcaacggttaaatgtttgttggccacgaggtagtccactccggccgtgctcatctgtgagtatagatcctgtgacagcatcatcttatccgtgggaaaaaagtggcacttgttgttgaggatcctggatgattataatcgtgatttcatattatagcaatggtaaaacctatgtaaatccctacgccaaaatcataagagaagaggccggcgtgtgctccgtgactcgtagagcaattcctgcctcatctgggaccccgttctttcgcagaaaattcatcaaaacttgaatctcatctgcagcatcggcgtatgacacgatcgtgtccttggactccgtgcgccttatcaggaagggaacatctttaaacgctcggattctgttgatgttgtagagtttgtccggctgctccgcggttgattcaattaggtccatatctgatggaatcataggcaccaagtgcggaggggaatgactgtgtcctggtgccgaatctgccgccgtgttgtttttaagaacacaacatttaatcagtaaaaaaactaaattgtatggtcggcaatccacaacaacaatcgaaacagctgttcgtctgtggatgggatgaaaacgataggcatgtaccgcgcttttggcgggaaataataaaattcaaaaagtaagccaatccaccaagtattaaaactctgaaggcccacaaaattgaacaatctgttcagtgcaaaatgttttattaaataggtctcatttcattattcacatataaatcaatacaatatttgcataaagctaaacatccaacaaatgcgcttacttcgtttgtaaaatttatcttcctgtttttatctcgcttagtcgaaaaaagctctgggcatacacatgcatgtactggaggtaaaacagttaatattaatcgaaaattcacccatggagtgatattgtgtaacttaacactaggccaacggttttacgtccctcaagtaacggcattctgttgcctttgatttttctcatccatggataggcaaatcttgtggatcgattgtaaatttaaacccgaaacgtttgggtgtaacttttttataacctgagtttgatcgtaacctatccagtcctatgcctgcttctttgagctcaaggcttggccttctttgctcagctttgtgtactccgtctgcatgatggactggcattcgtcgatcagcagctgcacgtcctccctcttgtacttctcggtggacacctcgggtaggatgtggattagggcgtggccaggacggaatgtctttttctcgtcatccatgaatgagtacttcgatatgaccaccggctgaacggggctcttgccctgcagtgcgatgtggaatgagcccttcttgaagggcagcaacgagtccttggagttgcgcgttccctcagggaagagcagtagcttgcagttgcgctcctgtatcgccttcgcctccttttgcagagagttgatcgagtcggtcttgcgggagcggtcgatgtatagggtaccccagagccatgctccaatgccaaagaatgggatgtagagaacctccttcttggagacaactgttgctcttccgatcacaggccacaaataggccagaacgcaaagatcaacagcactttggtggttcattatcaccactgccccatggtccttacggacattctccagaccacgaacctccattgttatgcccaccaggcggcaaagctgccggaagcaccatgatggaaaactgtaagattaaaatattcgactcagtttggatacttggcgagagtgttatgtatttatacttacagcgcatttcgatagtctcgcggtcgcagaatcataaagggcacgcacagaaagactatcagaccagctccaaaaaatataaagaacatgcgcatctgatagggagccttggccgtggcgcttaggattaaagccaccacgcaggccagtccaataacttcgcatgtacaagccatttttgggagctacttaaccgcaaaggatcctttttctaaaataacaacaaagatttaaattaaatgggtactgataataatttcttaataatttatgatttaagctaggagaatatatttcgaaatcttgtgctttgtattgaacatttaatgcttgggtttctacaaacttaaagtgaaaatcaacattcgtgactaagctcatttaaatttatctccattattgaatttaagaaaggtctgcgattacttgactattacgagattgtttgaagtgcgccttactgtggcaattattttcaattttctctaatttgcatacagtttggatgggtcaataaattgtcatgtgatccttttttaaattctctacccctgttccacgatatcttttaaaactgaagacattgtagaactcgaagttgggttgattaaagttttatggcattataaattcatgagcgttatccctttggtaacaaacctttgaaagaccttaagaaggtcggcacacgtccgataccgccgatcggacaattaaaactgaggagccccctcacaggtgggtccgtttaaactgggaattgctcaagtcttatcagcgaagtgtccaattgcttttgtttggattaaggcagtgaactttgatatctcgctgatacatgttgttggaagccgaaacgatcgagtacgtttcttaatcagttcttggtaagaccatgacgaatagtgcatagattcgagagatcagaatagtaatcaactgttggctatactgattaagtggcgcacaaaggaggcatgtacttttgcctaaagattactgttgttctgggctatcgtagtctttttatagcgatagcactcaatcagattgatcaaaagattacacaaagtaataaaaaatagttatgctggagtgggaggaactactaagtatataaatgttaagaaaatattttttgtttctttttaatagaaattttttgtaagagagagagagttacagctcaaactttgacattcaggttaaagctcatctgtaattttatagggacatcattactccaacctcataaatcacat

SEQ ID NO: 31166 - DNA, 1302 bp, DROSOPHILA
aagaaattattatcagtacccatttaatttaaatctttgttgttattttagaaaaaggatcctttgcggttaagtagctcccaaaaatggcttgtacatgcgaagttattggactggcctgcgtggtggctttaatcctaagcgccacggccaaggctccctatcagatgcgcatgttctttatattttttggagctggtctgatagtctttctgtgcgtgccctttatgattctgcgaccgcgagactatcgaaatgcgctttttccatcatggtgcttccggcagctttgccgcctggtgggcataacaatggaggttcgtggtctggagaatgtccgtaaggaccatggggcagtggtgataatgaaccaccaaagtgctgttgatctttgcgttctggcctatttgtggcctgtgatcggaagagcaacagttgtctccaagaaggaggttctctacatcccattctttggcattggagcatggctctggggtaccctatacatcgaccgctcccgcaagaccgactcgatcaactctctgcaaaaggaggcgaaggcgatacaggagcgcaactgcaagctactgctcttccctgagggaacgcgcaactccaaggactcgttgctgcccttcaagaagggctcattccacatcgcactgcagggcaagagccccgttcagccggtggtcatatcgaagtactcattcatggatgacgagaaaaagacattccgtcctggccacgccctaatccacatcctacccgaggtgtccaccgagaagtacaagagggaggacgtgcagctgctgatcgacgaatgccagtccatcatgcagacggagtacacaaagctgagcaaagaaggccaagccttgagctcaaagaagcaggcataggactggataggttacgatcaaactcaggttataaaaaagttacacccaaacgtttcgggtttaaatttacaatcgatccacaagatttgcctatccatggatgagaaaaatcaaaggcaacagaatgccgttacttgagggacgtaaaaccgttggcctagtgttaagttacacaatatcactccatgggtgaattttcgattaatattaactgttttacctccagtacatgcatgtgtatgcccagagcttttttcgactaagcgagataaaaacaggaagataaattttacaaacgaagtaagcgcatttgttggatgtttagctttatgcaaatattgtattgatttatatgtgaataatgaaatgagacctatttaataaaacattttgcactgaa

SEQ ID NO: 31167 - protein, 271 aa, DROSOPHILA
MACTCEVIGLACVVALILSATAKAPYQMRMFFIFFGAGLIVFLCVPFMILRPRDYRNALFPSWCFRQLCRLVGITMEVRGLENVRKDHGAVVIMNHQSAVDLCVLAYLWPVIGRATVVSKKEVLYIPFFGIGAWLWGTLYIDRSRKTDSINSLQKEAKAIQERNCKLLLFPEGTRNSKDSLLPFKKGSFHIALQGKSPVQPVVISKYSFMDDEKKTFRPGHALIHILPEVSTEKYKREDVQLLIDECQSIMQTEYTKLSKEGQALSSKKQA

SEQ ID NO: 31168 - DNA, 56390 bp, DROSOPHILA
atggctgattataaaatattcatgcgacaagcggcaggcgatgagacgacagacttccatgcggaggctaatgacaggactcggtcggtcccaggacctccactgataaggcaatctaaggccaggaagcctgggggcgtgtccagagccgcccattttgccacagtatgtgcggtgcaaataaattacacctggaagagagatatacatatgtatgtgtagaagaaccgaaagggtcttcttctggctgattattgatttgctcgggtttctgcggtttttggggtggggaaaaggatggccagccaaccgattcgaacactccgtataaagccctcaattaagttttattttaatgcatttcatttgaacgtcttttaatgggatttttcgtgccctggcacgggcatattactcatttgccataaaccaaaaggtgaccacaacacgtagccgtcccagagccatatccaccccacattgagacccaagcccactcccaatctcgatcccgagtggatgaagagagagaaagagagagagaacgttaagtgttggctggccagaatcgacatgggtcgcttgggtgagatttaagctttaatgatgcatgaagcggcacaggatgtggctgcccagtcgtgggtaaaaggcaatgagcgcaaatgtgcaggagcgacaggacaggagatgggcttgcatattgagtggcatttaaatgcttgaaaatgcttcgctggccaaatgtgttttgggaggtgtttatgaagaggtcctccgccgaccacttttctactctacacgaacaccaacgaaagttgattgaatttgagtgcgggggggggggggcggaggttggactgaccagtgccaatgccgaccaccgatttaatggcaatggcctatcccgctaacactgttaacgctaaagctcttttaagcgtctctcttgtttcggccaaatattaatttgctctttttttctctcttctctttgcagatgaaccgtgctttacagctgaagccagctgaaaatgaaagtcgcagcggtaagtaatcacatgccatattcatttatgccccacacaaccagaacagaacagaacagactcactgccagaaaatcaatttgtgagtctccataggtgacccaaaacaaataattacgaaaaacttgacccgtcttcgttttgggggaaagtttttgtgccaaagcactcagccgagaagtgcagaggcagccaaagtttttgccgcacccccacacatctaagcattcgcctgctattttcaacacctacaacacacgtcagcaaaaattacgggcgcacttcgataaactgtcaaaactgtctgcaaaaatttgacatttcacaaaaaaaaaaaaaaaaaaaaaaaaaaaccagaacacagccgaacgaagcgaagcgaatctcgaaaaaatacttggaaaaggtagagaaaatggcaaaagcgtatagcaaaacaacgttgaactgtcaatggcagtcagccggggaaaagtggagcgggagcggcaacaggagcaggagcaggacacgctggccagggcgccatattgtttttactgggcccctcacacagttgtcgagcttcacgcttgtttgtgacagcccatcgacccaagtcccctcgatatagccctccaccctccccctgcagcgcacagcagaaaaagaatgataaagatttgcataatttacacagcacttcaactttgttttttgggtcagcccgtcgtggcccaagtagttgttgctttgataaacttattgacaggctcattatgcagcagcttcaaagtaatttcaatattcccacccgctgttggttagatccggatcaacggcccatcggcccatctgcccatcatccccgacgccatcccatgaaaaccgctcaatgaaaaggtacaatcgcacaaaagtatggtacacatttcgcaatcatcgcaggatgccccacgggctgaattggactaaaagtcagtgcactccgcaatcttttaagacattttgcagctggcagcgcttatcactgcaaagcagagaatgccagcgcccgaaaatgtccattgcacaaattgcttgtgcacacacaccagcgccaggacttcaacttcagcgcgagaggggtggagtcctggggaaggacacagccattgctcataacagtcgctgtcgctggtggctgtgtggcacaaaaaccttgacaaagttgatgtgtcaaatcagcagcgagcgcaggaccctcctccggatgacctttaaactttggcaaaggacatgaaagcactaatcgttacgttgctccctttattcatccgtttcttcttcggctgctgcttcgatttcgctttgctgccgctgcagagcgctctgctccttttggtcctttgctctcgctggcaacaatttaaacttttctaatccgctggggattgggaacttgaagcaactctcgactcagctcaactctgccaacttgccggcaatctgtccgcacaatggtggacctggtctataggactagagcttggacttcggcttcgccaaggaattggacgtacagcttccaagaagcaggcccaccaaaccatcagcgacgcaatcaagtcgacatttttgtttgttgctttgtttgccccatccttactcactctgttggccgagttggaacaaatttctaagaaattaaagcgctaaactttttgggccgctatcagcagagcacttggcaactcggcaccaagtcctgtgacttttgacttcgtttgtttgtgcctgtgtgtgtaaaaaggatctttggctttggctctttcggtttaggccaaaatgcaattagacaaggacaagtttaattgctggtctgccggctgctgcaagttttcacccgctgacatttgcattttgcagcctcacaaagatgcgtaatttatttaaactcaaatcaagcatgaaatgtgagtggtgagggttaggtatatgaatatatttattccagagttgacaagtgctgaaggaatactgattgaaaagggttgtatgcccccacgcaaatctcttgctcggcctgctaacttcatcaattttaacttactgaggcaggcattgttgacatgtctgggctttgaccaagccaaaccatttcttgccaatccgagaacgaaaccttaaatcccaagccaacaggacctcgagtacaatttgttgcctttgtctttcatctggtgtcctgtgtccttcgtcccgacaacgtttgtcgcatttgcaatctactgtgccatatctgagtctgatgactttcgtttcattggcacatacacacacacacacacacacaaacatgtccttgcttagttatttatcttgatattcccgcccacacacacacacacacacacacacttacacaccatgcttcatcattatcaaactcatattgtcgtctgccttttccctcccttttcttctccttccctacacgcgtaatttgtacttgtctaacacgtaatgatgtcacgtaaattgcatacgttcgcttgcgttctacgttgacgtgttacgtttgatattcctcggctgcaggacgagcgacttaaagtcaaattaatatcactcatacgacccgcaagcgaaaagaatctgcctttagctgggcaaacgaaacataaattgtgaaatccccgccatttccccatgccgaggcatgaactacgcacagatttatgtttctaactacgcattaatttccttacctttatccctgactccttgtcacacgtcagtaaatcagatgacgctccagccctcttccacctggggcacttcccgtctcgcctcatccatcatacttataaatattcatttcctcctgcggtacgggcggggtgattccaggggaatgattgcaaaagattaaaaatcaactccataaaaatttcctcacatccctcacctgatgataaatgacagtcgaaaattaaccaaaaaaaaaaaaaacccagtcttgaaaaggtagtaagaacattaatgttgagaacgatatgtgtagaccgcatgggtacgtcaacgtagaaactcccggcgaaagtaaactttttggagagctcattatagacaacgtctgatcaaattgaaaagcaatgagctatgaaacagaaacctcattccactacttttgctaataagcaggctgcgaaaagttttagggcgaaaactaataataataataataatacgcagtgttggccgctaccaatgcccgaccaaaaaaacttttctcatttcgtttgctgccattcactgtcccctctctcatacacaagcccccttttcttacgcctgattacgcatttgaattgtgttttcccacttttcccttgccaaagtgctccagcgaagagtatccttttgaccataaagtcgacggcacacactttctctacctgctggcggccttattagtctcaaacatttttatggcagcactcgcaatttgattagcgcaaataaagagcgacaaattcaattgaatttgtaatatagattgactgccaatgatgattggcttcagctgcgaccgcggatgccacttctttttgtctgtcccacatgcgtatgtacatatgtgtgtgttcgttttttttctgtggggtgcaaattaaaaggacggggatattcgccactaagccccaaataacaaagcctccgagcccagacaaaaggcataaataaagcccaggcagcatctacgcctaaaagcagacatcaatttctgcctctctgcgttattcttcctacttctcttctcctctcttctcgtctcgccacttcctttcgcttctcagtcggcggagctcaattctttaatcagcttaaattcacacgtaccaaaagcgacgcacagccattgattggaggcttaccctccccgaaaagtcctttccaggacttggttcctttttttttctttctgctcctgcggctgagactacgctgcttttatcaaagccagttcaaaggctcgtatgtgtatttaggcttttattgtttttgaccttttttcccgaagcagacgaaataaaaatcgatttttttcgcacacactttcgcactgacaactcacgcacaaaattcagtgacggaaaagcgaaagaaaaggaaaagccagctcaaataaaagtaaatcacaagcatcgctcttggcagcattcacaagttcaaataagcgataataagtatttatgggcggggcaagcagattcggtttcttatatatgtatatatacagttgtaaggcccagaacagcctgctaaatgcgttttaatgttttttaaacttttgccctgctctcgccaacgcttgcccttaaatatttaagtatacttttaggcgattcaaacggccgtatagtttccttttcattcccttcgatgctgcgcatcatttttcttcgttgcttgattttgtttttacgagcgactgaagcctgtcaattggctgaatgcctcgtaaaaatgccagaggcctacaaggaaacgtcccttttaagcaaccagaatacacaaaaaaaaaacacaacagggccaggaaaacgaaaagaaaacgatttgttatgttttcccagcgcagcgccaacaggaaacggaaaagcacacgaagaccattttgtctctttcgctctgttttgtttttagtttgttattttgtttccttggcccactgcttaggcctgccaaatgtcatcattagcgtttcaattgccattttagtccgtgacacttgaaacatttgcataaaataccaaaagtcaagtttgttgacgtagacatttttgatggcaggcttctgtgatgtttacctttggcagcagagtgaaaagcggctctcaagtaaccgaagtcaacatgctctactctaaaattgtagagtgtatacatttgaagaaaaaagacatcataaaatggggtttcccatggtaaaatcctttttaaaaggtaactaaaagaatgctggaggaagtaatttcagcaagagttcgaattagaaatactattgtagtacaccaaagagcttgagagtgttcttaagccatttactcgaatcttatgtcttctcccatccacaaccaatttatgagccatttcggcttattgaaaacgggttggcgtggcttagccgcgattaaggtcttttttggccttgcttcctttcagtcaggtgtaccccgctggacacagcacaaaagcatttctttttggccgatcttatcggtgcggcaattgtctgacgctttttgcccggggtctcggcttttggggtgtcttcatttttgttttggccaagggccaatgataagcgacacgcaaacgcgacactttcgtgtgatgatattgcggtgaagcgggggcagggaataaaaaggtgaaattgtggccgcaatcaatagacttagctgattgctagagccgcaaggggacggcggggcgtatgtgtaatataaaatgtaattatttcttatgcaatatgggcgcccggtgtggataagcatctggaacagcattttattgtcgcggagcaggggaaacggaagatggaggcgcattgtttttaattgtttgtcgtggcagagttgccaggcttctttttgcaacacagaaaatgcaatatagatcgtaatcttaattgcatttagagtgccccgcattgtaggttaataatcataaatgttatggtaatagttacgagtgttgggtcactccaaagggaagggcgctcggctgggggcgtggcaggcgctgtacattttagttattatcaagcgtttcagttacagtttgttgtggtcgcaaccatttagggatttaaaggccgataggagaaagtaaatagcagtaaatcaattgatatggcaatgttggtgcgaaaattattattgcttgaatattttactatatcctcaagtgaagtgatttttaagacttataaaatattaaaacgaggttaaagcagtcaagttctttgctttgctgcgcccaatacaatttttcatgtcctgcttcaaatcctgcagcagcttccttcttaaaagccttattcttccttactttagcgtgatctggagtgattgacctagctgtgggctatttctgtttatgggcaggggtgaaaaacaaacaagtcagctagcacaacatagcaggactaaggaatataagctgcacatactttaaatgcagtcgacgttgggagaagatggctccgagaatcctacggaatcgtgcacatgactttgaagcgactttgaggcaggcaacactggtgaaaggagaaagaagaaaggaaaaaggacaggcgcaggacacgtgaggaacattaatcttttctgcaccactgacaagtcaagacagtcgccgcttctagcagctatccctgcttaatgagctgtggctctctgactgggcattaaaaattatgaaaagacgggcaaaaaactgcttggcggcaaatgcatttaaaatgcaataataaaaatgataatggcattataatactaaacacagacatgcccagccacagagcagccttcgcatttagaaacaatgggcaacaggaaggcagcagagcgcatttgatggcagaaagtatgctacattacattacttgcagctcgttaatttttatagctgctgccttaatatgaaatgttgttagggcgacagaaggccacttacgccctaatattgatttcacctaaattaacacacgccgagaaaacttgtcgccagaataaaaacaaacaaaattcacccgaaaaacttattcctcccctgttgtggcgttcgtcccccgttgttatttttatgagacttttcatattattttactttttggctgcctcgactcttggctttaatgtgccaaaatttccacgcaaacaccccgccaccagctgtcagccaactggccaaaacatgtctttgctctccggcagccctcctccgacgtcttctattaacttatcaagatttgtaaagtatatgagccgagtacacgtatatataaatatatatgtatacatatgtaagtgtggtggggcaaggaacgcataaaactgctatctgtctcctttacacgtccccgtctgggaatggttcagagatatggccaaatggcgtgttggcaggccacaaggagctgcggccgataggagtcctgcggtcggttaatacattagagcagctacacaggatatggaaattattcgaggctacaacccacttccttgcactccgatcctctcgaacgtgtcacaaaaactatgcaacaatattcaccagtgactgcttttagccaagtctctcgtcactggtcaggagtaaatgcacttgcaactgcatcgccacagcacatcaatgacctgacagataaaggagctggacggaggactacatcgcccatgggctacacttcgagaaaaccgaaaactaatcttgaaatgatatgtatttggaagcaagatattggatgcgccgcgcacagattttatccattaaaatttctatcccgatatttccgataggggttttccttttttgaaatttaatttttctcgagtgcaatctctgttcagattcctgactgacgacccattgctctgctgttgttttcgtctagcgttgattctacgttagatgtgtgtgtttgctttgtttacgggatacgggatgcagttggttgtgtgggcgtgagtaggtttggcttctgctaactaactcgacggccggcaggacgcttaagccttcaataacaggagccagcagcaactaaactttttagcctttttgttatggcataggatcaggagagcgtagccgaaccagaagcgaaaaacaacaggcagccagaagaatttatatgataagcggaggacaggcaaagcgtttcggggtccgtcaacgtgaactccagggtcgtcgtggccctggtcccagtccgaatccgtccgaatccgtccatgtcctgtgagcctcagtgggagtctcctatcaacaagagagagagagcgagtgggaaaacacaaaatatgacagcagcaggaggccttttgttctcctcctcggcagacaaacaacatcaaaaataacaacaggcaacaacaactataagtccaatatgtacgctttaagcatagcatattagtttgttctaggggcggacttttttaggtgggagatggggttggcctttccgaaaagtgaaaaagaggattcccaaatagccagcacagtcctgagcctgatgtagtttgttgtgtgaagacaacaacaacggcaaatattgtttgtaaagccaaatgcatgcaggatctggccaagagaaggaggtggaacaggaggagtgggtggatgacgggtggtgccaggaggacagacaaaggcttcatcgtgcgggtcagcgagcttcgctgcatgacttgctgcactgcatagatggatggatggatggatagatggatggccggctgaatggatgacttgcccgccgcccccaacccttcaaatatagatagatatatagatggccgtatgactcggctatgttttgttgccggccacatttgcccccggcaaatattcctctatatatactcccattccctttccccgaaaacaacatgcgatttgttggggtaagtgcattgctaccgagtggattgccgagctttaagtttacttttgcatagcaaacaggcagaatgccgacgggcggttcgattagcccaccttatcagctcattgcgctcagatatttactgtgggtccaagcacccaggtcgacggaccaacctgaccaggcgaaaaagttatttgatgaatgcccatagttctttgctctatccccatctccctctctctctctctctctctctctctctctctctctctctctctctctctctctcgctccccctctattttctgcaccaacttcggctataactcgcaatttgtgccaagcaattatgagttttcttcaaaacagttttcatcttctgggcaggatataatgttgccaggaggagtctcggtcgtctgtgtgcattgtttttaatgttctctggcagggcaaatgtaatgcaatataaaacaaaaagagcgagaggcgaacaagaaaaaaaaaatgagcaaaaggcattaaaaggaaatgctcactttcaagttgtttgtctctctatctcgtttgcccctctgtgtgcgcacacaattgtcgagcagagtcctgcgtcctgcgccgagtcctgctcgaatcctcagtcgagtcctcattgccattcccattcccattctcgttccgttctatcttgtttgcctcaagttgcacattttcttgttgcactgtttgacgtaattataattgaagtgaagtcatgaacgagtttcagtttctgtctggctctgccgcttatgctctctttctgcctttccgaggccataatgagcatgttaacaggcagacaatggcactcaaatgcgagtgtggtctgagccataagctccatcataattttattacccttctgtgcagcgagggaccgtttgaatgtcgtttcaaagtcaaacgcatagtcgtccttatcgtactcccccatcaacggcgtcatcgtcgttgtcctgccaactttcaattaaactagctcacatatattttcaaagagcagcgaataaaatgtaattcttatggcgaaaatactgaatggtgccccttttaatacaccccatatccattaatcatttatttattaatggccaaactcatcttcactttcattcgattacgatttcgacattttccaggagcacaagcacatggatacatatatattttcattatcctagtaattttttaactatcagacaatgtgacgtcctcgtccttcgcagctcgctggcgttatccttcatctcgtcagggcattatcctgttcttgtaattaagaacatgcgcgtctcgctcgcttatttgatggactcccttctgcttccatctcctcaaatcactctctgactgactaaatggcaaatttcattacgttgatgagtttatagtgctgccagcttgtcttggctgggaatgatagctgctaccctcaatgttggcaacagttgcgttttataaccaccaagcgttttggctaattattatttggtatttagtttccaatgctccgaaccgagagcaaggacattcgattggccaagcagatgttacggctcgaaaattgtctccattatgaaacaaaactgaaaattggtctcgaatccattttaccatctcatcccacccacttacgaggcagtagtggcgcgtgaaggacatgtgggtgggttttggccgaaagtgacataaatatgcaagtaagctccttaaaacggctcctgctcgttggccagcgcgaagcgaactttgaaaacttattaaaattacagagcaagcaaacggaagggcacgaatggatatggatggcaagcaggactcggcaggactcacccagcttaagcccggtctacataagcaatgagcccccagtggaacagacgataaatttctgcccaagagttacgtctgccggcaataattgcaactgtattttaaaagaattatgcacgtgcaattaaataaagcgacagcgcttgagagtatgcaacggataatgcaataataacaacaataaatgccgcttctttggggtggaccagcagcacccaacagttttcctctgacagttattgttgtgtatttaactgtagcatgcaaattaactttcaatttccgagcccctccatccaccacccccctctctagcgaaccagagacaatcaaaactaatttgcataaatgttgccaaagcaaaaaacccgaaatagctacgagttttggccaacgaaccagtgaaactgaagttgctggcaggggtagacagacgagaatttgcgaaacaaaaagtctaaattaataagtttctggccaagagaatagggcaacaataaagaagagagtttcctctgagggggattcccctgaaataaattactgctagagatcttgccccgtcatctctcaaactgacagcagacgcagcaggcagtctgggcattctgggagcgagccggaaatgcagcctgtggacagcttctcctcttcgctttttcccattgtccgagccgaactgattccactttgtcccgactaggtccttcgtactgtccggtcctgtcctgccatgctgtcctcggatcagagtgcggcgtcaaaagacatcaataaaatggcgaccactggcggcggcactcgccggaatgcaaaaatacacaagctgctttaagctgctgctcgatgctggaatttaagaactgcattctggcatcctccggccagcgatgctactcgggtcacaaatgtccttggcaaagggcgaatatcgacagctatcatcataaatccgccactgcgccaccgcattcactacccgttctcaactctttcattcattttcaattttcgccggctggccatggcgcaaaaatttcacaactaattgaatatttaaaactgccaaaccgcaatttcaaatttattaccccaagggcggggcggtggtcagtgtgccattacctcacttttgtttcgtttcgtttcgtttcgagctggagctggtataaaatgtcacttaattgcaatttagtaaattgttttccatgttgtataacagcagcggcaacaagccgtcctgctggtgggcgtggcacacacgcactcacactcatacgcgcacaataacacatcgacatacaggcacacgtatattaaaaaccataaattttgcggtgatttatcttaatttaaatgttgcaacaatgcatcggagcagcagcgccggttgcttttgtttaaatataacaaagcaactaagagtatgcaacggtgcacatttttttcacatacacacacacacacacactcatgcatatagaacctgccaggatattggtgtaatgtagcgcatttcgtgtcgtctaccccggaacgtagatgtagatggagccgtagatgcgaccaaagaatgttgtagcttttgttatttgccgccatgctgtgtgcgaaaaatcaattaaaaattcatcaaataattaacaaaagcagcgctctgagtgccgtcgcactggggaaaattaacggggtggcgctggtgcaggggtaccagggccatcatggggttaaacaatagccgtcttcttcttctccctctggggagtgtttaactcggcctcaacggtgggtgggtggtgggtggtctggaattgggcggtaatgctgttgctgccgctgctgcatgtgtgcgacgcgcaaaacaaattaaattcaatttagtcagcagccgaggaggcgggatcaaaaggatggggcagcagaagcagcagcagcagcagcagcagcagcagcagcttctcctgcaagaaggtgcaattttgatggattgcttttgcctgcctgcctgttagtatgcctgcctcctgtcgagagcacaggagttgggcaggaccttgtttgttgcttagctgcaaactttgcctgcctgcgcatatgcctgtatgcgtgcctgtatgaacgccatttgcatatgtgtgtgcatatgtgtgtgtgtgtgccagttgaggccaagttaacgcagctgcatttaaagtttgtttgccaaatggccaggaggagcgggaatggcaggggccaggtacaagaaattaaaaactttcccccgcctaatgacattatgcattaaagcgtagcatacttccacacacacacacacacagagacatcattaaagcgctgaatagcactttgtctggaaaatcagtctgggttttccattaacccatatattcataattaattgtttgcctgagcagacttctaagtgaattttcgttcccttattaatggcccactacctcgggccgtctgctttggcccgaatggctaattaaacatacaaaatcagatcccgaccggaggcaacaatttttcttttaactcaagccacaccaaaaatcacaaatttccgttttttaatgaatggctcctggcaaacctggctcacctggcaaacagcagaacgaaagggcggcaattgtgtaaagggcttgggtcgcaacgataacacgtcgcaggctgaaaactgtgactcctgtgtgttttggttctggagttctggaaggcgaagcgccgtgacatgtcaggttttccaggcattcagtgattcagtgcacctcccccttggccatccaaaagtattcaacttcatttataacagaaataaaaaccctttttcggctccgctcttttggctttttgtaatttatacgcgcttaaaggcgtcatgttggcaacacctacacaaattccttccgccccacttttctcagctttttttgcataacgtcaacgtctgacaaatgtgccataagcagggggtttttttttttgtatggaaacgggaatccagggggtcgcaaacttttgcgtgtggtttttggtttggtttggtttggttcggtttgctgctgggcggcagcggttaaaaaagttgtggccaaataaatgggcaaatggcagaaaatgacaaatgaccgtcaatcatgacaggccagacgaaccaaaaagggggcttgtggcgttgggtgataacgctaagctctgtctggatggccaaaacacacctgctggtcaatgacagtcgaaagctcatcattggcttggctcggccaatttcctccaagctccttaattttttttttgtgtcctttgttttgggcgccatctaaatgagtgtttcgagttagataacttttgaccgaatcgaatttggctggacataatatatgggcacaattagttggctgaatgatataagttgagcgaacttcatgcataaagaactcaatattccaggggatttggtaatttttttctttgtttggcaaatgatggcatgttttcgcattttcaccatgccatttgcaagctcttaaagccggcaaaataaaaaggaccctctatgaaagggcggcaaacaaaatgaaagcgcggcaaatcactttttaaatttaatttgacactttcttttctctctgagctgcgagcatcaaagactacaaagtgtaaacttttcgcaaaagaaatttcattttcgttgcccaagggcttcgagagcctgggtgggtttcgtcgtttggtgggttggtcctggggttggggcatttaaattctgtcgcctcctttttggacgaaagttaaatgttttgtagttttcatttaagtgcaaagtttttctgcgctgcataaactttgcgttatttcacacgcaggtattatattgccaaagcagccgagcacaaaagcaaaatgcaataaacggcgcagaggaaggcaaaatgtttgcaatctcatattaaatggcatcaacaactttgtctccgcatttggcagagcgcaccgaaactttccgctgcttattatattcaataaaatattttacagtggcactttgggggataaccagtcgtccgcccgccatcacgaaaaactttcgaagctccagaaaaaatttgataagattttctgtccttggcggtgaattgtctattccgcctgcagccgcatctttttccatatctctagcttttggcggagattgcttaaattgcaaaactaaaattgtaaatttctagacggcgaacgaacggctttgtttactcagtgaagttcctcccggttttagtacaacattacgcatacgcagcgttggccgagcaaagcgcgccaatttatgaatgactcgtcgtgctgggtatactgcatgtaaagtgggtctaagtatctgccacttgcagccacttgccgccaaaatcaatttttcattttcacggcacaaactgcaatctccaggacgatcaatagacggttcctccatgtccttcaggtgcgtgtgagtgtaaagtcaacgttttcacgtttgacttgatttgaatgccagtgcatcgtttcccgctctgtgtcctccatttcgccggctgttccattcattgattcatttatttcggtaggcacttgtgcaccccgtgtgtgtgtgtgtgtgtgtttgtgtgtgcgcgctttcaatgacactttttttgccttgtcgccgaacgaacgaatagcgcggcatttgattgagtgccttttgcattggcaggcaacaaacttaatcaatttcagcgcctgtgtccaaacaaaaggcgtgcccaaaggctggaaaattgctcgcttctcgttctttcagtttcccgttctattgcatagttttccatgccggacggttggactgaatcaccatcgcctttcgtctgtctgccaacgtatctgtgtgtttgcccaacgcaaacgccataaaataattttgtttcaacacaaacgcacacgcatactacggagatagaggtatatttgcccagtgcaaatacgaaacacaaatgtatatatttaatttgagcaaataactatttttggcagcagacagacacagagggatggaacaccgtactcctttttagttgtttgcccacccggcagttgccgccgccgcatgcaaaatatttgaaataattagtgtaaaatatttgcatagaaattatttgttgacttgcggcggcggcggggatgcccaaaaattcttggccgccttaattgagacccgctgaggtgggtgaatgaaaagtcaggcagagtttgtgattcgtgattgcgccattaagagttggcagtgcggtgggtgaagccaatatttcagatgaaatcactcccgaaataaaatagctatatcaaaaagaaacagaacgagttgatgggttggaaaacaaatatgtggttatatagaatatatgttcgttcgcggtaattactgaaatggtgaatcaacaactattttttaacaatgtcattagattgcagtcgtttattaataatttcaaataaattttccatcttatttgggctaactgtgtttggtaagcctcaaagagaattatttaatactgggataattgatagcatcaagtttctggaaattaaatttcagacgctcgtactaatgtcgcaacctcgagtgtaggcagcatgactgtgacagtcagaccttttaattaaaaactacatattttgctttgcatttttaaggcctgcggcggagggtggagctaagggggggggggggggcggctgtggctaaggggcgtgttcacccacgcccacagcttgagctgggaaattttagcattttaattttaatttaatgtgggcgtggcatggcgtgcaacagtttctgctcctgcctcatcgtgtgtacacccttcctttatttcctttttttttttgttctttcatttcttcctcgctgcctgactgcattaagtcaaacgtaatccgcacatggccagccacaagcgggcaaaggagcacggagcacggagacaggacacaggactcggagctgtggacaaagcaaggatatctcaccctgggcagtgggtctcttcttactttttgactttgccggtttggttctggttctggttctggtgctggtgccggtgctgttggttttctggttgcggctcccatctaaacctcccaactggaggtcggtttgctacggttcgggtcgggttgggtcggttcagtttggtttggttttggctttcggtttgctttgactggttgcccagctgctgctggttgtgctgctcaactgggctttgccgaccgacgtttcattaagttatacaatttaacgccctttcagcagtcgcagcagttttatttacatttgctttgggtcaaattacacaaattctacgggtgttgtggcgacagaaagccatcgaccgaccatcgaacgacggcgtctgtgtctcattctcagtctggtctaggtcttcaaataaatttcgtacaaactgttcgcccaacgtctcttggtaatttaaaactttgctcctttgttttatcgccgaggcaaatattattgaactcggggaatctccaatgccactgtccttgtctctctaagcttggatttccttccgccctgacccaattagagtgctacctggtttcggctttgtccaggtcgtaggccaaaacttttgccaagcaaaagcagaagatactaaaccgaacctttggccaattttccatgctgccattatcaaattgaatttcgcatgcaaattgttttcggtcttctagaaagctttcaagttttatgacacggaaattggctcttgcaagtttctgctctatgcccaggatgctatggatgctgtgccttctctggtgtcctggcctattcccaatgccgcccactgatagagtgagcgtactgttactcacgtgcttttccccctgccctcccacattttgcctcattttccaccacttccagcacgtttttgcactttttaacctttgcctcgctagctgctggcatgccgcactaatttcaagcgcccaatgctaattatgatgtcttttacgtgccaacaaacgctcaagtgacttaccccagtcagtcagagggactgaagtcgcaggctccacttaaatatttattttactgtaaactcaacctaaaaaccgtagacgacgactgcgactacgactgcgactacgacgactgccaaaccccattcaaaattcaagtgggcgtgttctgatgacatgctgcctgcttaccttcggcacgtaatacgctggggattcgccagtattagccgggccgactggaacggctggctggcaggactcactggcacaggactcgcaggacttgcgcgaaagggcagagactccgtggcagaactccgaggcgacagagacagagggaaaaaacaatattaataacagagaaccagcccacagagcccaatctagagggccataataatacatcagctgtgccaatgcccccgcaaggggttgtgccgaagagcggcgaggacatcaggacatcgaggacatcatcccaaccaggcagctaatagtcctccattcccgcctcccggaatcgctgacgaacggatccaaccatccagcgaacgaacgaaagaagccaacgagcaacgcttcattgaaaagtttcagcgtaatggcttttgtttggcgtcgagtcgctgggggagaatggagaattgggttggagaatgggaatggggatggggtctttcttccatagcattaagtaattgattacatctcgagggacttttaagcaagccgaaccaacacgaaatggcacgacactataaacctcataaatttctataaaacttgactgctcggcgcaatactgtgtaaatattttctcttttttttttcgctaaacaaaggggtagagaaacagattggggcaggggatgcacaaccaatttgactagccgtcgacctttaccgtgttttaccataaacaataaccataatttaggttcccatcctcctcgaacctggcgttaatgtggttagcaaaaggcgagaagggtggaaagttcgcttaatggtctatctccaaaaaggaaactatggtagagaccctgtaatttcttcaattgaattatgctagaatgaccaggaaaagcaaattagttcgtgatatgataatattatatatataatttgattatttctacgaatgaaactattttcttacgtttaaatattgtttctagttatacatttaaatatatcacaaaatgcgtgttagatgaacgttgtggcctttgttatctactcgtccagctgtgtttttacctagatatttcaatgagttcatccgccaccgacctagtatcttgtatatcactcttttcttgcgctgctcacgtttcgttgtggactttaaattaaaaatacagcgagttttgtgctggttgtgcgggttctgccaaacgaaacaaataaaaacaacggaaagaagacaaacaaccccgcccatctggggcggttagccatttttatggcgcctaattgcacatcgctccctgagagaaaaaatggtgtggcgagatgggaggcatgggtggtccgcgagtataaggactcgtgggcggtggtaaaggactcgaccgggcctcggctgttataatcataaaattgcttttgtggcatacaaaccggttatattgctcccgtgtgatggtcctcctcctattgtccctcagctccagtgctcccgagtccgcttcttcattttctatacaaatgaaaaatgttgcggtttattttcatttggagtttttgccgagtccgcgcggtctaaacataatttgttgcattaatgttggccacatgcacaggaaaatgtaaccccaccaccatcatctcccccagcacctcacgcatgaacacacacacacacacacaacaaacgcacatagtttttgtttaatttcaatgtaaattgcttgagagggatgtaaagtgggtgggcgatgtgtgtgtgtgccctgctaattgcttggagcccttgagctagaaattttgcgcataattagtggcaaatgtgcatatggaaaatgtgtttggaaattgccccgaaacctgaacgggtcctgtgtatatatattttagatttataacgtgacatgggttcaactgcaggcggcagactactctctagaaaggacggtaacaatttcactttaatcaatgttaaactgccgccaaggagccattttcgtgcctccaaccctcgggcgcgttggaaaagttttcattatcattttttaaaagcaaacgcaaagcgcctgctgtcaaatttgcctgtcactccataaacctacattttaggacttgaaatgctaaatgccccataaaatatacaggccaaggcatgctaaccgcccgccaaggtgaatggacaaacataaaaatgagaaataataatgccattgacaaatacaaagccataaattataaatgcgaaatgcttacttatacacgaaatctacttttcctgccacagcagtaaaaataaaaaaaaaaatgaaaacctgacagcgagggtgggaaagccaagaaaaatggaaaactgaaaacgcaacagaaatacaaaccgcaacttgttataaaattagtaaaattttctcagcaaacatttacattaactagagacccacactcacacacacacagacacagaatacccttggagggcctccacctacttttcgtcctgttcccccttgcacctcaccccaacccaacctagcaaggacttcaaaagacccatagaagcgtaacaaggaataaggagaagaaaccaaagcagcagcagaagcagtttcaaaaataaataaaaagcataacgagacctgagcctggtcccaaaagtattaagagagcaaagcaattaaaatatgaaaatgtacaactttcatctttttgagctcattgcataaatcatttcgaatgcctgacagggcattgtggtgggtggcttgaggtgggtggtggcaggtgggtggtggttttcccgcccaccttctgacattcaaatttactgtgtcgcttttgctactaatcagcataagtccttgccaagcgcacaaatgctgcccagccaaaaaccgaacaaaaagtgatttatttcgaaattgccccatctttcctctcgtctcgctttacctgtagctacttttgtggcacgagggcagttgcagggtacacagatacacaggacacgcaggacgccccgcccactggctaacactggcaatataggacataattataagaattgcggccagggtctcaattgtaattataagtgggaaactaagccaaccaggggagccaccaacttgccattgatgtcagttgtccccgctaaatttgcgcaatgcccgcgaggctgtgtgcttaaaattttacatacaacaacgcgcacggaggggaatcccctttggaatccgcttggatgggagtactaagtacatggatgcgtgtggcgggtatgtctcttcatgtcgtcttcaattaaaagtttgtacaaattgccagcaatttgtgcgcgactcggttaattgcccaggccaactgctggaaaggtatcattagatttgatgggggtttcggtgttggaaaggtgttgttctcaaagttcggcaaagttttaaaaagccatacttatatttcaattttcatgtgcaggcaggcagtgcaaattaattgttatagaaataaatataatttcaagtccgttaaaattccaaaattgcccaaaatccagcttagactgactgacgagtgcacatgccgaatttacatatttcacctgatttcgttgtaaattctcaacttacatggtgtaacaaactaacgaacatgaaaatcaaaaatcaaatttgataccaaaataattgaagtataggcagcgttttgaacgatgcatatatgtatgaatattgcgtgtatatatttttataaataaatactgtgtacacatacatgtttcgggcgggggggagaatttgtcgagggttttgatccagccaaacgagatgtgcgtatataaacacaagtataaccaatcaaaaatccaattaaaattgaggaaaattcgatttgcatgtaaaatatggaaaaaaaaaaacgagacgagaaacgaaacgaaaagcgaagagagatctcgccccacacaaaagccgagggttgtggaggtgaaaacataaaaaatatttggtatatgtgaaattgaaaagcctgaaaaaagcgcagctcgacagcaagcgaactttgttagcaatggattgatgtgaatggggatctggtgccaaataaaaagtgggaaatacggcaaaaagcgggcaaaaatgcaaataataatataaaacaaattgtgttacctataaatgtgaggcagttgcaaatggtaagtgtggctatatagttggtatattcactcacgaattgatttgtctggaggagttgagtctttcaactttatggcgaacacaatttaataactttctttctctctctctcttttcaggtaagttccaagtcctatctagcagaagagttcagttctagccttaagctcgcagtaagtttgtgatctactaacaatattatttttaccagttttatatcctatgccaagaatattttcaacggagttcctaaaatcttcactctgcaacccaagaatttcttcttctctatgttaactatttttttttttttcgtattgtgtttgagatgcttttcaaatagggttagatccaatgcggcttagtttggctcatttgtgcatttgacactttccattgaattggccaaaaaagcaactaatttagcaaattattaagcacattacgtatagaggcctctgtcgatttaattagtttattatttgcgttactgtgtttgtgccgggtgagtgtgtgtatgtggtaaaattgcgaattattattattgtttagctgttgttaataactttggcgacgtcgatttctagcgcaactacaattttaattgcatatttttgtgcgccctttttacacacggagggctaagtgtatgtgtgtgtatgcattagagagtgtgtgtgtggtgcagagtgttaattaattttgtgcttgaatcgccgccagttgcatttgcaattgactgcaaagtgacccccagaccctctgaattaaggatcgctgcgtcgccgtttaattagttctcaatttccaattaaatattgctcttgcactaatgaaatttcactttttgtagccaacccccgctcttgcacgctgaaacccatgtaatttgtacaaaattaattagaaatgtcccctttttaccctacaatccctccactcatctcgtatcgaaatgaaggcgagcacgcaaaatcaaatcagagactgtcgctgaaagcgtggctaagaaaaataactcaaggtaaataaataattgaattcattaggcaaatgaaaaatcccgacacgaagaccgaagggatctaaaggatataaatagcatggcaagacggggaaaggaaaaaaggagtgagtggtccgcatattgacccaaatccgcaggacaacaagacagtcgcctgtcagagctgttaaaaacgtaaacacaaataaaatacattgtttacccacacaaagacacacatgacaccagtgtccaaaggacattacctgcgtcacgcccttctcgagttcagagttcgcctttacggctgctcattagtgacgaaaatcgaacaaccgagctaaaaactaacaacgaaaacaagttgcacacacatggagttttctatgaaaggatcctggattcaggatgacgacgatgtcgaaagaaggaggcgctgacaaaaatacgaaaaaataacaatgccagcgacaaggaagcaaacaatacggctaaaataatactgacagggacaggtagataaatatatatatatatatagaaaaacaggacgaatggggcataacaacaaccataataataatgaagcacatacacacacacacccgagcacatactcgttttcacattgtggccacattaaaggtgtgtgtgtgtgtgtggttagaagcttttcctcttagtccttccatatcgtcgggatttttcgttggtttcaggttaacaaaagcagagccagagggttgatggccggaaaaggcggcattattgattctagagcgtgtaatcattgagatgaaatgtcacagcggtcgcagctgcggatgtgaagactccgaatatgtatctcattaggttgcccgttgcccgcttgatggatgttatccaattatctagcataaatacagcaaatccccgacaagcactaagaatatttcgcacacacccacaaccgaaattgcaacgcagcccgaaacaaaacacaacagcagaatggagcagagaacagggagcttgggagctactacacgcttcattatgcagcaaattaggccccagttgggggaggtggtggggagggcagccagaaatgcctggcagccaggagcccgagatgatgaaacgaaattatgcattatgcatggaaaacatgcagtgccagcaggccagatcctgccagactctgccatgaccaggccccattacacgtcaagatgcgacgacgacaaacttacccacttctgtgtccttgcgccccgttgccccaactttattattaaatccgaaaacttaaatgccagccgagagagagagagagagagagagagaggggctgagctcagttctccggagtgcactcgtagcacacagtgagttattaacacgccttgccacatttgctgccgagctaatgtggcttggtttagtggctgcccccggccactgcaccacccacaagccacccacaaaagccacccaaacctgtctccatttcggggccatgctcctgtgcctgtcattatgctaaactaaacggctggcagtgctagaatttgcacccgcaatcaggttgcctcatgcttcatgccacctgcccatccgcccatctgcccacctacctacctgccacttgccacttgccacgcccccagccccagttgcacgtgcttttgccaggtataacggtaacatttccgttgcagcttccgctgctgcgagcgctttataattatttcgcctggcgggcctccagttgatggcatatgctgcctgttgcctggattgtcaggacatgtacgtgttgcacgctgcaagtgtgtgagttataagcttcattaagcatatgtacagcacgttgtaagctctcttcattggtgcaggtgtatgtgtgcgtgccgcaattaagcatatttagcataaggatttgtcatttacgctaagctcatatccagtggcagatagtttcaagcaaaaatagataattaaagcagaagcacttcagattacggatatccccattcaggcagcttaaagccactctctctctatggctgacatttctattaaaatccagccgcccatggtagcctcaaattgctttgacctttgaacaccagatgcgacgacgagtcctgcctcctggctcataactctccggcttggggagcgaaaaaattcttacacacgcacattaagtcacgttttcgcaccattaacccataaagaacgtagccattcggaggaggagtcgaccgagaaggcgacagtggaggagcagcacaagatttacaaatattgaactttttttctggtttttgttgctgctggctttcaagtcgtaaagcagtcacaagcatattttatagattttaatatgcgcgctacataacaaaaacgccctggtattgcctgacttttaaattcacgccgcaaaggaggccctattttcgggcaggttttccattcacccttgtcagacttccgcgttccgtttaatgactttttacgcatcgagttgtgtgccctctgacagagtgtcaacgtacttggggttttttcttcttcgcatgactgggggagtgagggtgtgtgcctggaaaaaaaaatgccagcttgataagggtttatcaatgcgacacagtaacttagtgatttactcgtgtgtgcgttgaatttcccttttttaattttggaaattgaaaaagtgacttttgcttttctgactttatatcccgaggtcttagggataccttatccctttttgctttaaatgtaattgaaaccggctttaggcagagctcaagttcgaaaatagcatttagatgcatagttgcatcaatgtatatccttcgttcgttttttttttttggcgaacagcaatttgctttaattgtcattaccattgattgcattcgcctacactccaatccagtatcttcctgcttccagccaacatttcaatctgccaacccacaaagttgccaaaaattgttgtggttcttcctgccagctttccgcacacagacacaccgaaaatattgtgggaaaaagcgcttttcatcttatgaaatcatttttggctttcaaggatttctgggctgtctctgtgaaagagtcagcagaggaaagatacaccttggcagtgctatttaaaataaataatacacacactctcgcagagtcagtcagtcgctcgctctcacatcgaaaaagcaaataaattggtttcgtaaccgcaaaagccaaacgaagaggggcagtcactttctcacatcaattcaattcaatcagacatcaagcatatacaattttcactcacaacacaagaattatacaatcaatggcttgccagcgagcagactttcaatgcctccaccaacgccgcccaagcccagacccaaactccatgggtcaccttaacccaagcccatcctttagtaccctgaatcctggtatctggctggaaaggaaataaaatgcggcaggcacgttgcaacactattacttatttcacagacaggcaggcgcagacgacaaggacgacgtctgactgaaatgaactacgtttgtttgtgattgtgcggctgtgtgcaggtggaagccaggtgtcctgcgccgggcagggcaaaaggggagttggcagtctaaaaatgcaataatctttcagcgccgtcgtcgtcagcgtttaaacgtgacttttaagcatgatgttgtaatattttaacttgactaagaaaaggcaaaagggtgagtgagcgggggattggctgctccattgtgtgcggctgcgaaattgttacaaatgcccccagcgtgcattttatggccagtgcgataaataaaatgttgcaacaaacagggcacacacatacatgtacacaccgactcacacacatggagagggccagaaatatatgtgcaaataatatggggatagcgttggcaggccaaggtacgaatagtccttcctgctgctcctagctgccaggcagtcagacaaacaataacataaatttcgttagctattttattttttttacccctcctcggtatttgtgtgtgtttgcctgggccaagtaattgtgcaatatgttttagaggctggcaggagggaaagagagccttgaccaggatgcggagttgcttactggtcgctaagtagttgaaagtcagtggagatctggtgccgcaaggattcgtctggctttaaaggaatgcccgagctggttaaatgtgcgttaaattgctaagcgttttgccaactttgtcggccattacaattaccgttggccgtttctcttggccaagctcttcatcatccaatgctgttttgttttcccccgtctatgcgtaattgtaattgcaagagctcggctcttcgccgagcccccaaggctcttcgcaaccctatctatctgtcttggtcgaaagcttagacaagtttgctgctaagccaacataagtcccgaaagcatttcatataccaaaacggaaaaggcaacaaactgcggaacttgtgttagtgtatttgtccgagtgattgtgtagcttagggtggaccttcgcagcggaagaacttaaagaaaaaccagtatcatctacaactatttctaagttctactagttgctctaaaagaatatagtttgtattcagtattaggttattactaaaattattcatgtattaacagggcgtatgagtaatattattttcctgatttggattggtaacagtaaatcgaataaggtccagcccactgtatctgtgtatgtgtggcttagtccgtttctgttgttttcgttgtggtgtttgtcttagttaaattccgaaaggcgtaacgggtaacgagcggggctcgggtgcattgagtgcggcttaagtgttcatcgactcaaccgcagcagaaactctgcttcgaacggaggtccttttgcgctccttctcgcatccgtgccagcccccccattcaaccacttccccgctgccccactgagctgtcaatagtctgagtctgctgcaagttcaattaattgcgcgcaacgaacaaacaaactaacagcaacaactacaaggaaaagcaaccacaaaaattaaattaaagtagagcgcacaccccctctatcattctgcctccctcaagcaatctacccctctctttccattccaccctttcgtgtaaatgagtgatgtgcatgaagagcgctaaaacacttttgtttgcctgtgtgagttgggtagtgtgtgtgtgtgtgtgggtgtatgtgcttggagctagatgaagacgtatggttattgtgatgactcttggaaaattgataaatattgcaaaacgcactaccacacacacatgccgaaggaggggtggaaaatataatttaattaaaatgttttatgtaagacatgtttattgaaccattttctcttaaaacttcccaaagcaatttgattgacgatcttgactcggttgttgctgcaatgtcctatttcccccacgttcgccctgcctctcaagttgttgattttatttgtttatttgtggcatcaactgctgtcaaggtgttgaagagtgtacgcctgaagtttgcattgatttgctactcggagattgttgttgtttcaggagttaactcaggcaatatatattcaattatggctgcttgaggtgaaacgagaagatgatggaggggtttgttttctcttatccgaggcgggcatctagttatattatgcacattgcttttaccatagtcttatttacaaaaatcccatgccaatcagacctttatagagtgttgtggttatcctttggctataggcctttatattttgctaacatctagattagagttacctttacaaatattacatatcgatatgtaaccaccaatatttccgtatctatacgcatatgccgtgtgttgttgtcgtctattttataatatttcctagattctttattaaaagcgaataatatttctatcaaaaaagtatttattaaaaattcaaacatatcaaactttgatgctcttaaatatcagaccatatgtatccgtaaatatctgtactttaaaattgttttagctgatttttaatttttattctaaccctcaaactcgccaccccgtgcatatttatcttaattaaattgtctatttatttttccccgataaaattttatacctctgtgttgttgtttttcgatgttgtgcgtacagtttaccactgaaaataatggacacaattcagaaaagacttaaacgattatgctaaatgttgtgatatatctacttttatttgcgtacctcttcaggagacttggcgcaaaaattaaaatagcaattttgtattgttgtgccacgtaaacatttgttgtgcattgttttcgtgttgctctttttgcgtagtagacttacaaaaaacattacaagaaaaaataatccaattaattaacaatgtgcaacaacatttacaaagtaaatattttaccacaagtaaaaataaaaacagcaaacgttcaatcagaaaacccaaacaacaacagagattataaaactttatttattcttacttttctctttcttttttctgctcttctctttttttgcaaaaaaaaaaactttgaaaacaaccaaatccgaatacccaaaaatctctacacgaatttagctatcggcctgagaagcatcgaaacgaaggcgttcaactaaagacgacgttcacaatggaaaacacttggaaaatccatccgagcccaattaccaaataactcgacgattgcgtaaatgcaagaggagagcccacagcaaacgtccataaaaagtagttctaaaatcaatgcttttaaggcatcaaagtttgttaatgtaaacagtttcattaggccgtgataagtaatcgtaatcgtaataagccgtgcctcaattagacagagctttaagccctctagttcaaaccgaaaccaagtgctgaactataatccaccacgactacagggatatccactgaaattaaaataaatgtaggaaaattaaagtaattaaaaatactctgaaataccagcaataaatgaaagcacggtacatgagttactaatgcaaacatctaaagtctaaatcacaaagtaagcattaaatatttacataaagcctactcatacatataatttccataagaataaattcgagtaagaaaaaacatatacgagcttagtcaaatttacggccgtgtcccttggccatttcaaaaatctccaacgaagttataaaatgggacagaccatataattataccagcgtatgtctagcgactataaactttaaattccgctttatcgtgagttgcccctattatacacacatatcttgtctatacatatatacgaaataaaaatcaaatctgtacagacataaacgacagccacaaagaggacattttccattttccctagccgggctcctttttttcgctgctctcctttttgcttctttaagtattttcacgtgaacggcggacacttttatgcgtttgaaatgaaaatgccatgtgccattaacattatccctgacgcgtcactacttaaaataaaaatttctatattttttacacatttatttatataaaaggagcgaagacgagagcaccttttggtcgtcgctcgccttttatagccaatttctggttacccacagtgtgcagccaatttcatgtcaagctgcagccgcagcaaaaccagcgcaaaatgataatcccggggtcataaaaaatttttactttatattgacttttagtgcgatagtcaagccagcggaaaaaagcggagacaaggtgcacatgaaatgttaatgtcttgtcaagattgccattccaagtggcgggctggtctctggatgcggatgctcaaggtgaagaagctcaaatttatcaccgcctgcaaaatggaatgcaaatgttttcggtaccgaaaagagaaaggcacgtttcaaaatcacggctaaaatacggctaatactggagctgttgatagttcaaaagaacatttaattaccattaaaattattccattcagcgtaagaagcaacccctttaaaattttaaagtgtgatttttgttggtgaaagcacaaatggcattcttgcagtcctttcttcgcttcactcagaaagtcagacaaaagtttatccctttcaatattaattaacacttcaataccacagccacgaggataaagtttccgtcttcttcctacttccgctccgtctgcctttgacttttggtcctggccaaacaaaaacttttgtgcctaaaaatgttactatgaaaatgtctggcactgcagccgcacacaaattcacgctgacactaattaacaattaggcgcattttggcggctcttaggcatttcgaattccaagaaactgaaacaacgccaagtttagctgttagctgacttaacttttgaactacttacaaggctaataactaatttacttctaactttggctaaggtctagagcctgctttcggcaggattttgtacaatttcaccagtttgtccccagcctatagtcgagttttacgcttattacgaaagaattttcagctgacaaataaactcgaaaagctcaaagtcggcggaaggaggcccaaaggaatcgcgacacaatgacaacaaaggcgaaaagagcagagaccatagagcatagagcctttcgccagctgagttatctctagtcatatttaaacgtcaagaaacgaggggagacttttgacaattgccacacaattgtcggggcgacgacaccaactgtttgccggcgacgaagccgcagctgagggactcataaagggagcatttagcttatttgctgtataaatactgacacctctgcagcagcagggatgactttcagagtctggtgccataaaactggcatgtcgacggcatcctgccgagcggcctgcaggcacacttgcccaggacgagaccggcacaattggcggcgatattgatggggcagcataacatttgccacatctgatcccagtgattgggcataaacatatggcgctcgaattgattgcacgcgtagtcatttacattttaatcaaaagcttttgaagaggactcgtttctcgttccttccgcatatgtatgcccatgcccctattttaatctgaaggatagtcaggaacatttttacattagccccgttacatgtcaaatgagtgtcactaattacatattaattagtttccttttaccagtcagtcactcacactccgaaaaaaaaggcacatcatcaatcaaaccgagtgaagggctctaataaaatctggaaaaatgcaaatgaaaaactattctaggcttgtgcactaagtgctgtttgctttaatcaaagtaaacatatagtatatttctaattaaattttcattacaagctgctaggaaaatcgggcatatcaacgtgaagagccagttgggcagcattaagtatacgatttggtgctcatttacccatttcctgcctaagtaattacaatttcaataatttatagcaaactaaacgtggtcagacgagatacaaacacataaatctcgtataaaggcagtgaatgggggttgatttcgttttcaatcagtttttggcaagcaaatattattccaaggaggcactcgcctttcacaaagttttgtaattataacgagatgcttgaaaatccccacaaaataattaataacttaaatatatttacataccgttttaagctattttgagtaatcagattaaagcattttgagatatgaattggtcgcattacggcaggatcctcatttgtagagctaagttgctgctaagaatgttggctaagctgtgaaaattaatggagtatttatttgtttgtttaatgatttattagctgcactgggatagtaaagggttcacaagattgagctgaaagtaatcccccatcaaagtcagctatttcgcagagaaatttcatcgtaattcgcacacctgattcaacacagacctatgcacttccgtctccacaggcaaatgtcttcaggtattcaaattgccccacctgtccactcatcttcgctggggagaagtagaactaatcctcagacgctcattagcagccattaaacgtcaatttacatgtcaattggcaacagtgcccagccagccagccattcaaaggaagccggtcggtacagtaaaaaaaaccggagaagggagttcagggacacatgagctttgagctttgactttcgctttgtcagcgactttgtgtttagttttttcctttatttatcctctggcgccgctgtctccacaattttttgtattattcatagacgcgactggctttttcacctttggccaggatttaaaatacaattactttgccctggaggacggggaaaacccggaaagatgcagctgggaactggaaagtggatggtggattaaggatgcaggatctgggttgggaagataagcaaaaacataacgtgcaacaattagtggcctgtccttgtcgtcttctcccgttggagcacatgtacaaaagttgccatgtggttagctaatttaatttggctttctttttgccgccgccggtgccgcacaccccctttcactttggttgcggcatcaaagacaacgacacgttaatgacttcttttcgccgggacagtcataaaaataaaatctaaaaactgccacacatggctagcaaaggcatcaggagaaacgagcacacaggaccgaggatccggaccaggagccacttaacttgtctatatgagcctaatggcctttaatattattttcactgctctttcctttagctcagagaccgaaaaaagaataaaaaaggaaagtaaaagcaaaagcaaaagcataagaggagaacagccaaaagggaatcactgaaagccctgtgtgcattttatcccctgccggtctgtgtcgttgtgccccaggtaattgtagaaaattgctgcaacgccaggctaaacattgtgcaaatccttttgtcctgcctgcctgccgctcaccacccaccacttctacttagctccaccgccccccccccctatttttttgcccttttttggccgcaactgttaacagccagttgaactatgccatttcatatgtacaacagcaggcgccgcaaagtatgctgcactatttttaccttgtcctgccctcggtttcaacgtgctttacatttttattaagccaacccttctactgcttccaacatccttttgcccttctcactgctgttgatgtcgttgttgttgtttagcatgccaggggcgttgtttggcttattgcacgtgcttgggccggcaaggatggtaaggagcaggaaggccagcgcaggacgaaacggaacccaaatgccattaggcttaacccggacacaagacaattgcctgcaggccatgtgcatgggtccaacgtgtcgtattagttattttctacttcgattgcttttgccactttaacgcgacagcagctggggcagctcggctgtctgtggcaagtgttttgccaattatgtgacgctcaattttcgatatgataccaagtgcgagtgcgagaccttggtgtccttggtgtccttggctggcctttcagattatacgaaaaatgtgaaaatacgaaattgagagggtggacagtcgtgcgacagctgccgtttgtgcgaccttatccatttaccagtagatattgattagattttagagaatctctcgctgatcaccaccatccaaggctcaccaccaccactactagtcgtatatacctagactctaagtacttttaagccatacatttcctcatgctcgcccgtaattttaccaactattttttcaagtagtggctagcgtgttcaattacctttcaatgtctatccttaactcagtagctctgtgcgtggccagcttgtaagtgtgtgcgagatggtttgcttgtgtgtgcgtgtgactgttaaatataaatatacatataaatatacatacttatatattacgtatatgaatagattattttaattctcgtaagagttgtaagctaaaccaaaaacaaattgtacgacaattttaactaaatatcacccatttttatcttcttttctttcctttttatgtaacacttgttcgtgctctatatcaaataaatatgattgaaacgaaaaaaaaaaatacatcaaaattggcaaaattggaaaactgacaattcttctcttatgattttcaaaaactgatttcacttttttgtgattttattcgtatgattttgatttgattcgattttttccatatccaaatttcttccttcttgatgcaacaatttcaacaaaaaattcgttccgcttataaatcgaaatttgtactccctcttcccacccaacaaaaaaccaaaaaaaaaaaaaaaatacctaaccacattaataaatgttgtaattgtatttgctctattggtgctcaaactatccacccaaacaccaacgatttctccttaactaaatgttgttgcttttactttcctttgggtattttgcgcctgttgaaattttaaaaaaattaccaaacaaaaaacaattacgtaaatgtgcctgctgcgttcgttactcgttacaaaaaaaaatgttgcgtaatgtgtaaccctgttgcatttacatctctttttaaacgacacaccaacacattatgatcgaggatatatattttttccgtattcatttttcggatttcaatatgatttgttgcgaattttctctggctatggcttcttgattgaaaacttatcattttcacacaccgaataccaaacacgattgaacactgccgctcacaatacaaaatacaaacacattgccacttgtccattttgccgtctcttttggtgcaacaatcaaattcgtaaatcaatcgtaatcaatcaaaatcaatcggatcgatcgaaccacatgacatatgaaacatgaacaaacccgaaaccaaaacagagcatttagatcgcaagctgttcgttggcatgctcagcaaacaacagaccgaagacgatgttagacaaatcttccatcccttcggcactatagaggagtgcaccatacttcgtgggccggacggtgctagcaaaggtgagtaccatccaaaatttctacctttatataatacctatctgcagctgtgttcgattcgaatttccccacctaagatactactgttcatatcaagtatacgtaacgtgttcggctcgctatctgttgtatttcccagttatatgattaatcttaagatcgttacttttttggctatagcttggttgtgtgtagacgtgcttgaagtattttagattaaagcacggccgttttggtatcgtatagagagttttcggataagatatgaaaaaattttaacataactaaggatattagagaagtagcttggcttccgaagtcaactaaaaggctgtcttaaagtaaaatgcttatatgcgtcgagttacttaaaatgtatgctattaggcatttttttatttctgacctattaacagaaatgatttctgttctatattaagtatacgtagcgtttttagtaaatgttttatcacattctcaagttaggtgtttcatctgaagacttgtttggttcttccatatttgacaataacgtagattgctttaaaatacctttataaatggtatgaagctgcaggaagcgttcctacctccgaattccccaaagaaagagtactgataaaattggcatccagtcaactgataatgtcctgttgaaaatgcgggcagctgtgcagcgagccaaataatcatcacaaacataaccataacaattacacaactttggggcgattgggggccttgaggtggcataaaataaaaatcgggtaaacagttcaattaaagttgtttgcttctggcagtgctgctcgtttcacacgctggccatttgcctttgtatgcggcatttgcaagtaaaaatacgcgctctctcacacactcacacacacacacacatgcagaaagcaaacaaatgggggaataaaaaaaataagagagagatagaggcggcattgggaagtttcgtttgttttaatatgcaagtaacttttttaacaataacattccattttattatgtcaaaagttttggttttacaaatacacatacacacgcatacacacaggcagacaaatacacaaatacattggcaaacactcggtccgtgagtgtaattgtgtctttgttatatatttttattttgcttacatttgcaacatttttgactgccgtcttttgttgtcctcgtgtgcgtgtgtatttccatgttaatgtttgttattgttgttcttttgttggcgtttattgttgccattttgatatgcatgaaaaggcagaggcggtggcgatagcggttgggaaggggggcgtggcacatcgggcatgtgacactttgcatagaaaaccaatgttgaggggtatttatttttgtttctgtttattttagtgtgtgtgtactcgtctgtttttccatttttctctaccttatttatattagtggttgagtctcctgagatttcaaaggcctccgcacaacgacagccatcaatttccaatcaaattgatgcctaaaaatttgcacaaatttggaatagctaaaatatttcacgcatatatttatttgccatgcggcatacagaaatgccattcgaagcgaaggcaaagcagcgacataactttgatacaaattttcatttttcttcgatttgtgtgctccagttcctttttgatatttttcagtttctgctgaaccggaaaacttgttgttgatgtcgtcgcccttcaacttcgacagcggctgcgtgcaaagccgcgaaaactgtcagtcgatgtggttaaattggggtctgttaggcggttgggggtgtggaaaattgcggcttctgcggctgcggcgatgccaacatatcattcttcattaaaatgcgcttcaaagtcagctcaactggagcagagtcagccgctccttttttttcggagtcgcaattggtgttaggaaagtgacaggcgctagcctgtgtaagtgccaaaatccatcaacgtcaatgtacccaatgctcccttcacttccttcacttttccgctgcgaattatatacaaagaaaatcgactgagaggtgggaaatatgtgctggtagcggggtaatgaggaatgaacattgactgactgggcgaactgcaaatgtatgcaaatgatgatgcatgtggcagcgaaatgcggtgacgccgaatccgagggcgaacaataataaaccctcctcctcatcatagtccttcggctcctgcgatgtctgtgcggctgacaggctacaggaataagcgcaaccatcatgttaaattatgcaaattcgatttcagtgagtgaatgaaatgaaacgaggtaaaggaaaggtttttctggccggggacttcggctgactttgaaacttttgcccagcacaaaatacaaagcatgtggtgtagcacttaacgaaaaaggatattacttgctagaaatcataataaactaccaaattgacttatcagctttctattgtataaaaacaatattttacgactatagcgtatccatatagagccaaatttaagattcaagtgaccattgtgttttagttccggatcaattatgttttgtatcctagcatttaggcaatttcttcatgtgtaaccatgtggtggaggcgaaaaattttacagctcgacaatggctggaacagaggcagaagccatgagaagccagggagctgggaagtgggaccaggagccagaacaggctggcggctcatttgattagaatattcatgcatgcacttcattgtcatcaaggctggcaggcagcaaagttgtcatctcgtcctaggtcttgtcatctgtgcaatcaacacaattgtgtgtctccgccgtctcactccgctgcaccggctgtccctctgtcccgctgctccattgtcctttgtcccgctccccgagcgccggtaatcagagctcccatgtgcttgtgtagatgagcagcaacgggtgtcgtctagtggcggagtcaaggattttgcataagtagccgcatgagtgtggagaactctagctcctgttgctgacagatggttggcataagttgactttgaatgggccaagttagcagggccagcaccacaccccattggcttaaagcgcttttggcctaatcactgcgactggaagctgtcattaagtaattgggtatggaggcaacaaatgcaatggcagggctgccttagcagtcaattaatttaaagaataaatacgcactctactcacccacatttcatatggctcctgcgcatcagagaccttaagtcaatcgatccactcaattgatggcattgtcaagttgtgctgccaaaaacataaattgaattaaaacgtcgtttagactcgaaattaattcgaaatgtctcgctttgtcaaattaacttttaattgccgcaaaagccaacaaagaggcctccgagtcgtcttgcagctgacacacaaaaacaaattccaattaatacgtatcacacaagcatacatcacacacacaaacacacatacataagtgcgcataaatttctgtgcggctgccacacacagacaagcgcacttgcgaggacacaacaatagcgcgccgtaaagtagacttcaaattttggccagcattgtcgtctatcatatcaaaagcggcgcaaaccccataaatgccaataattaatgtgacattttcggcgtaattgaggcaagaatgcagcatgcagcatgcagcaagcagcatacagtagtcgaagcaccaccgatggcctgtcacaaccacacaaccgagcaaatgtatctaggcatgcggggagtatctgaatcccagtgtgcctgcgtgtatttcaaagcattccccaaaactgcatggcatgccaagtggcaaactgctttcatttccccaccatccacgcttggctggctaattgaatttctgcacatagctctagcaaattctacgattgggtggaaggcgactcagtcccctttccctcaaaaaaaaaaaaaagacaaaaaagcagaacaagaaatcgagtgtgcaacaaaattgtgtcgcagcaagctcaggtgcatgcatcctcatgctccttgtcagctgctcaagtcgagtcttagtttaaagagcaaatttattgcctgcaaaaaaagttaagtagccttcacataattgctcagagaaaagttttaatacctcatccccctggctcacggggctttgcctcaaactttgcaatgacagtttaagttgtttttcaggctgttgctgctgcttttgctgctttggctgctccacttgttgtttggccaacaaatttttacactaaaaggaagagaaggaagcttccgccggttgtcaactctcacttgctcacactcgcattcacatccactttcacatccacatatatcaacgtggcagctccggcatcatcatttcatttcaatttcaatttatatgagcaaagttttatgaagtgcatgtcatgctgcctgtcgctttgctctgctcctgtttcacaacccaaccgcccacatcaacatatacgagtacgttccttcgcccactggcgcactgcatttattaaatttcatttcatttcagctctatactcatgtttattttacagcacactaaaaagttctaacaagtgctgattgagtacgctgcaaaaactgtcaaacaaacccgaacaaaagcccgaaccgaaccgcgcgcagcgttgtaaaactcaaattgaatttaacgcttatgacatgcgagagctttgctttatttgattatttataataatggttaaaactgtgatgagattttggtttttgtccgctcaaacgaagttgattggatcgaaagtgaactggcctttaaaggatagtgcggtttacatagctgtgtgtgctcttgtccaacggatagatgggatagtatgattagatgcctggcaaaagagctcatcctgttgtatcaactaatcttagatccaatttatttgaagttggcataattagagttccacatattccacccacacggctccaaggacccataaaacattccacttaatgcgccttaattaaaacaaaactctccctacccgccgtagtctataactatttattgcgtgccacaagaagcagcgtttatacaagcataagaaaaaatcggagtaataataataatgtaagttgtggcataagctcataagtgccatttaagccgcagtcatccttgttgctgttgccgccggcaggccaaaagtcctggattccaaggactgcaaaatggcacactggctatggaattaaaatacatatcaaaaacgaaacggggggtggtggccgaaacaaacgcgaacttttgcgtccttagaccaaaaaccgaaaccagaaaacccaacaaaactttgccgtcgtcgtagttgtatagtcgccatggccacaagtcttttgtgattcccgatccttgttcctcagcctgagcctctccggatccaaaaatgtatgtgtatgtgtgatgcagcttaaatttaattgcagcacggccaaagtttcatatgcaagtgggggcgagttgttcggctagcactccccagccaagtccaataaatttttatcacatacaactagaaaaggcgttccgctccttggtcctgcttaatgctaattaacatgcaacacgcccgaaactatgcagccaactcacacacatgcgaaggtcagggcaattaaacgtggccaaggagctggctaaaaccgagcaggaagtggctgaaatttgatgccgtcaagccgggccaacgagtcataaaagtaccacaaagtgccagcaacttatgccagacgccggtcagcttagaaggaacggaacaaaggatatggcataccctatccatgccaattttctaccagccaatgtttttatgaggaaatatcctatataacggttatatccttcttaatcgaagaacttattcgtatttgtttgagctaaagcaatccttaagctgcagaaactcatggattatcaataaccagacttggtaggcttttcaaaggaagatcacaattaaaaagaataatgcgctcaaaaccaacatttaaatcgtatagaaatttccagaataatttagaaaacattacattaaaatacagtcgaaacaatagctctatatctgcttgtctgccataatttcgctgattaattaagtatgtacatcctttattgagttagataaagtacaatattcgcattgtaaaattgccattattatgcctttgtaaatatcaatttataccattgataaggtaatgaaagcgatattgctcagaaagtatcatttctgaatattctattcaatattcagccctgtgccatacacacacacccagctccatatagccgcaatattgcctgcctcctgcaatttcgtttcattatgtggccatgttggtggcaagtgtgctttattaacacatttcgtggcccacccgcatacacacacacacacacacacacacacacacgcacatatacgtcagaacataacttttttaatacccatcgccattgccattggcgtcgccattgccagctggctagcaggactaacaggacgaacaggactgggccgggctggctttagttgtaatagtttaataaagtagtaaaagctgcggaaattagatttgaccgcaacacacgggcacaggagaccgttggagcccagacaaaactttgccgcaacccaggagagcaaaaaatgttgttgtacatgccgcacggagagaggaagcccgtggttggcgcttcttttggggttcctggattcttgtcaataaaaatgtcaaaaaagtttcggctaagcattaagcacaaagtttcgcccgagtggcaaaggaacgaggggaagttggtgaaaagggttgctcatagcatacttatataaggaggtggctgatgaggatgtatactggagattgggataaggatgtggatgtccttattaaaggcaagacgactcccagcggcagaggcagctggaccctcggcagcaaatttaattaactcagttgagcgcgcttggtcctatcaataaaagattagtcctatcacccatgaaatatgccactttagatatttgttctagttgtggaggattattgaaaaattaatgcaataaaggctatgtaggcaagagcttacttttgtttccgttcgccatatatggtgtatcgataaagatccgcattggttttctatttcccagctgccgtaggctttaacatttttaataagcacaccatatcgcagacaccactcagctcgaccctggaacttattaaatttccaacaaggagccagcctaatggctgctcctgctcctggtgctcctcctgctgctgctgctgctgctgctgccacctgtcagttgcacatattttgttattatcaggaggttataaggagtagaggcgcccaaccgtatgccacatacatattctgcagctcattttctagctcattgccggggccaagacatgagctaaattaatttattccgcttttgttgttagacaatatccttttcagcctcctggctcctcgccctccgtaactggaaacttggcaaggcagctccggagtcgagccgcgaaggcatttaatgaaaatggatacgtttaaggccgcctggataccagataccctggccgcctaacattttgctatcctttttcaaagctcccagggcacacaaaataataaaataatataaaaccgacactgggagctgagcctgttctgcttgcgggttgctaggatgcgtcaagtgtcgacaggatgcttgggggatatacgccctcaagtcctgaattcgaggaataggtagccataaaacatggtaacaattcagccagagagtcgagagaggtttcaaaatttgcctgtttagagtttcttaagttgaacttatccttcactctcacactgtctaggatttatcgtattttctgttttagagaagtttgccacgttttatccttacagcagagccaaaaattcaattaacgaatatttctaagaaattaaaattgatctgttaccgcagaatatgtaattattcaccgcataggctgctctatcaaaattcgaaatcctctgtatcgatgttaaccacaaaaagagacgagtatcaaattgacaggcaacaatgaataataatgaggacaagctgcagtgaaattcgaacacgtgtgatgggtctttatagatttttgcatattataatgaatgtattttccaccaccatctgggtagattggttaaccactttggcatatagcttggaagtcttactctctttaacattacaattcggataaattacattagataagacgaatttccttcaattatgtatattttttaagtgcaagctcaaggcgttcttaacccgtcccttctgcgattttccccatagctttttgctactgtttggtcggcactcaatcaaaaatcacatttccgtgtcggctgtttggcgcaaaaagcaaataacacatacacccacagatgaagcaaatgtaattaaaattcgatatacttgttttcacaaaacggcctgcagagagatcgtatgggaagtggaaagtggcattgggggaaaagtggtgaaaggagttaggcctcggttcgaccatatttcctatggcctggggcccatggaagtgggcgaaaaaagggggatgctggtgagttgcatacatatatcatcatcatcatcatcatcgtcgccagcatcgttgctggcaacagcatttggcaaaaatgttagcttcaatttaaatttttggtcagatttgcacgtactcagagcttcgctccgtgtgtttttgtaattacatatacacacgcacacaaccacacaattcatgcaaattgatgttgcttttagcaacgcagacactcggagaaaaatcgacttaaaataaactacacattccatttttcacatttcttaacataagttttttaagcctaaggagtagttggcttccttctcttattaagcctatttaaattaccaaatatttagaccacatttttaatctggctctaaaattgatctgctgagtgcacaattttggttggaaaaaaatcgagtggaagcagcattgaaaattttcggcagttgtctgcgctactttactggactgccccccacaacaatgaagatttataatgcccctttggcctctagctcacctaccgttgtcatggcgatgcctcgtggcccaaaagtactgtatgccataatagccatatattaaggttcagtggcgatttggcagcggtggccgacaacaagtgaggcgaaatatggaaaaacaaggcagtttatagctggtaattggaatcaggcaaaattcaagctcacgtaaatcagtcagatggatgtattgccactgcacggaataatattcaaagcatggttttaagctgatggcattgtataagttatgccaatcacataacaaaatatatgttttcgcccgactcaaattaaataagagccgcagagcagcaaggccacacccacagcctttgccactacaactaccactgcaaatcgcacactcgagcgcagagcgtaacaaaattcaatatcgcttttaattgcatgttgccggggcaacagcagcagcagcagcagcagcaacaagcgacagacattgtaagccccttgcaaactgaaccgtcaaacggttgatgggaatcgggggtgaaggaaaggaaggattcaggccacttatataagcctgaatgcctgggacgaacctgtaatttagcaaaatgttatgtaaactttaaatcgagttatgcattttaattggttgttgtacaattttgcaagcggcacgttttgtttgccacatcagagagcacgaatctgagcttccattatgcatacacagatacggaatatgaatttatatagacaagccatggttgccccctctcaaccatagcaacaattgaaaatgcaatgcttcacagatttttgcgtaatgcaattgaaaatcttgttcaatttgagcaatttacaatattattttagggaatttatgctccttttctttcctaagtttttccatacctaaaggcaagaagctggaactgaagtggctgttgtttcatgtttatggcctcaaggatgctgggacagagcaataagagaattccccagaaaatcccatttcttcaagcaatcccgaagctaaggcacttctggttacaacatttccggttaattaaataaatttcgaaccgcacacaaagccgcgagtgcgcgacttgcaagtgctgcaagtgcatcgcgctctggcggcagcttaatgttaatctaccctatggcttaattgctgccactgccactgccgcagcaaattgcacccaaaaggtaaggtcgaggtctgtcttagtctccgtatccgtctccgtcccggtcaccgtctcaatttcgagcgcagactccccgcagccttcgtccaggacgctaactcattttaatgatgccaggatacctggcttccatggggtcccaagtgcagttggtgtcttgcgtcttccgccagtttggacgcaacttcggggcaattatggccaacttgcctgtgcttacatgtggccaaattgttgtggctgtgtctacgtctcggtcgcattaaaaatgaataatggccgcgacttgggcgcaaaatttatgcactcactgtgtccagatggtaacctggcgtctggtctggtctggtctgggtttggcctgcgcccttttcaatcatgtccaaatccatgcaatcaaattcccgggcgcaatacaattagcttcttctccttgctgccccgctgagaaaacaaaaataaatttctagcatgcttttggacggcgcagtttattaggcttaacctacctgtccaggctaaacaggacctgggcttctgtacaccgaagtcctggcccctcgtcctgcccacgctttgatgtcctggataagcccggtaaaattgattttccctacctggccattcgtggctgtctttatttttatattcctacccgcccccgagccaagcaagcgagtcagcagcaataaagttcaaatgaagcgagtcgctattaagttatgcggctttatgcccagcgcccatttttcgaatttgtttcgtgttcttcggctaaataagtggacgcataaatcgccaaaggatacggcatgaaatgtagcggaataaatgctgaaaacaataaaggtgcaggacatcagctcacttgatgggcacaatagtttgctgcggcagagtggtcctgccagagattaaagctacccatatatatattttttttccttttcagctctgggaaaacctcggcgccccaaactgtgctgcggttttagttgcatttgactttgcggtttgacgttgttgcgttgccttgttgttttgtatgtttttatgtattttttgcccccgctccgttgccttttgcagcacacgcaacagctttttgttcacactttcgcctggcaaaacaatttccctcccaaatctggccagaaaagtggggtgatgagaggtgtggtgtgtggtgtgggggcagggaggggagtggcttttggcgtcgcctgccccgcatgcattgcggtttctgttgcataattattatgttgcggttactgtgccccttcctcctctgacttgatccttacagctcccgactccgatttctgccagcagtttcgtgttgctgttgctgttagcgttgcagaagcatttaccttgtttgtggttcgctgagcgctggcaacagtttttcaggacctgaaattactttggtttttcccatgcaatcggtggtgggggaaagggctttaaatctttgacggtgcagtttatttaggcggttaatggcacgtttttctctgattccccctttaaccaccatccacagccccatttataacgagtttaaagtggaatttgcgggcaatagtcaatgatttgatgctaaaagtaattgaattggaaacagcagagacagtggcttttagccatatgccccaagctatgccaacttctaggccacattccaccgatgttagagtgctcccttttgacatgggtctgtgcttggtatgctaagaatattcgactccttggaccttttggcaaagggaagggaaaaatagtaaataacagcaaatagcagaagggcaaagctgacaagacaggaagttgcagcaacaagaacagcaacatttttcggctgcgcccaacaaatgttacacaaaacgaagggcgcacggcgggaagggacgaagtgaatcctgactatttggcttgttctgcccaggatggcttcttcttcgtctgttggtgtcatttgttaaagaggcttgtcaacatgccttataacaagctggctcggacttcaggcccagagacccgctgtaaagtgtgtgtgggggggggggctttgttggggcgataccactgaaacgaagaagtttttggtccgaaagcaataatatttcagcttttgttataggttttcctcggctctctcgctttcggatcgtagctgctgctgtgtttgtggtgttgttcggttgtttgttgttcgcattttgtagaatacttttgtgcattatttgcacagcacttgtacaaaactagagacgaacgctttggcgctggcttttcaaattgccagagacatttgtttgcttgtgtgtgtacacaaaatattattttcttaattggtgtttattgtgtgtcaaacgcacacgcacacatacactcgcacactcacacggcgatagagcgagatggagcatactttcgagccaactctcgacggagctataaaaatgtcagcatttgcagaccctgcatccacatctcgattcactctcatctattaaatgttagccccaaatttgtgccctgttgaaatgtaattttcatttgacctttttgcttacattttctacgacttttacaagaaaaagtgaccgaatccagtgaaatgacagaaggatgcacgttgtccagtggcaaattgcttatgaaattgcaatttgagctcactcagggcactgatttttatttaatttggcctgcagtgccagtcccacatcacagacgaattcggttcggtaaaaaatatatcacattacacgtatggggagctactattttgcatacgagatttcgaccaagtccactgctccatgaattcgcatgtgaagtgagtccggcctcgaatgttatttactgaagttgcaaatccttaaaatgcctctggcctggcgggccgaaagttttgttgtttatcaactggcaaaaggtagtcgaaagttttctccaccacccccgactggccttttttttttttgggccaaaatcaagaataatggtcccattgggcattcagagtacgtgttggtgccagtattagagtgtgtgtcctgggatacactccaaaaagtctatatgatttgtatgcaaagtgctgggacctctcatgcctggcagagttcaatttcatccagttgggggactggtcaactggtcacagttgtgtgtttgtgttttgcagctcgtagttggccatattgataagttctgccagcgacagatttgattagacatgctggtcaaagtttttgggtatacgaacgccatgtcatgctcctcggactgtgcgccaatagtttgaaacgacattagctacctggccggacgtcatattttgcatttggatgagtttatttgatttcttctgccatctcccgaggtgcattcaactgtgagtgtcatgccgcaaatgcaatttgctacccagacccagttatcccccatatcacccatttcatatccaagccccagtgcactcactgccttgttttcccagccagttttccgagagaactaggagctcctgcacatgcatcaaacaaattcgatagccttgccatcgcataataagcgtaaacgttggctaacaagattcatgctacgcttttgcgcccaagaggcaaacatgcaatggccatcaacgaggacctgggaccatagaccaactccaccttaatgccatccatggcaatcccgccagcccagcccgccatgctaccatcctgccatccagtcatactaccaacaaatgactatgacgcgaccggtggccagcgaatgtcgcgcgcttaatgcaactttgttgctgatgctgatgctgatgcctgtccagctgccttggcagtcctttctctcccatcctggtcggcagcgattgaaaaatcccactagggcgtttttaattggattttaaaatacttgtcccatgcagcagtggcagtgcagccggcaacatcaggaggcatactggctggcctagcccggctataacatgagcctgcccctcccggcaacggcgaccgacaaggccaacatatcgaccaaaaccccatttgcagggggtttcaaatggagcgatgcagagagtggagaaggggtaggggcctcaacacgctcgttatccttgtttcctgctgtagctgctgcttcggcagtcctgatgtcctgctgccatcgctcctggccctgctgctactgctccacatgctgctccttctccggccgccgatgctttgcacaatttggttacgtgtttgaccggcggcgatttttcatggcaaggcagcattcgttttttttttttttttttttttttggtggtggctgtccagcactggggtttcccatacattaatgacattgcaaatttgtattgcaaatgtgcaagttgtggccgagcatgaagcttctctcccataaatttaatcgcatgtgtttccccgaaatctcgtgcaactcaattgtcgcagcaattccccttttttttgggggggaggggcgatgtcaaaggtttacccataagggtcaagcagatggaaaagtatggcataggttataggtggaccatgggacttcgcatcaagatgaagtgatatataagccaactgaaagctggtgattaaaacaaacttgtgcgtgaagaagcttaaagagacttgccgggatgaagacagacgacaacttttcctcactatgattttaatgacaacacaactttcgcattagcattagcatatttgattaaaaagtgtcattaggctcggctcctcggatcctgcagctgcgtcatttcacgcttcaccggaagttgcacaagacgctaaaaacttggcgcacttgctcacattttaatttcaactaattgccgagaatcaaggaatcatctccagcctgccttctcctggccgttaagtaattaaggcgttgcactttgttagctctttcaaggaatgaaaggaggtgatagagtgtgttgtcgtgcaacctgtcttgtcctgcactaattgttaaaagtgttgtccgttcactggatttatatgtagattcaatttcccatccctttccatccgacttctccacatcaaagcaaagtcgagcaactgcgatgaggtcggatttggacttggccatccgcagtctgactcacctctttcgctgactaatttgcttttaattaatataatgactccaagtttgacaattatccgtaatgttgagcgaccgcctgcaaagggtaaataatcaaatggttcccgagaaagtcaacttagataggagccaaacttcactcaaagacacacaattagccgactgacgaggaacccacactgtttgctcaagatgctaatgaatgtccaagtttggtagattgaaacttttccataaatacgaaatgagatatagaacttacgcacttgcgagcagccaagtgatgtaacaatggaaacatttataaagctttttctgatatctttctgggtctctcttgttagaggtgttcgaacattttaagtctgcagcccccgagcaaagtttgcctttcacaaaagttatgccaagaaaaatacatttcacatagagccaaaaaagtcatcccaaaatgtataacgaaaaaaaaaaaacaaacagatacaaaagaaacaaaaaaggacaccaaaatgtaaaaggaaaatcaactttgatttaagtttacaaaaatgcttagcaattgcctcttgtttttttaactttttacattctttttttgttccgttgttcccttatatttttcagctgtgtggattaactggcaacaaaatattttattttttattgcttagcagcgctgatttgcactcttgtgtcctgccattctacagctccccgaaatccccgctccaggtcgctcggttggaacgggaaaaattctggattttgttgtcacttcaacacacaaaacataaaatacacaagagtcgcgacgagttgggctgaacaaaaatccacttgaattttttacactttattttttgtacatttgcaacaaggcgaataaaagggaattttcccttatggccccctccatttttattttttgtttttttttttgtttctccattttggccgctgttgctcttcgcgttgtttgcacgcgaaatttgtgcttgtctgcctttcggcttgtcagctcgcatgttgcatggttttaggcgggatttgtttttccgcgcccctgccctcatcacaatcacgcccctttagaatagcgtcaactacaaaaggcaacagcaacagcaagagcccaagccgcaatttggacacccatcctgtccgaaccctcgacgcgctgagggttcgggaattagacatttcgcagggtttcctgaatttaccgaccgggaatgcccaacccccgaagggctttcccagctggagggtcttaattttcagcattgttgatgttttgcgtatagcacacaaacaacagatgaagagccgtagagcaagggttaagctaggccttaattaattccttggcggcggggttaaaaggtggatggggtgaatgcacacatacagattttttgaagatttaccaggcgccacagatatgccctaccattagtgtgagtgtattaaatattatttaaatttccataaactggcttaattaaatggaaattggatacatgtatgtatctaaaattgatattcagttggtttgtagttaacatatcagtttaatcaatgtgcaacaactaactataattgcatactgtctatgcgaacgcattaaggcactcttaattcgttctcaatttacaaatgtaaaacaatgcccgaagccatcgggcattaccacatttttaaatcgctttcaagcaccggcttacatgtggtataagcccctttttattccggccacactacgcacttttcgattccccgactgctgcatgtttttgcgcggtgtggaaggtccttactttttgtggttattactgtatattaaattagcataaatgatttttaataattatgccattgaagccgggcccttcaacagctcccattccctttccccaacagcagctggcacccacacaaattacaatataatgagcgagcaaagtgcagcggaatattttcttttttctctgtatatttttcggttcagtttgaattttacattttacattccatacccaggcagcacagcgcacagcacaggccgactattatttttatataatggtcgttggatgttcgctgatttcgcctccgatgtcgatgttgattttcatgcaagagtgcacgaggcgattcttgcaaaaatgttttttaattgcacttaaaattttatttaaatacacacacgcgcgagcatttcgatccaatggcagctgtagccacatctgacctcttcactcacgcgatttcgtatcggtatttatggaatgcttactgatttttaaattcaatattcaatgctgcgtaaatattcacaagtggcggagtgtcaagtggttgccataccaaagaaataagtccgatgtacaaaaataaataccctcgatggccattcaagcactattactaatcaacttttctgtattttatttgcaggctgcgctttcgtcaaatttggttcgcagcaggaggcccagtcagcaataaccaacctacacggaagtcaaactatgccggtaagtagaagactctaagtcacccgggggataagcaactttaaatgtattgtatattccacgccgttttcttaaaattagaaaattgtgtttttatgtcctggcgaggcatctcgctccttgatggcacttgtgtgcgaataatacgaaaataatgaaatttcaaacctgaagtatgcgtactcaagtggttgttgttctcgagtttggtgttgttgcttcttctcatcgttgaaaagtacttagcaaacttcatttaagctacaagtgcttgttgctcgggccaagtttccatgatttataaataatattagaattaaattaaatgccgtattattattttttccttttacgccgcacttcaatggcaaatcaagaagctcgtttcactctaattttctaaaaaaaaaaaaaaactgagaaaatgaaaaataaatcaaaatagcttttggcataagagccgaggaaacccggagcaacgtgggtttcccgccaagtgacttcattatgcccgaattttgtaaggaatcacccaccatacacacacacacacacacacacacatagctcagattgcggccgaagctatgtagctctctatggaagaaagcgaagaaagcgaagaaaccgtatagaagagcctttagctctatgacaacgttgcccgggaattatttcgtctttcgtgcgtttcttctattttcttgctttggtgcttgcgaaaaataaatgaaatttgcatgacacttgagttattttgcacgtaaattgcttcttttgacaaacaaacaagcaaatacacaaaccagctgctgggggaaaagtgggtgggtgtgggagtggtagtggctgaaacgctgccattgttgtattttcggtgtttacagccacgcaggcaggcaggcagtcagtgcagtcccaagtcgcctcctccaatcccaagttccagcaccagaaccaaatccacaaccaagtcctcatccgcatccgcgtccgcattctcattctagtgctcgtt

SEQ ID NO: 31169 - DNA, 282 bp, DROSOPHILA
atgaaccgtgctttacagctgaagccagctgaaaatgaaagtcgcagcgagcatttagatcgcaagctgttcgttggcatgctcagcaaacaacagaccgaagacgatgttagacaaatcttccatcccttcggcactatagaggagtgcaccatacttcgtgggccggacggtgctagcaaaggctgcgctttcgtcaaatttggttcgcagcaggaggcccagtcagcaataaccaacctacacggaagtcaaactatgccggtaagtagaagactctaa

SEQ ID NO: 31170 - protein, 93 aa, DROSOPHILA
MNRALQLKPAENESRSEHLDRKLFVGMLSKQQTEDDVRQIFHPFGTIEECTILRGPDGASKGCAFVKFGSQQEAQSAITNLHGSQTMPVSRRL

SEQ ID NO: 31171 - DNA, 2225 bp, DROSOPHILA
ataaagtaactgcctctcaacagattaacaattgtgtgtgctcttcttataagttaaactttatatacaatatatgtatattagctttacctttactgttcacaatccagatatttgttaaaatttatatattactaaaatattaaagttttcatcacatatttttgatattttgtgaattgcttcccaactcactgtggcagcactaaaacaaggctgagaaacgtgcaaagctgccaatgaaccaaatccagcccctggccgcggatctatctcaatttctacatttgacctgtgaaccgtaatggattttgtatatattataattgccgaccgtgctacacaatctcctctggttttcgactgcgtttttcttcatttctttttcctgctttttttttttttttgcccagccgaccgatggtccgtccgattgcctcggaagcagactggattcaaagcgctgccctcgactgtatcttggcaaatggatcgcaaatggcgatctttccgagaagagtacaagttcagtgagccgcggattggtgggcagtggggaaatccggtggacttgtcgcattagcaccagccaaccaactagccagctagccagcaacgggactggacgatttatggaggcccttggacgatcagcatcatcggtgaacatgaaagagcatcctaagatgaccaaaaaaaaaaataggtgtcgtatgccatcgccgattggcatatatcacgtgtaccagatcgcacaccgatcgtgataaggctaatggtactaattttggaactaatggtaatcggttcatagctgctttctcttgctttataaaaattacagagaaaattaatggcaattgtaccatacatttccattttgttttttattgtttcttcgagtttatttactcaattcgttgcacaatccaaataaacgcaagccatgtaatcaaagacgtgtaagcatcagtaaaatccaaagtccgaatgcttaagatcactttcgttggccaaactttacatcgttgagctccttttcacagccacgatatgccacgcccacgccgaatccagtgcccagccagacgggccatatgcgcctacggaagaagagcagggtgaccacggatccgatcaccagaccaccaactcccttcaccagggaatccgagaggcatcgattgatgttctcacgcagccgatcctctggagtagtcgacatatttagtaatctccagtgccagctgctaatagataatttgttattaattttttcgttttttttttttttgtttgctgccagatgttacgacaataaccgaatcgaaaagggctaatgcaaaccatacaagctgttgactagtacgagaatatcagagcacactgggatcatggcattttgacccagaactcctgttgccacttttaacagctcagttttggccaaaataggcatttttatggcccgcagccacttcaccttgttcaagccaactcagcataaatcgatcacgatcgatttctgccaaaactagataataatcgcaacacactcgctggctcaatctttggtcgataagatcgatctatgtgggtatatggtcatgcaacacgcgattcgcaatcccatttacaatgctagttagctggcacttagaggaaatttcagtcaatcttaaattttttataattcaaattcaaaaaataatatgaaatattaattttaataatataaaatcatataatatatatgcaatatattttttattataattttttttagaattcttgcagtgcaacttaacttgcagctacaaactttcattcacttggcatttggttagctgggtactcatgtctgcataaggcctaaaaaaaaataaattaatgaacctttactttaatgttcatgcttgaaataaaatattatgtattaaagaaaaaaaattgcaattatttgactatactgcgtatttgttacgcttccgctgcagcgtatttccgtttcgtggctccgctagaatggcaactcccatcgaaatcctattccaagcccggcaaatgcttgggaaaacagcgccggcgaccgtgttgacgtgttaagtgctttggccaagagatggccccgaaaaaaaaaaaaaaaaaaaaaacacccagcaattggcaaaaagacggccaaaactgcagtctgctcttccacttgcctgggcttaggctataat

SEQ ID NO: 31172 - DNA, 225 bp, DROSOPHILA
atgtcgactactccagaggatcggctgcgtgagaacatcaatcgatgcctctcggattccctggtgaagggagttggtggtctggtgatcggatccgtggtcaccctgctcttcttccgtaggcgcatatggcccgtctggctgggcactggattcggcgtgggcgtggcatatcgtggctgtgaaaaggagctcaacgatgtaaagtttggccaacgaaagtga

SEQ ID NO: 31173 - protein, 74 aa, DROSOPHILA
MSTTPEDRLRENINRCLSDSLVKGVGGLVIGSVVTLLFFRRRIWPVWLGTGFGVGVAYRGCEKELNDVKFGQRK

SEQ ID NO: 31174 - DNA, 3836 bp, DROSOPHILA
gtcttcttattatattgctccacttttggcttcaaagtattttggagattttgcacactttcaaccgttattatgaaagtcagtaagttaataagataagctaattttgcggaatgagatccataaaatcagctgaaccgtgtttaagcgaataaatttacccataaaatgtttgccgaaactttatataaaggttatctttataattcattcagccaaaatgtttgcgtaactaattcaaaactggatatttcttgttggcacactgaattacttataattaaattaaattaagagtataccttatttgctttacttttacggggtatacagcatgttcgctcttgtgtcatacgaattaaccaaaatagttatgtttaggcatccatcgattgatttccccaagcccaattagcagacttattggcatatctaagactgttggccaaagttggagaactggttgccggaccaagccgattatgacacccagctgaacttgccaggcgctaaaaagcgctttagcatactatctgtaggatgtacaactgtagtacacagacaaaaatgaatgaaggatatattattatttaacattaaattgtcaaactaaatgtttaaaaccaatgcaacgatcagttcagttcattctaagaagcacaatgtcggttgatcttttgattccaaatcccaataatttgaaattaccatgtatgtgagcagttttcttacagtgtataaaccagacgacaatttaattgacggaaaggccaaggcgcttggatgccaagaggttctaatcaagttgataagatcgccgcttttgttatgctacctatgcaaatttgcaacccaaattaataataggtaaaaactagcagttgggcagaccaaatcaagcgatgatcaaaacagaactccaattagcataggcccataatcttttgtgggtataaaaactggaaacgtccctcttttgaacaacagatttggcccaaacatggtaagtttcggttctagggggaaccaccgcggtcaacacagccaccaccctgatctatctcaagctcacccttttgtccacacccacttaatccgattgcagaagttctacgtcattgccttggcctttgtcggccttgccgccgccgatgtcagtcatcttaagttgggactggccgccgatggaggctatggactcaccgccttgtcatctgctccctcctcctcctcctcctcttcttcggaagtggtacaaggtggtgattccagctcctaccagtactcaaagtccgcagaagtcgtgcccggaggcgatgctagttcctaccagcctgctgaatatactccagctcatctcaagtcagccgatgtagttcctggaggtgattccagctcctaccaacctgctgaatacacccccgagcacttgaggacagtcgatgtagctcctggtgtcgattccagctcttatcagcccgctgaatacactcccgagcacttgaaggccgctgaggtggttcctggtggcgattccagctcttaccagcccgctgaatatactcccgagcacttgaaggccgcggaggtggttcctggtggtgattccagctcctaccaacccgctgaatacactccagctcatcttaaggctgctgttccggcggctattggtgctgatacctatgccccagttccggctgctattggtgctgatacctacacccctgagaagttcattccccaggacgttcaagaggcccactacaagtacaatcaggagcaggagcagggagctgctgttcccggaggagattccagctcttaccagcccgctgaatacactcctgcttatcttaagcagacctcttctgccactgtcgatgccaaagtggttcctggtggcgattccagctcctaccaacccgctgaatacactccagctcatcttaaggctgctgttccggcggctattggtgctgatacctatgccccagttccggctgctattggtgctgatacctacacccctgagaagttcattccccaggacgttcaagaggcccactacaagtacaatcaggagcaggagcagggagctgctgttcccggaggagattccagctcttatcagcccgctgaatacactcccgagcacttgaaggccgctgaggtggttcctggtggtgattccagctcctaccaacccgctgaatacactccagctcatcttaaggcttctgttccggcggctattggtgctgatacctatgccccagttccggctgctattggtgctgatacctacacccctgaaaagttcattccccaggacgttcaagaggcccactacaagtacattcaggagcaagagcaagagcagggagcggctgttcccggaggagattcgagctcttaccagcccgctgaatacactccagctcaactcaaaaagtcggttgtagcctcaaccgctgcctctgctatttctggggcagattccagttcctatcaatccgccgtttcccagacgagctacgttaatagccaggccaagacaatcgtggccggatcgtctagcagttcctaccagagcgcccaacccatcgccgcctatgtccagggacaaaccccagtcgtcattggagcgaacacgatcacacctgcccatctgtacgaggaacccacatcgaatggcatcgaggagttcaatcccgatacccatgtgcccgtggccattggtgccgacaccattactcctgcccatttgcaggccagctactccaaatccgtccaggagacccagtacgcgtcgaacggcggctatatttactaagacaaataactgagagccacagagtctaatataatcttaaatttataacttttttttattttggaactatagatcattaaaatttccataagtgtagagaaaaccaatgctttcaataaacaccaagagattaaagtacaaatctatagaatatggaacctttttctgtctcaactttctcaattcatacgatttatttttgaaattggtacaaatgtagcaacaaatgaatatgcctaatcttcgtcctctgagacctgaacgcgataagtatttggatagagctgctccgtcaaataatagtaattggagtaggaggacaggtagatcgactccgtagtgtcaacgtcctccttgccgtcggaatcatcgccgaagcttcccagcgaatctttgtcgcagactatggtccgatccacatcagactcatccgatggcaccttctcattatccggatcgctgccatcttcagaggagatcaaaattggtttaccattgctaagcttcggctccgaatcccagccagccatggctgcgtcctctttgtttttggagagcatcatttggaccttcttgttgcgaggacgaacacgattgcgcggcttcttgggcttcttggccaccttaatggactcctctgattctggctttttgtcggaaaaagcttccggcttgggtggcttaggtggcatgggtgccttgggcgcattggctgccttggccactttcgatgggccagctgttgacgacttgcgcacgaaatcgccactaaccacgaagaaagaattgccagcggtgctctgaaccctgggcatggttaacacaaccttactggaattggtgaactcgatggtcacctcctcgatttcgtcgatattcttcaacggcaacatggccaatgtggcttgcacgcgcttctcggccgcagccgaggatgggaatctcttatgcttgcggcgcatagatcctttgccgccgatgcgcaccacctcctccattt

SEQ ID NO: 31175 - DNA, 1836 bp, DROSOPHILA
atggtaagtttcggttctagggggaaccaccgcggtcaacacagccaccaccctgatctatctcaagctcacccttttgtccacacccacttaatccgattgcagaagttctacgtcattgccttggcctttgtcggccttgccgccgccgatgtcagtcatcttaagttgggactggccgccgatggaggctatggactcaccgccttgtcatctgctccctcctcctcctcctcctcttcttcggaagtggtacaaggtggtgattccagctcctaccagtactcaaagtccgcagaagtcgtgcccggaggcgatgctagttcctaccagcctgctgaatatactccagctcatctcaagtcagccgatgtagttcctggaggtgattccagctcctaccaacctgctgaatacacccccgagcacttgaggacagtcgatgtagctcctggtgtcgattccagctcttatcagcccgctgaatacactcccgagcacttgaaggccgctgaggtggttcctggtggcgattccagctcttaccagcccgctgaatatactcccgagcacttgaaggccgcggaggtggttcctggtggtgattccagctcctaccaacccgctgaatacactccagctcatcttaaggctgctgttccggcggctattggtgctgatacctatgccccagttccggctgctattggtgctgatacctacacccctgagaagttcattccccaggacgttcaagaggcccactacaagtacaatcaggagcaggagcagggagctgctgttcccggaggagattccagctcttaccagcccgctgaatacactcctgcttatcttaagcagacctcttctgccactgtcgatgccaaagtggttcctggtggcgattccagctcctaccaacccgctgaatacactccagctcatcttaaggctgctgttccggcggctattggtgctgatacctatgccccagttccggctgctattggtgctgatacctacacccctgagaagttcattccccaggacgttcaagaggcccactacaagtacaatcaggagcaggagcagggagctgctgttcccggaggagattccagctcttatcagcccgctgaatacactcccgagcacttgaaggccgctgaggtggttcctggtggtgattccagctcctaccaacccgctgaatacactccagctcatcttaaggcttctgttccggcggctattggtgctgatacctatgccccagttccggctgctattggtgctgatacctacacccctgaaaagttcattccccaggacgttcaagaggcccactacaagtacattcaggagcaagagcaagagcagggagcggctgttcccggaggagattcgagctcttaccagcccgctgaatacactccagctcaactcaaaaagtcggttgtagcctcaaccgctgcctctgctatttctggggcagattccagttcctatcaatccgccgtttcccagacgagctacgttaatagccaggccaagacaatcgtggccggatcgtctagcagttcctaccagagcgcccaacccatcgccgcctatgtccagggacaaaccccagtcgtcattggagcgaacacgatcacacctgcccatctgtacgaggaacccacatcgaatggcatcgaggagttcaatcccgatacccatgtgcccgtggccattggtgccgacaccattactcctgcccatttgcaggccagctactccaaatccgtccaggagacccagtacgcgtcgaacggcggctatatttactaa

SEQ ID NO: 31176 - protein, 611 aa, DROSOPHILA
MVSFGSRGNHRGQHSHHPDLSQAHPFVHTHLIRLQKFYVIALAFVGLAAADVSHLKLGLAADGGYGLTALSSAPSSSSSSSSEVVQGGDSSSYQYSKSAEVVPGGDASSYQPAEYTPAHLKSADVVPGGDSSSYQPAEYTPEHLRTVDVAPGVDSSSYQPAEYTPEHLKAAEVVPGGDSSSYQPAEYTPEHLKAAEVVPGGDSSSYQPAEYTPAHLKAAVPAAIGADTYAPVPAAIGADTYTPEKFIPQDVQEAHYKYNQEQEQGAAVPGGDSSSYQPAEYTPAYLKQTSSATVDAKVVPGGDSSSYQPAEYTPAHLKAAVPAAIGADTYAPVPAAIGADTYTPEKFIPQDVQEAHYKYNQEQEQGAAVPGGDSSSYQPAEYTPEHLKAAEVVPGGDSSSYQPAEYTPAHLKASVPAAIGADTYAPVPAAIGADTYTPEKFIPQDVQEAHYKYIQEQEQEQGAAVPGGDSSSYQPAEYTPAQLKKSVVASTAASAISGADSSSYQSAVSQTSYVNSQAKTIVAGSSSSSYQSAQPIAAYVQGQTPVVIGANTITPAHLYEEPTSNGIEEFNPDTHVPVAIGADTITPAHLQASYSKSVQETQYASNGGYIY

SEQ ID NO: 31177 - DNA, 2324 bp, DROSOPHILA
agtacaatcaggagcaggagcagggagctgctgttcccggaggagattccagctcttatcagcccgctgaatacactcccgagcacttgaaggccgctgaggtggttcctggtggtgattccagctcctaccaacccgctgaatacactccagctcatcttaaggcttctgttccggcggctattggtgctgatacctatgccccagttccggctgctattggtgctgatacctacacccctgaaaagttcattccccaggacgttcaagaggcccactacaagtacattcaggagcaagagcaagagcagggagcggctgttcccggaggagattcgagctcttaccagcccgctgaatacactccagctcaactcaaaaagtcggttgtagcctcaaccgctgcctctgctatttctggggcagattccagttcctatcaatccgccgtttcccagacgagctacgttaatagccaggccaagacaatcgtggccggatcgtctagcagttcctaccagagcgcccaacccatcgccgcctatgtccagggacaaaccccagtcgtcattggagcgaacacgatcacacctgcccatctgtacgaggaacccacatcgaatggcatcgaggagttcaatcccgatacccatgtgcccgtggccattggtgccgacaccattactcctgcccatttgcaggccagctactccaaatccgtccaggagacccagtacgcgtcgaacggcggctatatttactaagacaaataactgagagccacagagtctaatataatcttaaatttataacttttttttattttggaactatagatcattaaaatttccataagtgtagagaaaaccaatgctttcaataaacaccaagagattaaagtacaaatctatagaatatggaacctttttctgtctcaactttctcaattcatacgatttatttttgaaattggtacaaatgtagcaacaaatgaatatgcctaatcttcgtcctctgagacctgaacgcgataagtatttggatagagctgctccgtcaaataatagtaattggagtaggaggacaggtagatcgactccgtagtgtcaacgtcctccttgccgtcggaatcatcgccgaagcttcccagcgaatctttgtcgcagactatggtccgatccacatcagactcatccgatggcaccttctcattatccggatcgctgccatcttcagaggagatcaaaattggtttaccattgctaagcttcggctccgaatcccagccagccatggctgcgtcctctttgtttttggagagcatcatttggaccttcttgttgcgaggacgaacacgattgcgcggcttcttgggcttcttggccaccttaatggactcctctgattctggctttttgtcggaaaaagcttccggcttgggtggcttaggtggcatgggtgccttgggcgcattggctgccttggccactttcgatgggccagctgttgacgacttgcgcacgaaatcgccactaaccacgaagaaagaattgccagcggtgctctgaaccctgggcatggttaacacaaccttactggaattggtgaactcgatggtcacctcctcgatttcgtcgatattcttcaacggcaacatggccaatgtggcttgcacgcgcttctcggccgcagccgaggatgggaatctcttatgcttgcggcgcatagatcctttgccgccgatgcgcaccacctcctccattttcttcagcttcttgaaatccattgtttcgttaggaaaacctattaacttgtatgggtaaagtgcgtggaaaagaattctcttgaaatgctcaccttgaaaatgctgtgctttacaaattaatatattaattaatataatattaagtaatattcgcttggagatgtgaatcaactgaggtcctcacgccaaatcagaaatgtgacttttagactgcaaagtcatcgtcttttttttttgagtttttgacacgtgctaaaagggttgccagagctttgtcatgtccttgcagatgggaactctagactcgaatatataaatatctagagtagatattgtcgacatcgattcttaggtgcagatgaccgcacgtcgtgcctcaagtaatcaattttgcattaaacataaacatataaatattaacttttaactatgcatgtttttttatcatttttatgaaatatagtttttattgtgtatattttcttttttcggaaaatgtatgttttaagttaaaaaattaatactaacaattccagatcgaaactttattttatttata

SEQ ID NO: 31178 - DNA, 324 bp, DROSOPHILA
atgctctccaaaaacaaagaggacgcagccatggctggctgggattcggagccgaagcttagcaatggtaaaccaattttgatctcctctgaagatggcagcgatccggataatgagaaggtgccatcggatgagtctgatgtggatcggaccatagtctgcgacaaagattcgctgggaagcttcggcgatgattccgacggcaaggaggacgttgacactacggagtcgatctacctgtcctcctactccaattactattatttgacggagcagctctatccaaatacttatcgcgttcaggtctcagaggacgaagattag

SEQ ID NO: 31179 - protein, 107 aa, DROSOPHILA
MLSKNKEDAAMAGWDSEPKLSNGKPILISSEDGSDPDNEKVPSDESDVDRTIVCDKDSLGSFGDDSDGKEDVDTTESIYLSSYSNYYYLTEQLYPNTYRVQVSEDED

SEQ ID NO: 31180 - DNA, 1717 bp, DROSOPHILA
ccgaatttgcatttctgtttgctctttccactgcctcatcggggtttctcttgtgaatggaccaaagtgccgtgtatgcattatatacactcgatataaacacatatataccgaatatatatatatataaacctcgaaatcgggttaatgtccaaaaacttgttatgcgcaaagcgagaggcagtgaggcagtgaggcgaagccatcgaaaggcgctgagatccccaagaatcaggccattcattcatttagcgaatgagggctcttcctgcaggctcaggatataaaagaatgctgcagttcgattcgggaacgcattgagccatcgttcgcagcaggaatcggatttcagtcatgtggaccaaatcaagtgttgtcatcgttgcaatggcgctgttagcttcaactggcgcccaaccggtgagccagacggaaatggaaccgatgctcatcaatgtgaccacaagcagacccaagctggtcattgaggagatggaaccgatgcgttatcacttcgtcaccgagcatagacccacttcgttgggccagaactattacatcaaaccgggtcagccggtgggcagtattaccctggactcggataccctgcaggtgcgatacgatcaggatgacgggaaaccggtggccagcaagcacaacatcctgttcgtggcctacgccaaggatctggcccaaaagtccagacagcggaagtgaaaaatatgcttcaattgtgctgcgatgatatttgaaatttaagaaagatatagaatcaacatatcttgacaaattgaaaccacaagatacgtagtgatttaaatcttaagataccttaagatacatatgtcttgagcttcactagttatacattttcacggaacataaataaaataatatagcacattttcttaaataccaaacaaaatgggtgattcactgcacaggaagaattgttttctgcgtcgaggtgactccatccaaccgatcctcagtcaaaagtgaactggcaaaacaacccacattaactattcaccttattcaagtacgcagctcaaagccaagccatgttttttttttcttactatagcgatatactctaattcgaacgggtatagtgatttcaggtactcttcaaaaaatgtatagcacattttcataaatcaaaaattggtatattacgcagaactttaaatgtatgtatcttcgtagaataaatagtttaggctcttattttcatactcttatatgatttctcataatcgcattattcaagcttttgttgacaactcaaaacaggtagtaaattaagtgcttatcatagctgctatggcaataaattgttcaacaagaaattcccccaaatgactctgacaatttttgagcatgcaaattgcatgaccatatagacctatgcacatacatactatgtacaagggtatttttaaaatcacacacaatgatcatattctgtgttcggctatcttttttgtttgttgttaattcctctttagttagcattttgttttaattatataaacgcacgcaaaagatataaacacttgggtacaagctaacaacattaagcccgatatctgtggactataattaatgtgagttggtgagcaatcgtggcttcaaaatgcgggcttacattattgcagggtccaacaatcgatataagaatataagattgaattcaaatcattgcgattcgatg

SEQ ID NO: 31181 - DNA, 330 bp, DROSOPHILA
atggcgctgttagcttcaactggcgcccaaccggtgagccagacggaaatggaaccgatgctcatcaatgtgaccacaagcagacccaagctggtcattgaggagatggaaccgatgcgttatcacttcgtcaccgagcatagacccacttcgttgggccagaactattacatcaaaccgggtcagccggtgggcagtattaccctggactcggataccctgcaggtgcgatacgatcaggatgacgggaaaccggtggccagcaagcacaacatcctgttcgtggcctacgccaaggatctggcccaaaagtccagacagcggaagtga

SEQ ID NO: 31182 - protein, 109 aa, DROSOPHILA
MALLASTGAQPVSQTEMEPMLINVTTSRPKLVIEEMEPMRYHFVTEHRPTSLGQNYYIKPGQPVGSITLDSDTLQVRYDQDDGKPVASKHNILFVAYAKDLAQKSRQRK

SEQ ID NO: 31183 - DNA, 2037 bp, DROSOPHILA
gatgtgtcgcatttgtcgcgcagctatctgcctcctttgagcggcggctactccggctactcctccggttactcctcgtatccatcgtactcgagcggatctggttattactcgggtggcggcagctacgcctcgccaatcatctcgtccagctacaagaactacgcggtgccgcagtacacaacctatgccacgccatcgcgcacctatttgcccgcgaatgcgggctacaccggctactccggctactcgggctactccggctacaatggattggacaccaagtacggcagcaatggtggctacgtctactaggcgctaatcaagttttcgggaggccagcaacaatggagccagcagacaaactatatattcctctaatcttttttttttttcttggctaagcaattttctttaatggctactaaatattttcgaatacttaataacgaataacgaatttcatggcgtatttatttggagagggagttgcttattttccaaaccactcattgaagatcttaattttttgacatttttggggcgaagcgagtggttctataaatacaggatacagatcctgaagaaactttttcgaaaattttggtattcttacctgagtattaaaaaaaatgtattcaaaagtgattgaaaagaattgctaatatcaagtaactgatagtcgagactctcgacttcatcattcctgcttgattttagttatgaaaatctgtcagatacttgtaatacccattagtgttaaagtatgctaaggtatgctagactcgttgataagtatgcaactgagcagagaaaatcgtttccaagcgtaagatctaaatttatatagcgcttcaatatctaagtaaagggtagctaatagtcgcgacacttgactataatactcaagtaattcatttcatgccttcccaactttattttgattaaataaaaaaaaaatgcatacaatataatccgtttttttttcgaaatgatcctctcaatgctttaggcggtactcgtagccaccattggcagcgtaggaacccgatttgtgtccagatccgaagctagatccgtggccagaacgcactcccgatccatggctggagccagatccgtatccgtggccagatcctgagctggaacccgagtagctgccatgggagacagctggggcggcataggtcttgctggaaaccgatggagcggcatacgatccatgggatagcgatgaggtggagtacgatgatccgtgggataccgctggcgcggagtaggatgagaccgctggagcggagtaggatgataccgctggtgcggagtaggatgataccgctggggcggagtaggatgaggcagccggagcgagatattgcctggaaggagcggccactggtgcggaatagctagtgtgggaggcagctggagcggaataggagctatatgatgcaactggagctgagtaggagccactggaacctcccgaggaggagtacgatccatgcgacacggctggagcggaatagctcttgcgggaaacgacgggtgcggagtaactgctgtgggatactgcagctggagccaggtacttcctggatggagcagccacgggagctgagtagctggtgcgggaagcagaggagtacgatccatgtgatacggatggggcggcatatgagctgtgggctgcagctggcgccgagtacgagacatgggatgctgatgccgatgcagctggtgcggaatacgagacatgggacacagatggagcggcataggaggaaccacccgagctgtagctaccatgcgatgaagccggagctaggtactgcctggaaggagctgccacggagtgggacctgcgggcataggtggccgctggagctgcatacgatcccgaggaactggacgccgctgcactgtatccactctgggcgcccactttcggcggcgagataggtgttactcaatggcgtcgccaggcccacggaggccaggctcagaatcagaatggcaaaggagtgctgcaatata

SEQ ID NO: 31184 - DNA, 822 bp, DROSOPHILA
atgcccgcaggtcccactccctacagctcgggtggttcctcctatgccgctccatctgtgtcccatgtctcgtattccgcaccagctgcatcggcatcagcatcccatgtctcgtactcggcgccagctgcagcccacagctcatatgccgccccatccgtatcacatggatcgtactcctctgcttcccgcaccagctactcagctcccgtggctgctccatccaggaagtacctggctccagctgcagtatcccacagcagttactccgcacccgtcgtttcccgcaagagctattccgctccagccgtgtcgcatggatcgtactcctcctcgggaggttccagtggctcctactcagctccagttgcatcatatagctcctattccgctccagctgcctcccacactagctattccgcaccagtggccgctccttccaggcaatatctcgctccggctgcctcatcctactccgccccagcggtatcatcctactccgcaccagcggtatcatcctactccgctccagcggtctcatcctactccgcgccagcggtatcccacggatcatcgtactccacctcatcgctatcccatggatcgtatgccgctccatcggtttccagcaagacctatgccgccccagctgtctcccatggcagctactcgggttccagctcaggatctggccacggatacggatctggctccagccatggatcgggagtgcgttctggccacggatctagcttcggatctggacacaaatcgggttcctacgctgccaatggtggctacgagtaccgcctaaagcattga

SEQ ID NO: 31185 - protein, 273 aa, DROSOPHILA
MPAGPTPYSSGGSSYAAPSVSHVSYSAPAASASASHVSYSAPAAAHSSYAAPSVSHGSYSSASRTSYSAPVAAPSRKYLAPAAVSHSSYSAPVVSRKSYSAPAVSHGSYSSSGGSSGSYSAPVASYSSYSAPAASHTSYSAPVAAPSRQYLAPAASSYSAPAVSSYSAPAVSSYSAPAVSSYSAPAVSHGSSYSTSSLSHGSYAAPSVSSKTYAAPAVSHGSYSGSSSGSGHGYGSGSSHGSGVRSGHGSSFGSGHKSGSYAANGGYEYRLKH

SEQ ID NO: 31186 - DNA, 2631 bp, DROSOPHILA
tcaaatatcgcaaaaggattgcaccaaatacagcgtgattaattgcccgttcatgatgtcagcggtgtctggaaatttacaaaaaaaaaaaccaaattattgcagtgggaaacgacgggatccgaaacagaaaccgacacagaaacatttacccatttggatgacccattgcaacaattaataacggttatgcccgcaagatttatgagcaacgacagataaacaagaccgaagcgttttggccgcctcaaccgccaaatgtcataaaaaatcagagacaaaacccgaattgctgaattgcttagaaaccagaagagcactcagaaatttgtataattaaggaaaagagcgagtgcgagttcgaattcacacgcggtagggggcgtgccgcgctcgtaaaaacaaaactaacgcgaagccaaacccaaatctgggaatacactggaagaaattagcaggtgcagcttatattacatttaattttctttactaagaattcgaacatacatatatttctgaacaattatggaactagggcaacttacccatattactttaatgcagtcgaaattaaatatttacaacttcaatcaaattttacttattgtattgtatcattgtcttggtatatttattccaataagaaaaaatactggcttagcactagattttctccgtgtgcatggactccataaggcgaacgtggtttttccacgtcgagacaatttgttgcttctatgccggatgagtcgtgggacatcgaacgagccgcgatgacaagcgaacatgacgaacttctcggagcatctgggacttctatggagtctatggagaccactctgccgtccggttgcctgccaccgcctggcccgttgagtaatgggccccgtccgccgtcgacatgtccgtcgcgccaaggcgttaaaatcatcagttgtaaagtatctggggtgcacatcgcgatttgcgcttgccagcgtataaaaactacactcggtcgatggatcagcaacagttgatcgccagcgtccatccggtgcatacacagctacaggaattccaatcctctcaagcaacacaccgagcttacccaaaagttcccgcaatggtaagggctcaagacgagcgtgattgaatgctcctccttgcaagcaattttttaaattttaacatatatttagaacaaagcctctttaaagcacaacgttgcatactttaagtgactcccagtgctttttaatcccacgattccttgtccgcagaactccgtaaccgtactcgccatcttcgccgcctccttggccttctgtgccggcgatgtgtcgcatttgtcgcgcagctatctgcctcctttgagcggcggctactccggctactcctccggttactcctcgtatccatcgtactcgagcggatctggttattactcgggtggcggcagctacgcctcgccaatcatctcgtccagctacaagaactacgcggtgccgcagtacacaacctatgccacgccatcgcgcacctatttgcccgcgaatgcgggctacaccggctactccggctactcgggctactccggctacaatggattggacaccaagtacggcagcaatggtggctacgtctactaggcgctaatcaagttttcgggaggccagcaacaatggagccagcagacaaactatatattcctctaatcttttttttttttcttggctaagcaattttctttaatggctactaaatattttcgaatacttaataacgaataacgaatttcatggcgtatttatttggagagggagttgcttattttccaaaccactcattgaagatcttaattttttgacatttttggggcgaagcgagtggttctataaatacaggatacagatcctgaagaaactttttcgaaaattttggtattcttacctgagtattaaaaaaaatgtattcaaaagtgattgaaaagaattgctaatatcaagtaactgatagtcgagactctcgacttcatcattcctgcttgattttagttatgaaaatctgtcagatacttgtaatacccattagtgttaaagtatgctaaggtatgctagactcgttgataagtatgcaactgagcagagaaaatcgtttccaagcgtaagatctaaatttatatagcgcttcaatatctaagtaaagggtagctaatagtcgcgacacttgactataatactcaagtaattcatttcatgccttcccaactttattttgattaaataaaaaaaaaatgcatacaatataatccgtttttttttcgaaatgatcctctcaatgctttaggcggtactcgtagccaccattggcagcgtaggaacccgatttgtgtccagatccgaagctagatccgtggccagaacgcactcccgatccatggctggagccagatccgtatccgtggccagatcctgagctggaacccgagtagctgccatgggagacagctggggcggcataggtcttgctggaaaccgatggagcggcatacgatccatgggatagcgatgaggtggagtacgatgatccgtgggataccgctggcgcggagtaggatgagaccgctggagcggagtaggatgataccgc

SEQ ID NO: 31187 - DNA, 477 bp, DROSOPHILA
atggatcagcaacagttgatcgccagcgtccatccggtgcatacacagctacaggaattccaatcctctcaagcaacacaccgagcttacccaaaagttcccgcaatgaactccgtaaccgtactcgccatcttcgccgcctccttggccttctgtgccggcgatgtgtcgcatttgtcgcgcagctatctgcctcctttgagcggcggctactccggctactcctccggttactcctcgtatccatcgtactcgagcggatctggttattactcgggtggcggcagctacgcctcgccaatcatctcgtccagctacaagaactacgcggtgccgcagtacacaacctatgccacgccatcgcgcacctatttgcccgcgaatgcgggctacaccggctactccggctactcgggctactccggctacaatggattggacaccaagtacggcagcaatggtggctacgtctactag

SEQ ID NO: 31188 - protein, 158 aa, DROSOPHILA
MDQQQLIASVHPVHTQLQEFQSSQATHRAYPKVPAMNSVTVLAIFAASLAFCAGDVSHLSRSYLPPLSGGYSGYSSGYSSYPSYSSGSGYYSGGGSYASPIISSSYKNYAVPQYTTYATPSRTYLPANAGYTGYSGYSGYSGYNGLDTKYGSNGGYVY

SEQ ID NO: 31189 - DNA, 2549 bp, DROSOPHILA
agtatcaagtttgattgattgtcttgcattagaaagtgttatagataagcaaataggcggtaaacacatgaatatattgagcagctcttgagaaagacaggtgaaagaaatttgtgtgtttcgcgttacattttaattgatatatcaaacctatcgaaattatcgaacagttatcgaaatggcttatattctttcaattacattttttgcccctgttctgttgcaaaacgaatgaagctcaatgaaagtaaatatggttggtctactctgtttggcttcagtaatttgcatatttaaatatgcacttagttttaattatgcactaattggattttcgttgaggtagctcactgaaaatgcatttttaaatccataggaacttttgaaaaatgagtcaaatgttcgtttctaatggaatgtaattagtaagataatgggaattatagagttcgctttcgaaattgctgccacaagcgggtaacaatgcaaataactcattcgcacagtcagccaacccacccacaaagtgctctaaacaatttaaaaggcctgcaaattggttgaacatggcagcaaatgaacgtcaacaatatacacatatatatatatatgcatatatgtattgtattatattgaagtcgaaaaataccattagagcgggaagaagcagaggcggccgagtgtaaaaaaaaatccaaaggagtgctaattattgcatggcacttaattcacaaatgccataaccaattgtgcaatcagcaattcgagcggacagctagaggcccatgatcatcctggttgccagtgatcgtgaccaattatgtcacccggttaaccacaaaaggagctgttatatattattagcattatattatatatagatctatcaaatccctgactaaactcgcagtttatcaatgaatgttctgtgcaagatctttcgattagaaaccaattgaatattattattaactgatttgttttgcattccggcattgcaatgggttgcacctgctgtggtaaattgcttgaattgatattaattaaactaactaattgtatttaaacctgatctccgattcgtttgcagacaataaacccaagccggagaccattgagatatattcggtgaaaatccgtgagaatggtacatacaagttgatcaagatgcaattggcggatatttggagtcacggatgggagctgcgtatcaataactttgccgacaaggaaaaggtgccgcacaacgagaaggatattcgcaatcaggtgagctaacggattggtaatagttggggaaatatatgcagatataagaccaaaatatctatatattgctatattcctcaattgaggagttaattggaaagtgtctaatctatttccattttttgactaggtgtcggtggcgcgcaaagccaaacagagtctgtggaacaataataagcattttgtgtactggtgccgctacggaagtcgtcagcaggatctgcgaaagcgacaggtaacgacgagtgccaatcacgtgctgctgcacctgatcaattgataagtcgagccgagtcagccggagtccaataaatggacgtggagaaaatgaaatgagaaataggagcgtttgaagcgccgacactgaaacccatcctttttcctgctcctgctcctgctactgcaccataccaccaccttaatccgccacccaaaaactgtgcattgattgcagcaaaaagaccgaaaaaaaacccaaagcaatgtaaaaacatgaaaaaccacacatcataccgaccaagtcatcatacatactcaaaactctagtacgcaacgtggactaaaaacgtcaaaaacgaactgagggaaccggaaaaaaagaaccattaactttttctagggccccgacctatgcatctatctatgcacccatcattcaactaccgattcacgcttgctttgctcatacaaaaaattcgcccaaaagaatgaaaaacccctgagaattttccgatcgttcatcagctaatcaatcgaactgaaggcattgctagatgctagactctagattctagactctttttctgtgagactgcaaaagttgtccattcaatgttgatgacatttagatttacaattttcgtcaagattgcacttcttgattttctctctctctcaatcaattgcagttagattttccggcttcaaggacccaaggacattgagttcgcctgcctatcgtggtggtctcaatgtctgggtaaattgtactggattatctggcgagtgaaatgcgagattggcaagatcagcgaagtgggccatggctgccacatttatggcatctaaataagaaacataaaacttgccattcttgcggcatttatatgtacaatatatatatatatatattcctgccagctcatcgttaccagagacgtacgtattttgtgtttgtacaccgtgtcttacaatcgaatctatattgcattgcagatgtcggagtgcgtgaaatggggcagcgtgggcatgaatgcgggcatgctgttggtgctcaataa

SEQ ID NO: 31190 - DNA, 348 bp, DROSOPHILA
atgggttgcacctgctgtgacaataaacccaagccggagaccattgagatatattcggtgaaaatccgtgagaatggtacatacaagttgatcaagatgcaattggcggatatttggagtcacggatgggagctgcgtatcaataactttgccgacaaggaaaaggtgccgcacaacgagaaggatattcgcaatcaggtgtcggtggcgcgcaaagccaaacagagtctgtggaacaataataagcattttgtgtactggtgccgctacggaagtcgtcagcaggatctgcgaaagcgacaggtaacgacgagtgccaatcacgtgctgctgcacctgatcaattga

SEQ ID NO: 31191 - protein, 115 aa, DROSOPHILA
MGCTCCDNKPKPETIEIYSVKIRENGTYKLIKMQLADIWSHGWELRINNFADKEKVPHNEKDIRNQVSVARKAKQSLWNNNKHFVYWCRYGSRQQDLRKRQVTTSANHVLLHLIN

SEQ ID NO: 31192 - DNA, 3585 bp, DROSOPHILA
aactcgaattggttaaggcagaggcactggttgccaatgcaggagctaaaccgatccgcccgctggcactgttgctgaaactcacagcttccgcccaccgggaccaccgccggcaggcagcgtctgcggtcgtcactggacacatgaccctcggagcagtggcactgctgccatcgcgtgtggcatatggcattcggcatgggacatggacaggcaccaccaatgatgttggtcagcttgaggcgctcctccagcggcgtacacggcacccgttcgccggagccacgtgctgtgcagatgcaggccatgtccacgcagcgaccgcgctcaaactgggcgcactgtgcgtccgagctgcaggacaactccagcagatcctccgcccgaccagtcgctagaaatccggccagcagcagtaggatccacctgtgcatcgctagcatgtttctcagttcacttgggttgctccacttcgttcgactggagaaaaccagtaccgttacttgcggactgccagaaaagctcaatttaaaactgtccattggttagtgctgctaatttatccttttttgtttaagacaacagatctctttttatacacctcagtcaaaatgtaccttaattacttaatggttaacattaaaattcaattttgtgttcgttacttgaccaactattaaataatatttaaaaactttgaccagggcctaaacaaaagttaccatctgatataagcatttgctcacctgctcaatatgaagagattttttgctccaagataaattcaagcgatgagttatttaattattccaaattacttatctactttaaaaaaattttaaattccgatagttttaaagctcatcaaaaccatttagcgctacaagctcacagtctggcaacctttcacctcgtcgacgatccggcaacgctagaaaaacgcgagccgcctgaaaagcaaggcaaattacaaaacaccatgtctttcagtaatttgttaatgaaaagtggcctaactgtggccgtgcgtgatgcgcaggccgccgtcctgatgactgccacacggcaaggacacaccatacgcggcaagccgcccggcgtggcccgttctctggagcagcggattcgtggtaagttgatgtaaccactcgggatcacttttcggcccacaaaccagcgtatcatcgatgtctttccgcagaggagaacgttgaggatccggaggtggtggcccgcatcaacattggcttcccgcagctgaaggagtcgcgctcggcgcagctaaagaagcgactggagcacctgaagtcccagcgcagtgacaagcagctggagcagctggcgcggagcaacaagcgtgagtagcgatcctggggactattgatgtatatgtgctcattgctgtttatttgtctatccacagtgatcatcgatttggacaaggtgcagcgcacctatgtgaagaccacgggccagcatgatcttcgcctggtggcggaccactacggcatcttcgagcacctctttggcagcgcctactttgtgccccgcgtgccgctcaacataagctaccaactggacggcgatagcctggcacccgtctacaatggcaacgttatcaagccgacggaggcagccaaggcgcctcagatcgatttcgatggcctagtggatcccattacgggacaagccgccggccaggacacttactggaccctggtggccagcaatcccgatgcgcactacacaaatggaactgccgagtgtctgcattggttcatgtaagtttcgttttgttacgcatcatcctatgctaattcatccctattcttccagtgccaacatacccaacggcaaggtgagcgagggtcaggttctcgccgagtatctaccgccgttcccgccgcgcggcgttggttaccaacgcatggtctttgtgctctacaaacagcaggcgcgccttgatctcggctcttatcagttggctgctgccgactacggtaatctggagaagcgcaccttcagcaccctggacttctatcgtcagcaccaggagcaactgacgccggctggcctggccttctatcagaccaactgggacgagtcattgacgcagttctaccacgatgtcttgagtaagtagaaacgtacatagttctaccagcaatccgtagctcatactaatgctggtcatctgtcgcgcagagatcaaagagcccgtttatgagtacgacttccccaagccgtacctgaccgaccagaagttcttcccgctgaagcagcccttcaatttgtacatggacaagcaccgcgatcagaagcaggtgaacaaggagtatctggagcgcaagctggccaaaacgcatccattcgaggggccaaagaagccgctgcgctaccccaatgcccatcccatacgcgatgtgccctcgtggctgcgcactgagattcggaaggagcgtctgggcactggtcgcgtgcaggactactagaactactcaatggggtgctgttaagttttgtgtgtaatagtggttaacaagttttgtttttttattcactggaagtacatgagttgctaaagtacacggttgcctcatctgcaaactataactacgcggaatatagcctaaatataaatatgggaagtttagggaagaggacgtattacatatgatccatgctacggaatcgaaattggaatcgtgtgatgcgttaacaattgtcgccggaaaatgacgctccatctcaatgtgctaatttaattagttacctattcgtattaacttattcgttatgcgcgctctgcttgccaagcgctaaattggttaaattgtttttggatttttggcacagttttatacgttatcctttgctacgctgatatatctaaatcggtatctccaccaatggaacactcggcaacggatatccccagtggcgttcttaagtctgcgccttgccgtaactaccaactggcggcctgtacatggccggcagaaaagagacctgagttcgattgaaggcatactttcgcttcccgatgttcttgagcacgttgtccatgcgcgtgccctcgctgaaaacaagtagcatcgattgcaatcaccaaatcatacacatatttcaaaatccgaactcaccttcgcatggtgctgagcgcgtagggcacatgctttgccggcagctgaaactcgcgcaccaggacacgacactgctccagcgtgaccgccatgccagtgcgatccttggcgctcttgcacgaggtgaatcgcagaccgtccatcaaacggcacgcatcctcggccagatgcagaatctttacgtttttggacacattggcacgcagctgctgctccatgaagccgagcagagattgcagcgattcgccagtgtcgacggaaccgagtcccagcttccggtaacgtccaaagtactggctcagccgcaagtagttgtcccagttggaccgatgctgctccttggtctgacccagcgtctcggcgaagctggccttctcgttgatgccgatgttgaagaagacgggcgtaatcttgaacgaaatggaattgccattgcccggca

SEQ ID NO: 31193 - DNA, 1323 bp, DROSOPHILA
atgaaaagtggcctaactgtggccgtgcgtgatgcgcaggccgccgtcctgatgactgccacacggcaaggacacaccatacgcggcaagccgcccggcgtggcccgttctctggagcagcggattcgtgaggagaacgttgaggatccggaggtggtggcccgcatcaacattggcttcccgcagctgaaggagtcgcgctcggcgcagctaaagaagcgactggagcacctgaagtcccagcgcagtgacaagcagctggagcagctggcgcggagcaacaagctgatcatcgatttggacaaggtgcagcgcacctatgtgaagaccacgggccagcatgatcttcgcctggtggcggaccactacggcatcttcgagcacctctttggcagcgcctactttgtgccccgcgtgccgctcaacataagctaccaactggacggcgatagcctggcacccgtctacaatggcaacgttatcaagccgacggaggcagccaaggcgcctcagatcgatttcgatggcctagtggatcccattacgggacaagccgccggccaggacacttactggaccctggtggccagcaatcccgatgcgcactacacaaatggaactgccgagtgtctgcattggttcattgccaacatacccaacggcaaggtgagcgagggtcaggttctcgccgagtatctaccgccgttcccgccgcgcggcgttggttaccaacgcatggtctttgtgctctacaaacagcaggcgcgccttgatctcggctcttatcagttggctgctgccgactacggtaatctggagaagcgcaccttcagcaccctggacttctatcgtcagcaccaggagcaactgacgccggctggcctggccttctatcagaccaactgggacgagtcattgacgcagttctaccacgatgtcttgaagatcaaagagcccgtttatgagtacgacttccccaagccgtacctgaccgaccagaagttcttcccgctgaagcagcccttcaatttgtacatggacaagcaccgcgatcagaagcaggtgaacaaggagtatctggagcgcaagctggccaaaacgcatccattcgaggggccaaagaagccgctgcgctaccccaatgcccatcccatacgcgatgtgccctcgtggctgcgcactgagattcggaaggagcgtctgggcactggtcgcgtgcaggactactagaactactcaatggggtgctgttaagttttgtgtgtaatagtggttaacaagttttgtttttttattcactggaagtacatgagttgctaaagt

SEQ ID NO: 31194 - protein, 409 aa, DROSOPHILA
MKSGLTVAVRDAQAAVLMTATRQGHTIRGKPPGVARSLEQRIREENVEDPEVVARINIGFPQLKESRSAQLKKRLEHLKSQRSDKQLEQLARSNKLIIDLDKVQRTYVKTTGQHDLRLVADHYGIFEHLFGSAYFVPRVPLNISYQLDGDSLAPVYNGNVIKPTEAAKAPQIDFDGLVDPITGQAAGQDTYWTLVASNPDAHYTNGTAECLHWFIANIPNGKVSEGQVLAEYLPPFPPRGVGYQRMVFVLYKQQARLDLGSYQLAAADYGNLEKRTFSTLDFYRQHQEQLTPAGLAFYQTNWDESLTQFYHDVLKIKEPVYEYDFPKPYLTDQKFFPLKQPFNLYMDKHRDQKQVNKEYLERKLAKTHPFEGPKKPLRYPNAHPIRDVPSWLRTEIRKERLGTGRVQDY

SEQ ID NO: 31195 - DNA, 2771 bp, DROSOPHILA
ggcagctgctttgagtacccgggatacgtgcggatcgtacttactgtgcccggggcaatgatcgaggaggcgtgctccaggattgccgagttctgcgatcgccactacaaaaaggagtcgcgcaatttcattgagcacggactgctcgactgcgatgatgtggccttttgagctgggagcaaaacatttattagatattctagactacaatttttatcaagtgtacataagtgtatgtatgtatatatactatatatatatatatatcaatcattttaactatccaatataaggagtattgtctcaaaaaattgctggaaaagtaaagcgcgtcacacacagatagatagagtttagaaagagcgagtaaactgcggctaagtaaatggtcattatggaggacttctgaatataaatatatataatataaatttatatatatatatataggcctatatttgagctatctggcgctgtaggctggctggggttctgtgcaaaaaatgttaaacttggtgaaagtagtgctcctttggaacaggatatgatatgatgatgccttcttgctagttacaattatttctattagtttcaaataaattttctggcagcctttatctaacgtgtgatttcaatttaaaaatgctgaacattttcgcataaattggatttagatgtgtgtaatgaatgatatttgtatgtatattcgttgtaagaaattttaaaatgttgcttaatgggctgtgaaacgtaattagaatgctgttgagtgttgtgaagtgtaattgaatggtccccacatttcagcattcaacagcactgttaatgccaaaaaaaaaaaaatatatattaaattctagctaaggggtcttacaaatttctgaaactctgggacaaatcctgttgattgtggagtgtgtgtgtgtttttgaacgaggacctgagcacgagaacccaatcccacctacaggctaaccgggagaggggcatccttttgcctctacatgtggtgcggatgcattttcttctccatttcggtctccacgcgggcctcatcgattccggcaacagtgggcagaccacctggccagtggagcagctcctgctcgtgttccataatcatgttcgcctccgctacaattgatgtaatcatcggataggtttgtataagatatcatccttctaatggcacttaatcaaacaatcctatcccagacccaccttgaatgcgatgcatcttgctgccgtacgcccagtccgtatagtaacccacgacgaaggtgagcggcaggagcggagccagcgcggataccctcctgaccctctggtagtaactggcgcagccgtacacagcactcaggtagaatccgctcagccagtagaagagctcccgatggtgggcaatggccagtgcctgttcccgctgcttgatctggtagtgcatctggatccagcgctccatctgagtgcggtcgctttggtcatgcggggttttggggattatataaagcggtggactcaccttgagctcctggcacttgcgatagctgggatcatcgtgctccggatagccactgccggaggttttcttgcacgaggccgtggcacccatttcgatgcgattgctgctcggatttgttgaaatcgccgtggtcgcttgttggccactccgcgcggagttgccactccgacactggtaaccgaatcgacccgcgaaagtgcgcaggcgtcgtccatttttgggggttgctcgacttggaaccagagccattcaaagtgacggcccagtggagctgtcagttcagttggctgactggagcactgcctgactaaacagactgagtggccgtaactccaagtctccgcgtccgaaaaaaaaacatacaagaaaaaaaaaaaaaacaaagaaaaaggactcttttacgaggacctcggcgcgtgtttggtgttgaaagaaaaaaaaacgcgttttccttcccgcacagatttggaaaaccggaaagtgcggcaaccggatatattcttagatttcaatagtctccccagtgcaatccatttatgtggactctgtgataaaaattgcgcgaatcttcgccatcaaaagttaaccatccaccagcagccgctccatcaggcgaaaagtgagtaggctatgtgtagataatgtgttagttaaagagacaaggtaaaaaaaaaggcaaaatacctttacacaaatcgtactgatttgagttttgcccactgaattcgctttgaattggagtgggcatggctgcttttggttactgctcctttggtaatgacaatggattcgccagtggggatgggactgggtcgtatagtacacatatctacgcatatacggcgagaagtggttgctcattcgggggttgcaagtgccatccgccatccgagctgactgtcttgattcacacagaaacaaattttggttgctctcgaagatctttgttgaaattcctatacaaaaagttgatgcaaacgatacactcaaaacaaaagcagatcaataaacttggcctgtggatttgaaaaattgggtaaaacaggctaaagattataaattacatatcacaggatatgcaactaatgaattgaaatgtctgtctattgattgattcatttgcatatatattttattactttataatataacactttgagctattttaaatattttttttacgcagtgcactcagtgcctgtgtgagtgggtttgagtgctgcaccttcagcccaccttggcagctgtt

SEQ ID NO: 31196 - DNA, 684 bp, DROSOPHILA
atggctctggttccaagtcgagcaacccccaaaaatggacgacgcctgcgcactttcgcgggtcgattcggttaccagtgtcggagtggcaactccgcgcggagtggccaacaagcgaccacggcgatttcaacaaatccgagcagcaatcgcatcgaaatgggtgccacggcctcgtgcaagaaaacctccggcagtggctatccggagcacgatgatcccagctatcgcaagtgccaggagctcaaggtgagtccaccgctttatataatccccaaaaccccgcatgaccaaagcgaccgcactcagatggagcgctggatccagatgcactaccagatcaagcagcgggaacaggcactggccattgcccaccatcgggagctcttctactggctgagcggattctacctgagtgctgtgtacggctgcgccagttactaccagagggtcaggagggtatccgcgctggctccgctcctgccgctcaccttcgtcgtgggttactatacggactgggcgtacggcagcaagatgcatcgcattcaagcggaggcgaacatgattatggaacacgagcaggagctgctccactggccaggtggtctgcccactgttgccggaatcgatgaggcccgcgtggagaccgaaatggagaagaaaatgcatccgcaccacatgtag

SEQ ID NO: 31197 - protein, 227 aa, DROSOPHILA
MALVPSRATPKNGRRLRTFAGRFGYQCRSGNSARSGQQATTAISTNPSSNRIEMGATASCKKTSGSGYPEHDDPSYRKCQELKVSPPLYIIPKTPHDQSDRTQMERWIQMHYQIKQREQALAIAHHRELFYWLSGFYLSAVYGCASYYQRVRRVSALAPLLPLTFVVGYYTDWAYGSKMHRIQAEANMIMEHEQELLHWPGGLPTVAGIDEARVETEMEKKMHPHHM

SEQ ID NO: 31198 - DNA, 2183 bp, DROSOPHILA
aagttccttctttatgtagctatatatagcagtatgtatgcgcaaaatcaggaagacaggaaacgagcacagcacagagggtagacaggtgaaggaatttctatcttaaagggcgtgtggccagacaggtaagtcacccaacgaggctcgtgtcgaggacaattttttatgcagggtaaagttctgtttccacgtttaaggggaacacacttcccaagtcttacacaagtgctgggtagcttatgttaaattaaaaagagcaaagaacaatgcttttttgaaatatatgtataagaagcgtgcccttgaccgaattggtaacaagaaaaaatgctgttattaaataaaaggttatttattcttatctgcaaactctcacagattgtctcgtgccatcactcaatcactcaaaccctttacctacgcagcatgggcaatcaaaagcaagcaaaccccatttttcacttgctgtccattttgaaattgctgttcttgctgaggatggtgatttatttatttattgatcacttgatttaagtagaaattcttttgatattattagcattcgcttatgagatttctatttttgtttctgcctcaaggcacatccacacacctgcgcatgcgatagaatctgtagatttcgaggtatatttcataaaagggcataaaatgaaatttaaactgccaaagcggtttgtatttgatttgtttcgcatttatttaaagtgagtgtcgagtgcgtgtgacccattacgttgcggagcaccgctatttcgaatcaattatgacactgagctcccggaaaaaaatctggcgccgacaagtgtgcggagtgtgcgataaacaaattttgacattttttaacaaagcagcggtaattaattaaagctctgtactgtcggctttcttcttctaggaggtatttccaatgcacaagtgtaagtgtaagaacaaatagaaaaacaagtttatgaaatgtctgacataagagacgtccctagcgtctacgtccagcgcctccggcacgagcactcccacccacctcggcgcccgctccaatgccgacgtccatcccagctccaggtccgtcctcaacggctttagccgctccgccgccgtgagctccaaattgtccgcccgcccccgccgctgcgcccaagcccccttgggcggcacccatagcctcgggttgatctggaacttgagcctctgcgatgctctaattgaacaaggcttggttaatagacaataaatcattggatatttacataagtaagtcccaagaggatcagctatagccaaaaagttctacttgctctactcctctcggaaaacttaatcgcagatttcagatctcacccgaagcatcacccaagtaatccaggacaacattgccagtttcattgttagtacagttccactccaatgcaggtttaaaccaactatagatgggtttcggctaccgttttatcaatttatactattataacgctcacaaaaaatcgtggaaatgcctgcttagtattatccaaacacaaatctttagcggccttgtccagatagcatctatcgtagtcgctttgttgttagccatcaattatatattattaatcaattgtattgttgacaatcgcttaattgctcccgtgcttaattcatgcttctggcgtgagtctattaaaaaataactaaataattaccaaccgtcgtaaaccaagtagtgatatgatgacatggcgaccaatacagttgttattgctgcaaaattattgagtaatagcgcgcactacaaggtcaatattaaacaaaaccaaaagcttggtataaagttaaagctaaatacaaatatatatttatttaatttaaaggaaataacgaaataatttaaacaaaatgaatagaatatatattttaagtttattttataaattttccaatttttaaaaatgcatttagcggatcaagagtgaccgatatagtcgaattccttggctttcagatacccgttaatcagctggtgacgaaaaggaaatttataaccttcttcggcagatcattagaaattagcaaaaaaaaaaaaataatgaaatcatatttgaacattttgaggagtgactggctttttcttgaattttcaaataataaaatagaaacatttttcaaaagtatttacgaatcaa

SEQ ID NO: 31199 - DNA, 183 bp, DROSOPHILA
atgggtgccgcccaagggggcttgggcgcagcggcgggggcgggcggacaatttggagctcacggcggcggagcggctaaagccgttgaggacggacctggagctgggatggacgtcggcattggagcgggcgccgaggtgggtgggagtgctcgtgccggaggcgctggacgtagacgctag

SEQ ID NO: 31200 - protein, 60 aa, DROSOPHILA
MGAAQGGLGAAAGAGGQFGAHGGGAAKAVEDGPGAGMDVGIGAGAEVGGSARAGGAGRRR

SEQ ID NO: 31201 - DNA, 2534 bp, DROSOPHILA
aaacagaaacagaaccagatggaaaatggaatggaatcgaagcacagttaaaggaattttgctgtatacgttaatgtgtgcttgtttttgtgtctgggcacacactcataaacaatgatgaacggggtgaatggacgcaaggtgacgtcgcaacgcggtcgaagccgctgcttctgcacattgggttggcgaatttggcgccgacaacattccccttctaaaatcgcgcttttgaattttccaccttagggttaaaccataaatttctaagttgcaagtccacataaattatcttttaatcgaaataatttacatttcacttttctccaaatctttctaaatgtaaataaaatttaaacagtgaccagttgtgtagaaaacgtcaaactatctcgtttttgcgaagtgttccccatcaagcgccacaatgggcgtggcacttggcggagagtgagaattgaggcataataaaagaaggaggagggaacgaagaaatcatcgagagaagttttggttcaattcagttcgtttcgattcattctcgtctactggcgtctttctgtgcctcttcggttatttgtttatggctgttttgctttgatccccttattctgtctgggggcacaatcgtcttgtttttgcgcttattgctattgctctacactttcccgctatttggctactccacgtctggactcttgactattaaacccagctaaaagaagtgctaggcagatattttagaaatcgagggattaaattaaattttgcatttacttgcattttattgaaattttcttgcattttttattcacattccctccatcctttcccattttattgagtgcagtgtcgttgatatgtgtagatatgtatatatgtaaaatatgaagatattccacaattattcaagtattttcataacttttccccgtcaattttcggaaactccgctaggaaactaggtacaacatagtccattatccgattcagaatccgactcatattcgtcagccgaatccgtgggacaaaagcctgataaggtcgattgtagttcagtataaaagtagctcttctcgtcctctgtgacttccatttctatatctctgtagcgcctaggtgaaccgaagttttggaggtgcatggctctattcacgagaacctttaaatggatctcctcatgctcctgacagaccctaagttgtttgtattcctgcttgtctctataagtcttgcacttcttgaacatcagtcgattggactttgccttgagctcttttataatcctgttctgcgcatcaatagcgttgaccacctcctgatactccttgtacattgcctgttgctcttcatcgtcttcatcgctctcattgaggagctcaaagggatccttctcctccacctcgaacttatcttcctcttcaacgtcctgttcgtctccttcgccctctccctcaaaatcttcagcagcttcttgtccttcattttgctcattatcaacgtctccagaggcttcttgctccacatcagacattgcttcggatgttagggataaattgtattaagcgatgcaggggtattagtttacataattatgaaatactttaataaaccaaattttgatatataaatcaaatacaaattgttgtagtagatttatcatgtgatcgacaaacgtaaacataaaactccacaccttagagccagtaaaatctcagtttactgcacacaacaactacttttattatttcagttcgccattttttttagcacttcaataacttccgtttccgtttccctcgttattagatcttttcatatacgatttattgttcttctgccatcatgatagctgttgcgccgttaacttcattccttctacaatctcatctctcttatttcacgcttttattgactcagtgatttcttgtggctggatccggtggattacgtttcaaagcgcaccactcgacggcatgcgttcgcattaattatagaaactacagaatgcattttaatttggcataatgtttatctcgcagcagggtcgtttcatcgtactaccggtagttaagacgtgaattctaacagattacaacctgtaagccaggaaagaaagggtatgtatttgataactggcccagcgacacaagttgctgttttaatatcaaactggtgcattgaatggcataataggaatgcacaatatgtacgcaaaatgtacctgcaaagttgtgtgcaatgaaagacaaaaatgtagagaacaatgtttagcaaagaaattgaatatgtcgatatagggatatacaaatttaaatttatttatttatttaatttaatttatttgaatttacttaattaaataataagcaccttgtttggtccaagcttaagcttttatccttgatgttttcttgattacgtccctgtttaatttttggcgtaattaccaattgcttgcgagtccctgaaagcgacagttgcattagaagcgaacacccatagccagagcctatgggttttatcgtccgtat

SEQ ID NO: 31202 - DNA, 573 bp, DROSOPHILA
atgtctgatgtggagcaagaagcctctggagacgttgataatgagcaaaatgaaggacaagaagctgctgaagattttgagggagagggcgaaggagacgaacaggacgttgaagaggaagataagttcgaggtggaggagaaggatccctttgagctcctcaatgagagcgatgaagacgatgaagagcaacaggcaatgtacaaggagtatcaggaggtggtcaacgctattgatgcgcagaacaggattataaaagagctcaaggcaaagtccaatcgactgatgttcaagaagtgcaagacttatagagacaagcaggaatacaaacaacttagggtctgtcaggagcatgaggagatccatttaaaggttctcgtgaatagagccatgcacctccaaaacttcggttcacctaggcgctacagagatatagaaatggaagtcacagaggacgagaagagctacttttatactgaactacaatcgaccttatcaggcttttgtcccacggattcggctgacgaatatgagtcggattctgaatcggataatggactatgttgtacctag

SEQ ID NO: 31203 - protein, 190 aa, DROSOPHILA
MSDVEQEASGDVDNEQNEGQEAAEDFEGEGEGDEQDVEEEDKFEVEEKDPFELLNESDEDDEEQQAMYKEYQEVVNAIDAQNRIIKELKAKSNRLMFKKCKTYRDKQEYKQLRVCQEHEEIHLKVLVNRAMHLQNFGSPRRYRDIEMEVTEDEKSYFYTELQSTLSGFCPTDSADEYESDSESDNGLCCT

SEQ ID NO: 31204 - DNA, 4116 bp, DROSOPHILA
gttaaatgatttacaaacaagccgacatctcgggaaccattaaagagacatttaaagtcaaaaagtggccaactgaaacccgttaaaatccgcttgcgaccgcaacttggcccgactaaggcaaaaaataacataatcctgtcaagtcatgcagacagggcgatttacattataattttaaatggcaatggattagtcatcatcagtacctgcttatctggttttcctgatttttaaatcaaatctgtgactgtatctcttacctttcctcttgtacctcgttattataaaatgcgaaaaccctctgccaaaggacactataaaacgaattttttaaaagacgccaaacaaaatggcactttttgttgagaagaaaatatgccgataagaacgttttacttgtaagacgctgcagaaagattaggaacgaaaactatcgacaatgtttacttgtataatctgagctttctaaaacacaaaaatagtgtacttttaccatacgcttaatttcgaaattaatccgggatatacagttggggatccagattttaaattcgtgaacacagctgctggagtagggcatttcctgatcgatctgttagttttcggacttttactttggttgttgtaaacaatatccgcaagtttctcgcaaagtgggttgcgttgtgccgtgcctcagtagagcactacacactaccttcgattgagttcgctgggatttggatttcgttcacagtccaagtttggaccgtgctaggagaagataatgatccgatcactcaattaacttcatgcacccagtgacgtcatcagtgctttactattcggtgtctatatagtctattttgtttaatttcttacaccctacatttcgatacgattcgattttcgtttggaaattgtctgaaggtaaacaagcataaattggacgttcaagcgtaaacaaatcggttttcggagcaaaatacaaaaatcgtcagttgagaaagtctctcaaatggcgcagttctgcattcttggagtcctcctcattctttctggaacacactgctcgtggggattccatgaagagacacattatccgtgtgcctttatcgatacggcaaacataacggggagctacggcttagatggcccatttgtgcacaactggacggtgattccccgtcacttcgtagccgtgtacgactttgtcatcgaaaatggcatccgcatccccgcaagcaggcatctcagagcctgtgtctgtaagaccaaaccctgtgtacggatttgctgtttacggggagaaatctacgacctggagaagaggcagtgcttagtccctgtggccggggtgtccagccttccctcccatagccatatggaggtggagttgggcaacggcagtctgcgtctagtgaaactgcaaccccgttttagcatccacgtggaaacaccatgtgagcacatgaaagccgtaaccaagggctcggaatacgttcactggacacttcatgaggtcggttgtgaaataaaccttccatcacattaatggctttacatcgccttttcagaacggaaccatcagccaccgaggacacatattttctaagcattactgcttcactccgctgctccatgggaactccacctgggagtggcagccattggcctgtgcaccagaaaaactatatttcgtcttgggggtgcgggagtggacatacgccatatgtaagtagcaagaggaaacatttttccagcaactttcagcaattcattatcccaaatatgcacaatactgttttcacaacaatacataaaagtaattgctaaagcaccaaaaaacaatcgatgatagcattaatagtttgatagtcagaatttaatttacccagcgtattcactttccaggtctcttgatagctattctatcaatgtttatcgtgctgatggtctaccttatgtgttcggaaatgcgcaacagtttctacggtgtggccataaaggcgtacgccatttgtatgatcttgggatatgccctactggcttatctcacgctccacaacccagcaaatctctcaaatgcggcttgtcgtattctacgtaagtggtaaatttgagtattctgtgatatttaaacattcccttcttttttttttttagcaagtttggcgttgatgaacttggtgctttccttttacattctgagctttattgcatttaagctgtacttgagcttttatggcgttgtcttcacaaaactgatgttttggctaatatttactcccatcgtactggtagccgtgggctggtctttctttgtgggtttcagttattacggctctaggctcatcttcggaggcgatacatgctggtttgatcgtaagcactgccaatccatatatgttttataataattaattggtattccacatcgctagcacgcaattggtccgttatgatatatttttacgctcctgttttcgtggcttgcgccattagcggtttcttctatgtcctgagccagatctacatccgtgatcagccagatatcgagacggagaagagcttcgagtccatagagaagaaccgattcaaatcattttggaagtactttggctacacggcagtcgtatgggtcgtttgcatatgctcctttgcctttaactactactgggagaacagatcccaccttaactacgctgtaagcttctgcatggccttccacgggtttgcggccctctatgcgctgattggaaagaatcagcaaatccaaaattttctgcggcgcatagataagtaagttgataactatgaattttaagtactactgttaatatatactgttgcagtggcgaagatacctgtgaaaactcagttccgctctcgagttttggttaacttttcttgttgtgcccactgtagcgttagtgtaactggaagcagttgagtgtatcgacaatatctgtgcaatgtttttaaaatcacttatcagcatagacaaaaaccatgtattttaaatgtaaaattttgtaggatgtgtgtaaaatatatttgtaaaatttgaactcgaacaaaaaagtacacttctaccctttaaacgaaattacgataataaagatacaaaaaataaatatatctgaaaaaaaaatcaggtctggaatttctacaattgttaaatatgataacaagtcccaacaatcctttcagtatagaacaaaacatggaatatacttaagccatgtgaaagaacacataacatattaatattctaaacaatttgagcagttttcttgagtttacgcctccaacaatttatccttcacctttcttgagttccaaattcctggaccgtgatcaagtttctccagtcttatttcaagtcccgattttactgtaccctatccgcatcgccaagcccggtgttacttccccgatctctctatattataaatgtgcgccgattttatttaacatcagaggtcaatggccgcaaaacagacagagagagagagagagaaagttggtcagagccacgagaactgcatcccgacagggggctgtcaagagcaaggaatcaagtggaatgttggtggtgctcttttgaaaaggcttcgcaaactttccccctgtacacccccttgccaaggcctaatcgcagaaaacccacccgggtcggagtccccaattcattttcatgccgattatgcttcgggttttggtcctgctctttttggctgggcgtacagcagcaggactcggggtacacactaagagaggtctaagaatatagagatagacaaggaaagcagatggatcgataaaacgtagtaaaaatgctcgtagtaatggaagctggaaataacatggcacaaacaggccccaaactgcatcgacaacaccatcacaatccagacgtgcgcactggaaaatcccgagaggtaggacatgtttggcgcgtttttcgactgcatgtgtgcgagtgttctgttttggttagatacgtatgaaaaagtgaaaaagcctatattgaccgcgcccggtagatcgcataggcaatatcgatatgggaaatcattgactaacatttgcagacatttagtttgggacacattaaagttaatttgactc

SEQ ID NO: 31205 - DNA, 1709 bp, DROSOPHILA
atggcgcagttctgcattcttggagtcctcctcattctttctggaacacactgctcgtggggattccatgaagagacacattatccgtgtgcctttatcgatacggcaaacataacggggagctacggcttagatggcccatttgtgcacaactggacggtgattccccgtcacttcgtagccgtgtacgactttgtcatcgaaaatggcatccgcatccccgcaagcaggcatctcagagcctgtgtctgtaagaccaaaccctgtgtacggatttgctgtttacggggagaaatctacgacctggagaagaggcagtgcttagtccctgtggccggggtgtccagccttccctcccatagccatatggaggtggagttgggcaacggcagtctgcgtctagtgaaactgcaaccccgttttagcatccacgtggaaacaccatgtgagcacatgaaagccgtaaccaagggctcggaatacgttcactggacacttcatgagaacggaaccatcagccaccgaggacacatattttctaagcattactgcttcactccgctgctccatgggaactccacctgggagtggcagccattggcctgtgcaccagaaaaactatatttcgtcttgggggtgcgggagtggacatacgccatatgtctcttgatagctattctatcaatgtttatcgtgctgatggtctaccttatgtgttcggaaatgcgcaacagtttctacggtgtggccataaaggcgtacgccatttgtatgatcttgggatatgccctactggcttatctcacgctccacaacccagcaaatctctcaaatgcggcttgtcgtattctaccaagtttggcgttgatgaacttggtgctttccttttacattctgagctttattgcatttaagctgtacttgagcttttatggcgttgtcttcacaaaactgatgttttggctaatatttactcccatcgtactggtagccgtgggctggtctttctttgtgggtttcagttattacggctctaggctcatcttcggaggcgatacatgctggtttgatccacgcaattggtccgttatgatatatttttacgctcctgttttcgtggcttgcgccattagcggtttcttctatgtcctgagccagatctacatccgtgatcagccagatatcgagacggagaagagcttcgagtccatagagaagaaccgattcaaatcattttggaagtactttggctacacggcagtcgtatgggtcgtttgcatatgctcctttgcctttaactactactgggagaacagatcccaccttaactacgctgtaagcttctgcatggccttccacgggtttgcggccctctatgcgctgattggaaagaatcagcaaatccaaaattttctgcggcgcatagataatggcgaagatacctgtgaaaactcagttccgctctcgagttttggttaacttttcttgttgtgcccactgtagcgttagtgtaactggaagcagttgagtgtatcgacaatatctgtgcaatgtttttaaaatcacttatcagcatagacaaaaaccatgtattttaaatgtaaaattttgtaggatgtgtgtaaaatatatttgtaaaatttgaactcgaacaaaaaagtacacttctaccctttaaacgaaattacgataataaagatacaaaaaat

SEQ ID NO: 31206 - protein, 492 aa, DROSOPHILA
MAQFCILGVLLILSGTHCSWGFHEETHYPCAFIDTANITGSYGLDGPFVHNWTVIPRHFVAVYDFVIENGIRIPASRHLRACVCKTKPCVRICCLRGEIYDLEKRQCLVPVAGVSSLPSHSHMEVELGNGSLRLVKLQPRFSIHVETPCEHMKAVTKGSEYVHWTLHENGTISHRGHIFSKHYCFTPLLHGNSTWEWQPLACAPEKLYFVLGVREWTYAICLLIAILSMFIVLMVYLMCSEMRNSFYGVAIKAYAICMILGYALLAYLTLHNPANLSNAACRILPSLALMNLVLSFYILSFIAFKLYLSFYGVVFTKLMFWLIFTPIVLVAVGWSFFVGFSYYGSRLIFGGDTCWFDPRNWSVMIYFYAPVFVACAISGFFYVLSQIYIRDQPDIETEKSFESIEKNRFKSFWKYFGYTAVVWVVCICSFAFNYYWENRSHLNYAVSFCMAFHGFAALYALIGKNQQIQNFLRRIDNGEDTCENSVPLSSFG

SEQ ID NO: 31207 - DNA, 4177 bp, DROSOPHILA
gcatctgcatctgctactgcgtgcatttaattgcaaatgaagcaaaagaggagcgacgcagccaaagcgctgacaatgccaattgccagaatcaacttcaaccctttcccattgccaacggtggtgggaaaaaagtgcatccgtcggaggcatcaccacatgcaatggcaaactgcaaatgacgtttaatcaaagttgttgaaattgatagcattgtttgtagtgcacgcgcgccaaatggcaaaatgcattttaaattgcgctaaatgtgttaattaaagctaccccagtgccaccatccaacagacacgagtttgcttttgccgctcattggccgtgattattgtggagccaagaacgaaatcccactaaataagtaaactgctagctaggtagcaatgcaacagatttgtattagacaaacgggtgtgtgagtccggaaaattgcaacttagttgctgtggcaggcaataaaataaagtcttagccaagcgccaggcaaaatctgggggcacttttaatttgttgtgcaacaaattagcatttattttcattacgattccaacttgccgggtgtgtctgtctgcctcaccgcctcatcgcctttttccattcattttttgtcagctcttatgcacgttgtttgcttttaattataaatacatgtaagctaagcatttttaaccctcggtcgtgcattatgatatacaacttttaaaggtaatgtaaaataattcttatatcgtattataactttatatgaaaatcaataatacaagtaagttaaatgtggtatttttaagctacaacgaaagagcgtggataatatttacagaatgtaaaatgccataagctataaacgctgctttagctgttctaaaaaaaaatccattcacatctttttttgcccatccacattatgccaccccatttttgtgcaatgggttaatgcagcaaatccccgccatgcaacatagaaatgtgcgcggaattcttgcattcaattaatgcgtgtgcgagtatagaaagcatcgctgcgtcgccgctgctgaccattctcgtcctcatcccagaaaccatctgcatccgtatccctatccctatcccgatccctatccctgtggccatagccatagccataaccatgaccatcgtcatcatcaccttgccgtcgctgggcattatccaagtaagagctcacgcccgactgagcgcccaacgaagctgaagaccacggtgcggatgagtaacgctgcctgccataagaccaaggatgccgatgggagtttgtgccagcatacgggttatagtggtgctgatagtaatcggagcccgactccgattcaaagtcgggccgggacgagtggtcgatgtgtgtgcgattaggatagaaatcgccgccatcggaggtggagaaggtctgaggcggaggtcggcgctgcccgtaattataagcatcatcattcgcgttgtggggccgataatcgtgatgattttgctgagggttcgactggtactccattggctggcgttggggcggcttattggccatctccgtgtgacggctgtagggcgattgcagcaccaccgtgggcgtaacaatggagggcggcacacttggctcgacggccggaactaaagcagcctgatgattccaagatgatgccgctgccgatgccgttaccgattcggtggccgttgtcgaggtctgttcgcgtgaattcatctcggctaatttgttgaaacgattgcgagtgccgctggctgtgagcaccatcacggtgggattcatgtcagccatatgatccttcaggcagttctgcagcatgttaacaaagaagaagaacgagagcagcgttagtgcgttcatcaccgaaccgctgctcttcttcgatttctttgacgatttggtgggcggaggagccggtggtggaccagccggcggatggtgggcagatggatatgcgggcccactgcccgcactactgggatgaaaggaggagaagctacccgagggtgggtcatgctgcagctcgtactccacggatggctctatgccgctgcaaaattcaaactggcattagatgcggaacttgcactggaattggggttatggtttgactttgatggccagtgcacaggaagaaataggtaatttaggttgataagttcgaaactttagtattcattagtatcaatattattaagtatatattcatcttcaaatagttatttatattttttcataacagtttaatttctttgtatatttggaatgaattttcttgttcatcccattgcttttctctcagtgcagcggtggttctttgcttacccgtagccggagtgtccgctgccagccgccgtggccgcataagcaccgttgtggctgctggcggccgccaggagcggtggtcgtccctgctgcccctggtatccttggtgtccttggtggtaatggcccggcaagtagtggctcgggtagtagtggttgggatagtaatgcacacgctgcgtttgactgcaagagaaggttagaaggtgagtggtgaaagcgggcaagcggatgagtgagtgggggggggggggggttgggcatgtggttgtgtggccgagacgccgcttctgtttgtgtcccacattagcccggctaagtgcctgaggtatcagtccgcgcccgcagtggctgtcttttgggccaggggtcgtttgcgattgcagttgcctccggcactccagcacttaatctttaagccaaagagcacactttatcctgttgcaactgactaaactctttcaaggctcctttaagcgattattaatattacgtaggatagaagaaagaagtttgttaaagcgtttaagttttgcatatatcaatgactgaaaaagaattaattcattatttacgatgttgtttagcaggacttcttgataaatatataaaaagcacttaagcgagttcagattaacaatataattctagggaactgagtgagtgtgccacttcttaattatatcaaatttaatttgatttggctgtatggcaaatacagtcgacatcccaatgcctttgaccatggcttacgcataattatttcctgagatggctgaaagcagcggatgttgttcctgctgttgcacgttgagttgatttgtcatttggccgtcggacattttcaccgtctttgagttcaccaaattcaattgctaattgatttgtgccgaaaagcgcgcatgtttatcactacacggtgcaccagcgtggctcattgtcgctggtgctcaacctgccataaaccgatggcaactcgactgcagaagccgcaaacaggacgatcaggactaacaggacgagcacgacgaactggagtttggggctgaagcagcaggagatgatgcgcccaaccaaccgcaagtgacaatgtcgtttaggcaactgggcaaagcctttcccagacacttgcctggcaggcggctattaacgcaggtgaacttgaagtgggtggtaatcgtggtggtgctgatagtggtgttgctggtgatgcgggaaagaagagaggcaggcgactgtcattgtcagctgctaagtgagtttggctacaactagcaacttgcaactgcaacggccttaaaacaactactcaatggcagtgttggcaggtacggctcgagcaaagcatttgtaccaatacttaaactaggtacaagtacaaaaattacaaaaaacatagtaactcacttattaaaagaagaagttatagattctaaacgagagctccttactttatccactttgctatattgcttctttattgaatttcaggaaaggtaatctttagtatcttaatttaattttgtactccgtggagaaagtatttccatttcccatcactgttcgtaacacgtacccaaaagccagctgacaattgccggcaaagtgttttgtggcgacaacggccaactgacacacacctgaattggagcgttgcgttgcatgcatgcgctgcacatttcggccaggccagacaattagtgagcgacaaaaggccgggaatgctccttggcatcaacccccccccccctacactcctcctactccctacccttaccgattcctgtcagtgttaatgacgctccagtcgcttgtttattgcattaaaagctctatggatgc

SEQ ID NO: 31208 - DNA, 1335 bp, DROSOPHILA
atgtccgacggccaaatgacaaatcaactcaacgtgcaacagcaggaacaacatccgctgctttcagccatctcaggaaataattatgctcaaacgcagcgtgtgcattactatcccaaccactactacccgagccactacttgccgggccattaccaccaaggacaccaaggataccaggggcagcagggacgaccaccgctcctggcggccgccagcagccacaacggtgcttatgcggccacggcggctggcagcggacactccggctacggcggcatagagccatccgtggagtacgagctgcagcatgacccaccctcgggtagcttctcctcctttcatcccagtagtgcgggcagtgggcccgcatatccatctgcccaccatccgccggctggtccaccaccggctcctccgcccaccaaatcgtcaaagaaatcgaagaagagcagcggttcggtgatgaacgcactaacgctgctctcgttcttcttctttgttaacatgctgcagaactgcctgaaggatcatatggctgacatgaatcccaccgtgatggtgctcacagccagcggcactcgcaatcgtttcaacaaattagccgagatgaattcacgcgaacagacctcgacaacggccaccgaatcggtaacggcatcggcagcggcatcatcttggaatcatcaggctgctttagttccggccgtcgagccaagtgtgccgccctccattgttacgcccacggtggtgctgcaatcgccctacagccgtcacacggagatggccaataagccgccccaacgccagccaatggagtaccagtcgaaccctcagcaaaatcatcacgattatcggccccacaacgcgaatgatgatgcttataattacgggcagcgccgacctccgcctcagaccttctccacctccgatggcggcgatttctatcctaatcgcacacacatcgaccactcgtcccggcccgactttgaatcggagtcgggctccgattactatcagcaccactataacccgtatgctggcacaaactcccatcggcatccttggtcttatggcaggcagcgttactcatccgcaccgtggtcttcagcttcgttgggcgctcagtcgggcgtgagctcttacttggataatgcccagcgacggcaaggtgatgatgacgatggtcatggttatggctatggctatggccacagggatagggatcgggatagggatagggatacggatgcagatggtttctgggatgaggacgagaatggtcagcagcggcgacgcagcgatgctttctatactcgcacacgcattaattga

SEQ ID NO: 31209 - protein, 444 aa, DROSOPHILA
MSDGQMTNQLNVQQQEQHPLLSAISGNNYAQTQRVHYYPNHYYPSHYLPGHYHQGHQGYQGQQGRPPLLAAASSHNGAYAATAAGSGHSGYGGIEPSVEYELQHDPPSGSFSSFHPSSAGSGPAYPSAHHPPAGPPPAPPPTKSSKKSKKSSGSVMNALTLLSFFFFVNMLQNCLKDHMADMNPTVMVLTASGTRNRFNKLAEMNSREQTSTTATESVTASAAASSWNHQAALVPAVEPSVPPSIVTPTVVLQSPYSRHTEMANKPPQRQPMEYQSNPQQNHHDYRPHNANDDAYNYGQRRPPPQTFSTSDGGDFYPNRTHIDHSSRPDFESESGSDYYQHHYNPYAGTNSHRHPWSYGRQRYSSAPWSSASLGAQSGVSSYLDNAQRRQGDDDDGHGYGYGYGHRDRDRDRDRDTDADGFWDEDENGQQRRRSDAFYTRTRIN

SEQ ID NO: 31210 - DNA, 4677 bp, DROSOPHILA
ttgagattcgcagtgacgggtccttggggcaggtaatggttgcagagccattagcgttcaatttccatgctgcaaggtaaaaactaagcgagctgcaaaattaacctgaaacagccacccactttctatgcgaacacgagccgctcttagaacggcgaactttatgttctatatggcaaagtttgttgcaatacgatgatgcatagcgggcgaaaattaaaaatggcattaaatatataacaaacttttaggctgttggtctgattctctagttattagttttctatgatctaagtaaattatgatttattacgcgtcagtattagactagttacttaatttactacgtaaaccttttaatatttgagaaaatccatttatattttcctttctgcttttggaaaagaaacaatatataacattgttccatttgaagcttgagttgaattttcatttcaagagttactgcgtcaggtgtttgctgggttattgaaatactttgcattactcgtactgcatctgtgtgccacctttgatattcggtgtcagaagaattcttatgcaaaatagaatttttgtggccaaccaggactagttcaagcactgagtatccgatggacacagcgttttgaggggggcatgaacagtaaaaccacaaggcgagtacaacgtgaatattcctttatttgaaatatgcatttaagttaacttagcttagcgaaaaacacaaaaccagtgtcgctatccgacccagtaacccgcccgcccagcaaactcgtcccaaaaaaacgacaccggaaaattcacagacacgtagagaggaagtttcatttttcttcatatcgatggggctactaaaggtagctcaaatgcttggcattctcgtagggacaactacaatccaaaaaggataaaaccaaaacaaaaaaaaaaaaaaaatcaatgaaaactaagaaaacccaagctcggaccgcaaccgcagccccaacatcacatcgatttacgcccagatccgcaccaccagccgcatcaggagcagcatcatcggcgtcgccatccagtgccactgggccaatgccacggcggcgtcgtgggcacagatgttctggaggacggcacagttcctaaagtgcttctcatccgacagcattttggccgtctcgcgggcaaactccgccgagtttttgtagcacttgaagcgggcactgttgtagatgcagttctcgtacgcgtagcgggcactgtaaaatgttgaagtaccgaaacttgattgatatcgattcccgggaaacatgtcattcagttgccttggccacaacacaattgggttggtaatcgaaaaagaagggggctcagttggttcaaaggaaaattgtgcaatacaccaaaggccgttaaaagtttgataatagcaaaaggcaaaacaaaatgtggtctattgttcacccaagattgctggccattaaagctcaaactataaagtatattggtttacaatataaactgaaaatattaaatatatgtggtaaagaatttcacaccttaaaaaccaattttcttattgatatgataaatattcttaaaggtgaaaaaataatatgtagatatagcccaataaagaaataaaatattcttaataattgtagactaaaagagttgaaaattatttgaagaatattgacttttcgaaaagcatttcgattggaaaacaaaaacatggaattatcagacaatcttaagccaagccgtaccagcagaattcgaggaacttttcgctggcgttgcgcctttcgtcgtgcacctcttcactaaggatgttctcgaactcggtggtgcaggtgacccagtccagttggatgtatgcaaagcagtccttgtgcctcagatagtctgcaaacgggcgggaaagagtgcttcaaaattcgtgtatacataacgctccttttgcttgtgcactttaaggcttgtcaagttgggtttttggtgtcctttgttttgggccttatcggttgggggatgggctattatctttaatctgcgggattttgtgtactgtgtgatatgcgtgtgttcccgacaccccgacgcctgtgggtatccttagtgctatttttcgtgcatatgtgtcagcttggcaaattgatttttgagcgctttaaaagaaccctactaaattgcacagaacttaccacgctgaaaatcggcgtcgccgcagaacttgtagaaaaatcgccgagctccctccacattattcttaaacgtgcccatctttcgatcgtccaggcaacgcttggagtaagtatcgaagcacctcatgccacggttgaatatgctgcaatatgtaattcgatttgagccagggacaatcgagtgaggtctgtctaattgagtgccactcatgttgcgtctccggtgccacagctaatttatgtgcatgtatatgaataaaatgtccgccacttaaatgctttaatttttttaaattaccctaaattcaactaccaataaacatgaagtctatgtttatgtctatgtctataaaactgcaatacacttccactatttttaatcaaaagtttctctcgtcatgatggccctataaaaatcctaagatatgcctaatattacgaaactatcattgattgttatttactaaaaaaaaaggtcaaattgttcgaaaataattcaaaaactataattttagcctgggtagaattaacatttctttcgctatcaagagtaaagctaataattaaattactatgaatttgaatttaatttacgcgttttgcattgcacaaaattcaattaaccattcactttgagtacaatattggtagaaaaaataaaactcgaataaaagagtttaccaaaatttaagtaaaaatgcattagtgtgtattgattatcatcgacattcgccacgaattattagaagagcacttcaattagtgaacttattacccactaaagccaaattctgcttatttattcgccatttgaagtcagaataattaattatttcgcggttttcaatgttcttagcattggctcggctttaagtgtttccttgcggttgatattataaaatggttcccagaaaattcatttgaaatagtactttactgttgtgacttctccaaagatcttctgttacccgagaaattatgttcaagcaccaaaactttgcccattgaaggcatattaataccaaaagtccgtaatttatttttggcacttggcgccggcataattaatcatctccttggagtggcagacaaaaaagggcttgtcctaatggtattccatgtacaacttctgctccctgcggcaccggggaaatatgaataaatttcctcaatggggcacaatcaataatgtatattccccgtttattcgcattcgttattgcaaattgcgccctacttgcacttggcggtgatctcctttttgctgatgacgattttcgtgttctgtaggaaatccattagatgcggcggcagatccttgaagcactcgtccaccattttctgcgtgctgccgcactcctcgcggcccgtggccaccgtcgattccgatatattcccttcgttctgggccagcaccaagttgaccaaacgaagcaagatgacaaagtaaattaaaatcacactgcccagtgagcttctcacacacatcctcgaaggacacttgttgccacaaatcgactgataggatactaaatgagccgtttttccgttgtgccgtataaacgaaccgcacgaaagataacaccgcactgaagcgttcaaccgcaaacaggtcctataaaaaggatatcgcaatcaggacctctgttaattcgctgttaagcatatgttaagcgcaacgcatgcgcagtagcgatgccagcacgtgcatcgccctttgtttaccatacaaagatagccgactttttaacaggtagaccgacccaccgccaccggagatggagctcggcataaattagcgtccgcttcagcgataccaggtgcggatggaaccgcagtgctcccttcaggatgagtttaagtgattgattgtcctgaatcgttgctggatgcgttggcatacccagccaaacaaagagcactggttttaagttaattaagtcacctgtttgacgtcctcctccgggtgtagtatttcacaaatggaatccggaataccaaggccaggtttcgtattgtttggaattcggcaattaagaaacccaacactcttttcatacgcatttttcccaaaaccgcccacacaatccgatgtacaattacattttacgacaaagtaccatttacaattaaaatttaaatttagaatttactttttattgaatttgttgtaatataagccatcagctaatttggtgaccttagaatgtgccacttttctttctcggaccttcgagtagttcgcttaaagtttatgtcaatattacgcattcattttcgtctgccgcaatatttaattcataactaactttcattcacttaaatcagtcaatgtcaatgaatttctgggccaacgagcaacaggctggcaaaagagcactggacttcaattattcagcatgcaaaactttcgaaaataatgtaattaatgtgaatcgaatcatattggttgatggttcccgataaaatcatactgtgaacgcaaaaa

SEQ ID NO: 31211 - DNA, 774 bp, DROSOPHILA
atgtgtgtgagaagctcactgggcagtgtgattttaatttactttgtcatcttgcttcgtttggtcaacttggtgctggcccagaacgaagggaatatatcggaatcgacggtggccacgggccgcgaggagtgcggcagcacgcagaaaatggtggacgagtgcttcaaggatctgccgccgcatctaatggatttcctacagaacacgaaaatcgtcatcagcaaaaaggagatcaccgccaagtgcaacatattcaaccgtggcatgaggtgcttcgatacttactccaagcgttgcctggacgatcgaaagatgggcacgtttaagaataatgtggagggagctcggcgatttttctacaagttctgcggcgacgccgattttcagcgtgactatctgaggcacaaggactgctttgcatacatccaactggactgggtcacctgcaccaccgagttcgagaacatccttagtgaagaggtgcacgacgaaaggcgcaacgccagcgaaaagttcctcgaattctgctgtgcccgctacgcgtacgagaactgcatctacaacagtgcccgcttcaagtgctacaaaaactcggcggagtttgcccgcgagacggccaaaatgctgtcggatgagaagcactttaggaactgtgccgtcctccagaacatctgtgcccacgacgccgccgtggcattggcccagtggcactggatggcgacgccgatgatgctgctcctgatgcggctggtggtgcggatctgggcgtaa

SEQ ID NO: 31212 - protein, 257 aa, DROSOPHILA
MCVRSSLGSVILIYFVILLRLVNLVLAQNEGNISESTVATGREECGSTQKMVDECFKDLPPHLMDFLQNTKIVISKKEITAKCNIFNRGMRCFDTYSKRCLDDRKMGTFKNNVEGARRFFYKFCGDADFQRDYLRHKDCFAYIQLDWVTCTTEFENILSEEVHDERRNASEKFLEFCCARYAYENCIYNSARFKCYKNSAEFARETAKMLSDEKHFRNCAVLQNICAHDAAVALAQWHWMATPMMLLLMRLVVRIWA

SEQ ID NO: 31213 - DNA, 4018 bp, DROSOPHILA
gaccggcacttgggatctgtgagcaccatcacctttgtggacgacaaccgacggtttgtgaccacctcggacgacaaatcgatgcgcatatgggagtgggacattcctgtggacatgaagtacattgccgaccccactatgcattccatgccggcggtcacattggcgcccaatggcaaatggatggcctgccagtcgttagacaacaagatcgtcatcttctccgccctcaatcgcttcaagatgaaccgcaaaaagaccttcaccggtcacatggtctctggctacgcctgccagctggacttttcgccggacatgagctatctggtgtcgggcgatggcgatggcaaatgttatatttgggactggaagacgacgaagatgtacaagaagtggcaggcgcacgacggcgtctgcatcagtgccctctggcatccgcatgaggccagcaaagtggtcaccgctggctgggatggccagataaaatactgggactaatggtccgcacaaaataacatagatagatgtaagccaaactgatgtgtaaattgattgattatattgcttacccattatgttccaattgagctcatttaattcatgtgtatcaagcccaattcctaagttatttatccatccggttgcttgatattccctcccccctttgcgagattggcttttatttaccttcagttgtgataagagtacgcatgcgcagtgcatgtgaaatggcaaacaactcgacggatggtcggcccaccacccaatggcccagccacccccactggcaagtcaaaacatatgcgagtagtgctggccaaaatcgatattttccacgaaagtcgcacaaacgtcggacggattgtggaagacttgtcaataatctgtaaaaaaaacgcgaaaaaaaaagagttctacggcgtagaggagatgcagtaaaaggcgacggctaggtggacaccgagcatcagctagacacccgtaattcctgccagcggccatggccaagccccactcggatgcggatgcctctggcctgggctacgcctaccagctgccgtccggcggcctcctgctgcgcctcaaatcttccctctcacagttcagcgatttgttcagcgacttcagcaggtacatctcgcccgcctatcatcacgatcgctgcgagcgatccgtccatatgcgactctactcgatgcacaagcgcgagtttgtcatggtcttcctgggattcttcacctgcttcggtctgggcatagtcatcgggctgacgggaccgcccataaccagcacatcatcgctgaccgcccagcagattctggcgaacacctcgctggcgcatagcccaacggtcctggggaagggacccttcgccatgaagtcgccgctgaccaccacatattcgcagcaaatgtggctgatagccaagctggtgacggacaacaatgatggtgggtcttgtgattgcgactattttacttttcttacatttacatatatgtatgacaatcattcagacgagcggtacgacaagagtttccaagtgagcgtctcaatcgatggcataaacgagcagcacaagccccaaagtgtcctcggatccggagtggctcacaaccggacgcggcacttggtctgcgtacggaacgactgcgaggagttcacggtgatgcatctgggattcctcgactatgcccactatattatcactgtgcgcttttacggcttggagtcattccatcagaagtataatatacgcagcataacattttacgtgagtggcatggcattcccattgtagtgatggtcactaactttccacttcagttcaagacttacagtccggacttcacgcagattgaaatctggtttaggtgcatctttctgctgttcaccttcattgtcatagtaagtttttgtcagctaataagccaagttatgtggctctagacatatgaaataatactatctttctgctttcagtgctggtatgcccacaccttgcgcaagtatccaatctatgattggtccattgagcagcgatggttgtcggtactcctgcccctgctccttttgtacgacagtaggtgtttcacccggattagttagcgcgtatagactaatgatcttctacgcacagatcccttcttcccgctgatattcctgatgaactcctggctgcctggaatgctggacgccattctgcaagcgacgttcctttgtgctctactcatgttttggctgtgcatctaccatggactgcgacagaacgagcgcagcttcgtgcgattttacctggtcaaggtgatcgtcgtcctgcccatttggctgtgcgccatcgttttggccacgtgggagaaatgcaacgagctgagggatcccacatacagtcactttgtggatacgaaaaactacaatgtgggtatacataatacgtactaatgaaatgtgatacgaaaaccaaaccattcttagggcttcaagatgttcttctacatcgcctgctgcatgtatgtgctctatctggtgctgttgctactgcgggcgtacaccgagctgcgctccatgccgtactttggtgagacataatgcagtgtgctccaagcctgatcttattattataatgcttaatccatttggccagatatgcgcttgaagtttctcacgctgctcatgctgttcgtcctgtccatatccatcacggtgacgacgtgtcgctttggcttcggcatcctggaggataactttgtcgcctcacttaacaccacctatcgcagttcggcgcagtttatgtgcttctacggactgcttaacttttacctgtacaccatggcgtatgtgtactcgccagatggacggttcgcccaggcggagctggctgtcaccaaggataatccggctatttccatgatcgacgattccgacgaggatgttgtctacggttccgacgaggagtcacggcgaccgctcacctctgtgggcggcggtgctggaaagaacgattacgacagcgattgatcggcgattaagaagtatccgcggcagaacgaatacccaaatgttccatagcgcaattgaagttttagtgctaaatgtgtacaaagtattccctaatataatgcataaattaacttaaaatttcaaaaaattaatctctggttgatcaatgaaactggagaggatcgaaatatgtttgggtattcatgattaagctgaattcgaaatttatgttaaaaaaaaagtataaataaacccaatagttcgagttttgttgtatgaaaagtatttacaatcgatatttaccatattcgctttttaactaattgggttctgattattttactagactgtttattagataattaacacatttcgccaggtgatttcaactcgaaagcatagcaaaaaccctctagatgccctggttgatgcctattttcgtcttggtgaggagaccctcgtcgcccatgtctgcattgtagccaggacggtacttcatgccgggagcctgtgtgcaaaggggcagaattaatgtgaaaagaaatcgaacagggaaatggaaacaccgaacttacattgaaccagacatcacgccagactttgccgtcgtcagcgctgcgcaccagctccgggacatcgaaacgcggcacattgaagtaattcatcagatcgggcttctcatggcagtacttgatacgggcttcgcaccactcggcctccagcgggaaacgccagtcgagcatcttcttgttgtgaatatcggcctcaaactggttgaagtcgatgcgttcgatatcctccaccacaacctcagtctcaccgccggctgtccagtcgtagatgagcagctcggcatgggtggagatgtccttgaggtactgctgcttgtacagctgctccaaatcgctcaagtaggcatcgctgaacacctttgactgcacctcgtagtccacattgcgtgccttgatctgcttcttcacggcatcgaccggcagatccaagtagataaccaaatgcg

SEQ ID NO: 31214 - DNA, 1644 bp, DROSOPHILA
atggccaagccccactcggatgcggatgcctctggcctgggctacgcctaccagctgccgtccggcggcctcctgctgcgcctcaaatcttccctctcacagttcagcgatttgttcagcgacttcagcaggtacatctcgcccgcctatcatcacgatcgctgcgagcgatccgtccatatgcgactctactcgatgcacaagcgcgagtttgtcatggtcttcctgggattcttcacctgcttcggtctgggcatagtcatcgggctgacgggaccgcccataaccagcacatcatcgctgaccgcccagcagattctggcgaacacctcgctggcgcatagcccaacggtcctggggaagggacccttcgccatgaagtcgccgctgaccaccacatattcgcagcaaatgtggctgatagccaagctggtgacggacaacaatgatgacgagcggtacgacaagagtttccaagtgagcgtctcaatcgatggcataaacgagcagcacaagccccaaagtgtcctcggatccggagtggctcacaaccggacgcggcacttggtctgcgtacggaacgactgcgaggagttcacggtgatgcatctgggattcctcgactatgcccactatattatcactgtgcgcttttacggcttggagtcattccatcagaagtataatatacgcagcataacattttacttcaagacttacagtccggacttcacgcagattgaaatctggtttaggtgcatctttctgctgttcaccttcattgtcatatgctggtatgcccacaccttgcgcaagtatccaatctatgattggtccattgagcagcgatggttgtcggtactcctgcccctgctccttttgtacgacaatcccttcttcccgctgatattcctgatgaactcctggctgcctggaatgctggacgccattctgcaagcgacgttcctttgtgctctactcatgttttggctgtgcatctaccatggactgcgacagaacgagcgcagcttcgtgcgattttacctggtcaaggtgatcgtcgtcctgcccatttggctgtgcgccatcgttttggccacgtgggagaaatgcaacgagctgagggatcccacatacagtcactttgtggatacgaaaaactacaatggcttcaagatgttcttctacatcgcctgctgcatgtatgtgctctatctggtgctgttgctactgcgggcgtacaccgagctgcgctccatgccgtactttgatatgcgcttgaagtttctcacgctgctcatgctgttcgtcctgtccatatccatcacggtgacgacgtgtcgctttggcttcggcatcctggaggataactttgtcgcctcacttaacaccacctatcgcagttcggcgcagtttatgtgcttctacggactgcttaacttttacctgtacaccatggcgtatgtgtactcgccagatggacggttcgcccaggcggagctggctgtcaccaaggataatccggctatttccatgatcgacgattccgacgaggatgttgtctacggttccgacgaggagtcacggcgaccgctcacctctgtgggcggcggtgctggaaagaacgattacgacagcgattga

SEQ ID NO: 31215 - protein, 547 aa, DROSOPHILA
MAKPHSDADASGLGYAYQLPSGGLLLRLKSSLSQFSDLFSDFSRYISPAYHHDRCERSVHMRLYSMHKREFVMVFLGFFTCFGLGIVIGLTGPPITSTSSLTAQQILANTSLAHSPTVLGKGPFAMKSPLTTTYSQQMWLIAKLVTDNNDDERYDKSFQVSVSIDGINEQHKPQSVLGSGVAHNRTRHLVCVRNDCEEFTVMHLGFLDYAHYIITVRFYGLESFHQKYNIRSITFYFKTYSPDFTQIEIWFRCIFLLFTFIVICWYAHTLRKYPIYDWSIEQRWLSVLLPLLLLYDNPFFPLIFLMNSWLPGMLDAILQATFLCALLMFWLCIYHGLRQNERSFVRFYLVKVIVVLPIWLCAIVLATWEKCNELRDPTYSHFVDTKNYNGFKMFFYIACCMYVLYLVLLLLRAYTELRSMPYFDMRLKFLTLLMLFVLSISITVTTCRFGFGILEDNFVASLNTTYRSSAQFMCFYGLLNFYLYTMAYVYSPDGRFAQAELAVTKDNPAISMIDDSDEDVVYGSDEESRRPLTSVGGGAGKNDYDSD

SEQ ID NO: 31216 - DNA, 2432 bp, DROSOPHILA
gactcgaggtgaatgatgatgtcactttgctgccgcctcttaccgatcccggcaagatcatctgcattggtaaagaatgaattaacatacatatgtataaacatatgtagttggaccctgaccttcaaaatgacgtattctcgatctgcttgcaggtctgaactaccaggaccactgcgatgagcagaacaagccgacccccaaggaaccattgttctttagcaagtttaacaatgccctggtgggtcctcaagataatgtcatcgctcatgcggccagcagcgtaagtgaagcaagagataacaagagataggctcatcgagataaccaaccgaccaaaaaaaaattccacagaaaatcgattgggaggttgagctggtctgtgtcattggcaaggtcgcccgccaggtgcccaaatcgcaggccatggactatgtcttcgggtattcggtggcccaggatatctccgcccgcgactggcagaaggaacgcaacggtggtcagttccttatgggcaagtcgatggacacttttctgccgctgggaccggctgtggtgcacaagagtctggtgccggatgtttacaacttgaatctgaaaacctgggtcaacggcgtggagaagcagaacggcaataccggcaacttgatcttcaagctggacgatgtgatcaatcgtctgtcgcagaccattaccctgctgcccggcgacatcatagtcaccggaacgcccaagggcgtgggcatgcatcgcactccgccggaattccttcagcccggtgatgtcgtgcagtcggagattgttggattgggcaagctgtgcaacaagattgtggctccctaagattgtcaactcatttggcttgttgtgtttgtaaagtttgtgttattagtgaaacaatggcatttaatagatgattttgtagttttcaatagataaactataatcagatattttggttttgtttaattcaagtatgtagtatctttgattagccaggtcacaccttaaaggtctttgactgtgtggcgtagtactcgttgcggctgtgatagggcttatagggatcgttgatgaaatgctttgggcgccgccaatagctggtgaccatcttgtccagcagccagctctgcgtggcattggtgaagacgtgctgcttgaggcggcgtcgtaaagctgcggatttcttgaagagcttcttttggcgaccggaatgggtgcgtatccaggcgccccagtccaggcgcttaaaacgtttcagtaccgccttgacggtctttcgtttacccttcaccagcgagaatttggtcacgttgcgtgtgtttgatggtgttcctgtggctgctagcacacccggcagctgcaggagctggtgatgagcaggagatgccagtgatggcgtgggcaacaggcacggacgggatagagtcatcaaagtggcacgttgtgtccgctggaccagaggaaccaacgaagatgcagccggcgactggcggcaaacgcttcgcagcgctgaaagttaagaacaattaaagtaacgtaaacttgtaagccctattagctgacttcaacttaccgcttgtcacaaaagttcttagcatttcacttaaaacgacaaagataaacctataattccatacaaaacgcaggtgctcttcttcttatcgaatcgcgtaacagtcagctgtgtgccattcacagcgaacaaacatagattagcttgctattggagatgggaaccggtcatcataagaactatcgcaaatgttttgggattcacccaaggaatggatcaagttcaatttttcgttgataacaattaaggcaaaaggatcccttaaccatgtaatccatttgtagaacactgacaattctgacaatttaaaacttgttataaaaattgttgcttaaacttatgcgcccatctccaaatcaaatgtattttgactggcctatcgagtacatgcgtatatgttgccgacactttttccatcaaaacacaaaccaaaattgagtgatcaaattcgagtggcgcgggcaagcgaaacgaaaaggacgacgagcagcacgcaggactcgtgtgcgtgtgcgtgggagtgtggggaatggaagaggaagcagcagcactggccagccattcacccaccagcgctgacgcagtcgagccagcttcgaacgaattgggcaatatttaattcacgccgccgggacttgaaatttacggtagccgaaggagcaggagcacgagcagagcaggatcacagcaaaatcaacaccatgtatcggctagcggtgcgagatcagtgcaagtgcgccctgcaggtgaatttttgacccattcatttctagctatttgataacgtgaaaatcgatcgtcacgttgccccacacccccgcgcgcccacaaacaagcggttggcgaaaatacaaca

SEQ ID NO: 31217 - DNA, 432 bp, DROSOPHILA
atgactctatcccgtccgtgcctgttgcccacgccatcactggcatctcctgctcatcaccagctcctgcagctgccgggtgtgctagcagccacaggaacaccatcaaacacacgcaacgtgaccaaattctcgctggtgaagggtaaacgaaagaccgtcaaggcggtactgaaacgttttaagcgcctggactggggcgcctggatacgcacccattccggtcgccaaaagaagctcttcaagaaatccgcagctttacgacgccgcctcaagcagcacgtcttcaccaatgccacgcagagctggctgctggacaagatggtcaccagctattggcggcgcccaaagcatttcatcaacgatccctataagccctatcacagccgcaacgagtactacgccacacagtcaaagacctttaaggtgtga

SEQ ID NO: 31218 - protein, 143 aa, DROSOPHILA
MTLSRPCLLPTPSLASPAHHQLLQLPGVLAATGTPSNTRNVTKFSLVKGKRKTVKAVLKRFKRLDWGAWIRTHSGRQKKLFKKSAALRRRLKQHVFTNATQSWLLDKMVTSYWRRPKHFINDPYKPYHSRNEYYATQSKTFKV

SEQ ID NO: 31219 - DNA, 4745 bp, DROSOPHILA
ttggaggcggtagagagttgttcctgctaattctttcggtttgttgtcagattcatgaatatgtttttatattggtcatagcgagcagactttgtggttttcaacatattatttggtgggttagctatacatatgtgtttattatatgtaattcgatcatgtgtttcggttttatttggcacctaagcctgggagttctctatgctgagctgaacgataatcttcgctttgagtcaggcttccaaacggcatttttaaggaaacagcaaagaattagggtacaaaaatctatggcacttttcaaggagatatcctctgtggttacctccttgcaggacattttcaatgtacacctatttttgagcgcactcttgacacttctgcaagttctagtcgtttggtataaaatgatcatcgatttagggttttctgactttcggatttggtcattctcgcttaaaaatttgatccaaacgctccttcctgttttggccattcaagaagcggcaaatcaatttaaacaaactcgggaacgtgctctggatattttcctcgttggaaagtcaaagcattggatgaaatcggtgagtaagcttattaatcaaggtatattgcagcttatatgatatttatgtttgttttaggtggaaatatttgtcacccatctcaacctaagcgagttcagggttaacttgttgggcctcttcaatgtttccaacgaactatttctaataattgtatctgcaatgttttgctatctggtttttgtaacacaatgtgtaatcgtgtatcgcagacgctatgttatttgataatttatgaattattttaacgtataataaccaatttcaagcctactaatcgacctaatccaattataattattgatttaaggcaaatggaaaatcataacatttatagagttgctcaagtaaataaacaaatcaagctttaagtatattaggaaatcactaagttgtccgatgggaccactttagtcatgattgaacgtttgaagaaggtgagccttccagctctctcggcatttatccttttttgcagttgccactatggcaggatcctgggagtgatttgctttgacataggccaaaggacatcggatgattccctggtggtccgcaataggcatcaatttaagtggttctgtctgagttgccggctcatcagtgtcacagccgtttgctgtttctgtgctccctatgtcgcggacatcgaggatccctacgagcggttgctccaatgtttccgcctttcggctagtctcatatgcggcatttgcataatagtggtccaggtttgctatgaaaaggagctgcttcgcatgatcatcagtttcctgcggctctttcgacgggtcagacgattgtcgtccttaaaacggattggatttggaggcaaacgggagtttttcttgctccttttcaaattcatctgcctggtctacgaactgtactctgaaatatgccagctatggcatctacccgattcgctatccttgtttgctacgctatgcgaaatattcctggaaattggctctctaatgattatacatattggatttgttgggtaccttagtgtagccgctctttattccgaggtgaatagcttcgcccgtatcgagctacgtcggcaattgagatccttggaacgtcctgtcggaggtcctgttggtcgcaagcaactgagaatagtggaatatcgtgtggatgaatgtatatcggtatacgatgaaatcgaacgcgtaggccgcacatttcatcgcctcttagaactgcccgtacttattattttactcggaaagatatttgctaccacaatcctatcctacgaggtaataatccggccggagttgtacgcaagaaaaattggaatgtggggtctggtggttaagagctttgcagatgtgatactcctcaccttggcagtccacgaagcggtcagtagttcacgaatgatgcgacgcctgagtctggagaactttccgatcactgatcacaaggcgtggcatatgaaggttagtgacctcatggtattcctaatcaataaaatgtatattcttctctcgtttgcagtgggaaatgttcttaagccgtctgaacttcttcgagtttcgcgttagacccttgggactattcgaagtatccaacgaggtcatcttgctgtttctgtcaagtatgatcacctactttacctatgtggttcagtacggcattcaaaccaatcgtttgtgaaattggacagatgtacttgaaatataaccatagtgtctttgttggtccggcactttaatatatctaaaagtgaaataaatacaataaccatttcgtaacaattaatataccaccatgtcattagccaaattgaaaaccaaatccagataggggaagaagtgctcgactaactggactggctgctcaaacaatcggctaaaaactaattacttaatgggtaaataaagtatatggtttacggctttacgatgtctggtttgttagtcatgccgcgaatattgcgctgcttaaacgtttccaggatatctgcgattctccttcgcagttgtttcctgtacggaacgttctttggagtgatcacatttcgaattgagagaaaggactcgcagttggtggccatcaatcgaaggggttacctgtggatctgcctggttattagacttttggcaagctgcttctatggctacagttacgatgcatggtctggccaatacgaagatatgtaccttcgagcttttttcggtttccgattgattggctgtctgatctgcagcgtcattatcctggtgatgcagttttggttcggcgaggagctcattaacctggtcaaccgtttccttcagctatttcggcgaatgcaaagtttgacaaattctccgaaaaacagatttggtgacagggctgaatttctcttgatgttttctaaagtattctccttacttttcgtattcatggcctttcgattaatgctctcaccctggttcctgttaactttagtgtgcgatttatacacgtctgtcgggacgggaatgataacacatttgtgttttgttggctatcttagcattggtgtcctttacagggacctaaacaactatgttgattgccaactgagggcccagttaagatcactgaatggggagaataattcgttccgcaataatccgcaacctacacgacaggccatctcgaatttggacaagtgtttgtatctctatgacgagatacaccaggtgtcacgcagtttccagcaacttttcgatctaccactttttctcagccttgcacaaagtcttttggccatgtctatggtttcctaccacgccattctgcgaagacaatacagtttcaatctctggggcttggttatcaaactactcatcgatgtggtattgctgaccatgtccgtgcattcagctgttaatggttctcgattgataagacgtctgagctttgagaatttctatgtgactgatagccagagttaccaccaaaaggtaagtccaggagctataatcttaaggattaaatataatacttttccaatcttgcagctggagcttttcctgggccgccttcaacaccaggagctgcgagtgtttcctttgggcctctttgaggtctccaacgaactgaccctgttctttctctcggcaatggtgacctatctagtctttctagtacagtacggcatgcagtcgcagcaaatttgattcaacgtcacgcattgcttgcggcattgcaccctaccaaaaacctcgcgatacgatacacctgccaagcccacttgcccacttgcccacctgtcctgcggttgcacgcaaataaaacaatgaataaagagaacggaatttcataagacaaaactagaaaaaaaaaaaacaaaaaacaacaagctgaaatcggcagttgcaggacccaattcccaatttccggctaaccgtttgttccgctgcaatttttcccatgaaacttggtcgcggcattaattaaacattcatgctgacgtcaagcagaaaatttatgcggcacttggtagatggtgggaccgaggggggggggagaggggcgcattatcagcgcacagttcacgctaagaggcgcataaaaacaaggccgaggccgtcgctctaattagcataggttagggtacaaagccggtcctcagaaagacacaaaacccataaaggtgcacttgccactgcacttgttctttggctggcaggttcaggctcagaaaaaaaaaatgaaaataaaaaacaggaaaaaaaataaacataaactggggacaaagggccgaccaacggcggcgataataaaaaatcaaattgccgcaagagcagagacccaagatgagatgagcactattatctcggtagtggaactgggctcagaataatgacccaatcggttctgctcctgctcctgctgagatttgcctctttaaagtggaatgttggggtgccctaggtaccctgtaattcgtagggcttgatgggttttttttttgaatgagcttgagttttgaaggctttacatgaacacataaatatataagatctaaaggattttagcgaacaataaagttatttcaattatttgaacttcttatagttcttggctagaagagaattaacaaagtttttttttttgggtatctcccagtcgtagaagggtgaccaaaaatatggcttgtgacttaatttttttgtg

SEQ ID NO: 31220 - DNA, 1995 bp, DROSOPHILA
atgattgaacgtttgaagaaggtgagccttccagctctctcggcatttatccttttttgcagttgccactatggcaggatcctgggagtgatttgctttgacataggccaaaggacatcggatgattccctggtggtccgcaataggcatcaatttaagtggttctgtctgagttgccggctcatcagtgtcacagccgtttgctgtttctgtgctccctatgtcgcggacatcgaggatccctacgagcggttgctccaatgtttccgcctttcggctagtctcatatgcggcatttgcataatagtggtccaggtttgctatgaaaaggagctgcttcgcatgatcatcagtttcctgcggctctttcgacgggtcagacgattgtcgtccttaaaacggattggatttggaggcaaacgggagtttttcttgctccttttcaaattcatctgcctggtctacgaactgtactctgaaatatgccagctatggcatctacccgattcgctatccttgtttgctacgctatgcgaaatattcctggaaattggctctctaatgattatacatattggatttgttgggtaccttagtgtagccgctctttattccgaggtgaatagcttcgcccgtatcgagctacgtcggcaattgagatccttggaacgtcctgtcggaggtcctgttggtcgcaagcaactgagaatagtggaatatcgtgtggatgaatgtatatcggtatacgatgaaatcgaacgcgtaggccgcacatttcatcgcctcttagaactgcccgtacttattattttactcggaaagatatttgctaccacaatcctatcctacgaggtaataatccggccggagttgtacgcaagaaaaattggaatgtggggtctggtggttaagagctttgcagatgtgatactcctcaccttggcagtccacgaagcggtcagtagttcacgaatgatgcgacgcctgagtctggagaactttccgatcactgatcacaaggcgtggcatatgaagtgggaaatgttcttaagccgtctgaacttcttcgagtttcgcgttagacccttgggactattcgaagtatccaacgaggtcatcttgctgtttctgtcaagtatgatcacctactttacctatgtggttcattgtttcctgtacggaacgttctttggagtgatcacatttcgaattgagagaaaggactcgcagttggtggccatcaatcgaaggggttacctgtggatctgcctggttattagacttttggcaagctgcttctatggctacagttacgatgcatggtctggccaatacgaagatatgtaccttcgagcttttttcggtttccgattgattggctgtctgatctgcagcgtcattatcctggtgatgcagttttgggacctaaacaactatgttgattgccaactgagggcccagttaagatcactgaatggggagaataattcgttccgcaataatccgcaacctacacgacaggccatctcgaatttggacaagtgtttgtatctctatgacgagatacaccaggtgtcacgcagtttccagcaacttttcgatctaccactttttctcagccttgcacaaagtcttttggccatgtctatggtttcctaccacgccattctgcgaagacaatacagtttcaatctctggggcttggttatcaaactactcatcgatgtggtattgctgaccatgtccgtgcattcagctgttaatggttctcgattgataagacgtctgagctttgagaatttctatgtgactgatagccagagttaccaccaaaagctggagcttttcctgggccgccttcaacaccaggagctgcgagtgtttcctttgggcctctttgaggtctccaacgaactgaccctgttctttctctcggcaatggtgacctatctagtctttctagtacagtacggcatgcagtcgcagcaaatttga

SEQ ID NO: 31221 - protein, 664 aa, DROSOPHILA
MIERLKKVSLPALSAFILFCSCHYGRILGVICFDIGQRTSDDSLVVRNRHQFKWFCLSCRLISVTAVCCFCAPYVADIEDPYERLLQCFRLSASLICGICIIVVQVCYEKELLRMIISFLRLFRRVRRLSSLKRIGFGGKREFFLLLFKFICLVYELYSEICQLWHLPDSLSLFATLCEIFLEIGSLMIIHIGFVGYLSVAALYSEVNSFARIELRRQLRSLERPVGGPVGRKQLRIVEYRVDECISVYDEIERVGRTFHRLLELPVLIILLGKIFATTILSYEVIIRPELYARKIGMWGLVVKSFADVILLTLAVHEAVSSSRMMRRLSLENFPITDHKAWHMKWEMFLSRLNFFEFRVRPLGLFEVSNEVILLFLSSMITYFTYVVHCFLYGTFFGVITFRIERKDSQLVAINRRGYLWICLVIRLLASCFYGYSYDAWSGQYEDMYLRAFFGFRLIGCLICSVIILVMQFWDLNNYVDCQLRAQLRSLNGENNSFRNNPQPTRQAISNLDKCLYLYDEIHQVSRSFQQLFDLPLFLSLAQSLLAMSMVSYHAILRRQYSFNLWGLVIKLLIDVVLLTMSVHSAVNGSRLIRRLSFENFYVTDSQSYHQKLELFLGRLQHQELRVFPLGLFEVSNELTLFFLSAMVTYLVFLVQYGMQSQQI

SEQ ID NO: 31222 - DNA, 7563 bp, DROSOPHILA
gctgtggggtaataataataataatagataaagttgaatggcgcgaaagagaagtaatgtaaataatatggtaatattcaatgagctgtgaacgagcctggcgataaagtaagttgataaaggttctgtagtgaaaatccctgtattaacacactggtggcttagtccagttaaataaatcgtgaatcatttttgaaggggaaaatgtttactttcaagttgatgaatggtaattggcatcgtattgccgataaaactggaaagtgttcgaaattcgtatgtgcaatattccacaatagctttatgcacttgcttgcgtaccgcataaatatttacctccatttgacttcactcaagcggaaacaattcagtgtgcaatgaattatcttactttcgagtaaatttattaagcatgcagtgggtatttatcaaaggaaaacaactgccttttgctgataagtcaagcaaataaaagcatatgcaaaatgctaccgaagagaaaggagcaggaaaatataatttactttttctttaacaaaattaaagttttaatagtatttattttcaatttcgataaaacatctgtgtcgttatgaatgactatattcttaacaatattccaaaattatactttctcgtccccaaaactttttttcaaaaacttccgcgcaaattttaacagaccaaataaagttaataacaaaatgacagaaaagcttagataccaacgggtttctggtatttttccagtataaccagttgcttgattcaaacaaactttcttgaattaaaactttgattaacgaagtaagttgctgcagtaccacccttaaatttattttaaaaacaatatttttaatgaacacaggttggtatcaattttcaatgggagagccgtgaaccgactccaagttccgaaccaatccagcaatgcacctgcagccctggaattctagttcgcggcgaaccggttcagttgcaaccagttcttcgccaatcaattcctcacgggccgtgtttgttttaagttaaaattagtaaattacccaatgcaatcagcttgccaggcgattcgtgctgcgcacctagacaatcgagtgctaatgcgattcgctaaaatgccaaaaaccagcggccgttgaagaatcgctgccaaatcggtgggttttcgtacataaaactatatgcgaattgttcgtgccagtgtgtgttcgtgtgtgtgtgtgtgtgtgtggtgtgagtgtggccccctctatgtgtggccgataaagggggcggtgtcgttgataagggggcgtggaacatgagcaatgcaaatcctttagacaaagaatcaatttgccaattgtgcgacactcgagagtctcaaaaagtcctaaaagcagggccaaatgcacacacatagtcagtgagtgagtgtatgtgggtgtgggtgggtgcgttagtgaggtgggcggtaaggtcgtgtggaaagtgtcaaggcattttacaacagcggcacacgagcaaggtaaaaccctcgagcccgaatactaaaaccgagccaaaaacaccgcgccccatgcgcagctctgcattaaacatgactaccagaaagtccttcgcggggattccccgcaaatgctccgtcctgctctcgcagtcgcaactcagttctccacatttcgtgtgtgcatcgtaaattgttgcacatttaaatattcatgcagcccgggcagaaagcatagcttatattttttacgattacaattttggtgctttacacgaatttcccacggcgccggcgcactttacatccatgctcgccatctttctcgcactccttcgctctctttcacactctctcgctctctggctttctcctttcggatttttggagtgccatcaaagttttgaaaagtatgttcaagtgctggaccaaaaggcataataatagtatggccaagacaaaggtagcgcctcccatccaccctccccccctgcgaactttccccgcgaacatccttggaacgagaccctcgaaaaggacacattctgcaggtcctgctggcttgtttaccttttcagctggccatcatttccgttgcaaaattcacaacgcccactgtgcggggatacttccttcctaccattggcactttcgacagcattttgtgcatttgtggtgtgtgccgcctgtaattgattggggtttacacctgatatgagtgtgattgacatatcaaacaagtttcggccaggccagtctcatttccgttgcgacaccattaacagtggtccctcgaaaagtgttcccatcacacaagtgtcaacacgccagcccaactttatagtggcattttcaatttgattgattcagatagcattataaacttaacttagtttgtaagtaagattacaaaatatttaggaaattattagcaaattttcttgattaaaatctgtgtataatttttcacaaatgtaaacaaatttgtttatatttgcgtcatctgcttgacagaattctcgcaaagcttcttgacagtttcttaattagacgccaaataaatctgattagcggccttcaactaatggaaaaactcaccttcaccattttcacttgttatatttttccagcgcaaaatgcattcttaacatcagcagctacgaaaacagcaacagcattagcggcaacaacgaatcaacgacaccaataacaataccattaacaacaaatcatcagaagaaaccgaaggaaaacgctcaaagttttggagttgctcactggccgcttagttttttgtttattttttatgttcgtttttggagggcagtaggcgacgacgggcaaaggaagcgggagaaggaaaagcgacggacacgaaaaacaggacacaactcatcaatattcgaaaaagcaattgagtcgaggcatcaattcatcaattattcaaaatgaccgaagacgaaattctctttgacgacgtctacgagctgtgcgaggtcattggcaagtaagttagcgccccaccggctatatctttagccgattctgctgctgacagctggcatccatggccattatctcattatgtattatgtatccgccccgtatgcccatcccacccacccagaagccgtaaatcatgcaactattggcctgggacgaagccagctcccctctataaaaaactttcccaaacgcccaacttttgcattattcaaaaatgtatgaccaaacattttctgtgctagttacttttgctgtgatcatcatagtttagccagaagttcattcacaaagctgtcaatgttattaagttgaactttgtttaatttcgttggaaaaatatttttcactgatgttgaaaatgttccattaacacacttctaaagtttattgaaaatgaagtgtgagtcactaaatagcacgttttttaattttttgcaatttataatctataaactataagcaaaatgacgaccttgaatcgcaatagttttccaaattcagcttggtgacatagttcaataaaaattaatcacgctcataaaacaagatgataggaaatcgttgcttgactttaaatgagttattgaataggaatttgtaagaaaattaaaatttatttgtaaaataatcatcagtaatgttatggcaagcttttgtattaaaaccccacgtttgtaactacaaagagaatacatagttgattaaatttcctctttctcaagtatcttgtttgcttttagacgctcggaaaatataaatattttgcttttgtcgaagcaagataaaattttattcgctcccatttagacacaatcaactttcaattgaagtttaatccgaatttactttattccccccccatccgggattgtttcttacagaggacctttctccatcgtaaggcgatgcatacacagggagtccaatcagcagtttgccgtcaaaatcgttgatgtggccaagttcacagcgagtcctggactgagcacagcgggtgaggattatatacacaatacacctatatatatatgtatacactccgcttttatttttgacggcacaatgagacgaccttgttcgatttggccccgggctaccgattcctgactcctccagagcgctgtgtgaataaattataattaagctgctcaattattcaaaattatgccgctgccacacgtgtagcacgcccccagggctgcccgtttgccagcccaagacgccaattaaaaagaaattgctcaagtgcaagggcgccaggacctgagcctgaatcaggacatggacacgaacccggacgtggatgtgaatgtggacgaggagcagccatccgaccattgactaaatgatacatggcaggcacataagtcagcgctaagtccattagtgccactgccagctggtgtagtgggtggtactccccacgtgccccattccaatgtcaactaattgccgctgttggccccaacctcgttcaatctgaactcacgcccccattctctgcatatttttttctttttgcagatctgaagcgcgaggccacaatatgtcacatgttaaagcatccgcacattgtagagctgctggagacgtacagttccgagggaatgctctacatggtcttcgagttgtaagttgtcaggttcggtggtgtccttgtgcccatcgctaatgtcctttcgctttgcactcttgcagcatggagggctccgacttgtgcttcgaggttgtgcggcgtgctgttgccggttttgtctacagcgaggcggttgcttggtgagaatcgggcagaattgccacaatgccacaatctgcgtttgttttggcccaaaagggagtaaattattaattataattaattaaaagacgtgcccggcagtaatttgatttgagcaaacccaatttagttgtctattcgagagattaacattcaagataatttatatgagtaattaaacgtgtgctatttaaacacaagtaacgagtaatggaataaatcaaattaaacgatgctacttctattttatacttatatatggcttctgtatataagtattcccaattaagtagacgcccaaaacaagcgcaaattaaattaaatgagaaacactaaatattaaccccttcctcttttctagtcactatatgcgacaaatcctggaggcactgcgctattgtcacgagaacgacatcctgcacagggatgttcgtcccgcctgcgctctcctcgccaccgtcgacaactcggcgccggtgaaacttggcggcttcggatcggccattcagttgcccggcacccgggaaaccatagaaacacacggacgggtaggatgtccgcattatatggcgccagaggtggtgaccaggcggctttacggcaaaggctgcgatgtgtggggtgccggagtgatgctgcacgtcctgctctcgggcagattgcccttcctgggatccggagtgaggttgcagcagtcagtagctcgcggtcggttatcggtaggtggattcacgaatttcaagcttttaaagataatatttaattgataaacaatttctttttagtttgaagcaccggagtggaaatcaatctcggcgaacgccaaggacttagtcatgaaaatgctggccgccaatccacatcacagactctccataaccgaggtgctggatcatccatggatacgggatcgggacaaactacagcgcactcacctagcggacacggtggaggaattgaaacgctacaatgcccggcgcaagctaaagggtgctgttcaggccatcgcaggaggcaccaacatggatccactatacgccaccgatgcggacagttagtatttatttgtaaagtcccatatttgcttcaaaccaatcggaatttactcattttacttcggtcactgaatcgtacagtttttagtatctatagaaattctatactgcattaaattccttctcgtttgctcttggctctcgtgaaattctataaattcgatgttgcaaattgttttcaattctgccttatatattcgaagtttaactgcaaaacaaataatcacatcaatttatttaatgtgtgaagctgaatattcaatttggttataaaactgcagacgtcatcatgcaataagcctatagattatacacattcaattatgtcggaatctgttcatatgtttcattgactttctttgcagtgcccataaccggcgccacggacgaatgggccgacgaggaggcgggcattgaggcagtgcagcgcatcttggactgtctggatgacatatattcgctgcaggacgcacacgttgacgccgatgtgctgcgggatatgctgcgcgacaacaggctgcaccagtttctgcagctgttcgacaggatcgcggcgacagtggtgaccagcaatggtagagcaccggctgccgaggccgtaggccgatgtcgcgatgtcctggagcagctctcatcgacgtccggcggcaactcactgggcggcaagtatgccaaggaggagctgatgcggctactggccgccccccacatgcaggtgagtgggaagctgggatgacaaggagcgccctgcgtatcttgtttactcttactctgttgggcattttgtggcaagctgtattttgcaataatctggcaatcaccgggctttctggttctctttgttcgcctctgtggtcatatcaatctgtggtccactcgagccgcccaattcgctttggcttaagcttaaacaaatttgaaatgtatttagtgcgggcaaacacggcggcgatgaagtaagagcctggatctcagccatcattcgcaggactcgctcgcacacagagtcactaatcctttgcttaaacagagactcatgccaacggcgttcagtgctgtacatgcacataaatacactacggcaaataattgtatataaataaaatatattgaatgcatacagcagatcttatatcaggcacagcaagggtggtaaaaactacgagtttaaagccttcaattccaagctgctgtagagaatgttttattatgaacttatgtctgcagaaggaattttaagattgttattttgaaatacatatttttttaagtgtacacacatatagcagctaatgcaaccaaatacaaacagtttaatcagaataaaccgaaatgaatttcggacgtagtcaggccacaacaacagctaaagagcaacatcagcagcagaaggagaatcagcatcagaaacgccagcagcatcaaaaaggagcaagggaaacaggagcttgggtaacaacatccgcacccttctggctcccgggctcagttcccattttcccgcccgagggctttctgcgctgaaaagtatgctacgagtacatggctcaagtgccatcgttgttccgactacgtcggcatatggccatccgccttcactccttcaatccctcactgctccactctcccacttcactgcggcagctgcgaaaggggcacaaaaacatttaacgatagcgaaacaaaaaataaataagcaaaaaaacggacaggggtttactttttgtttcgacgaa

SEQ ID NO: 31223 - DNA, 1831 bp, DROSOPHILA
attcctcacgggccgtgtttgttttaagttaaaattagtaaattacccaatgcaatcagcttgccaggcgattcgtgctgcgcacctagacaatcgagtgctaatgcgattcgctaaaatgccaaaaaccagcggccgttgaagaatcgctgccaaatcgcgcaaaatgcattcttaacatcagcagctacgaaaacagcaacagcattagcggcaacaacgaatcaacgacaccaataacaataccattaacaacaaatcatcagaagaaaccgaaggaaaacgctcaaagttttggagttgctcactggccgcttagttttttgtttattttttatgttcgtttttggagggcagtaggcgacgacgggcaaaggaagcgggagaaggaaaagcgacggacacgaaaaacaggacacaactcatcaatattcgaaaaagcaattgagtcgaggcatcaattcatcaattattcaaaatgaccgaagacgaaattctctttgacgacgtctacgagctgtgcgaggtcattggcaaaggacctttctccatcgtaaggcgatgcatacacagggagtccaatcagcagtttgccgtcaaaatcgttgatgtggccaagttcacagcgagtcctggactgagcacagcggatctgaagcgcgaggccacaatatgtcacatgttaaagcatccgcacattgtagagctgctggagacgtacagttccgagggaatgctctacatggtcttcgagttcatggagggctccgacttgtgcttcgaggttgtgcggcgtgctgttgccggttttgtctacagcgaggcggttgcttgtcactatatgcgacaaatcctggaggcactgcgctattgtcacgagaacgacatcctgcacagggatgttcgtcccgcctgcgctctcctcgccaccgtcgacaactcggcgccggtgaaacttggcggcttcggatcggccattcagttgcccggcacccgggaaaccatagaaacacacggacgggtaggatgtccgcattatatggcgccagaggtggtgaccaggcggctttacggcaaaggctgcgatgtgtggggtgccggagtgatgctgcacgtcctgctctcgggcagattgcccttcctgggatccggagtgaggttgcagcagtcagtagctcgcggtcggttatcgtttgaagcaccggagtggaaatcaatctcggcgaacgccaaggacttagtcatgaaaatgctggccgccaatccacatcacagactctccataaccgaggtgctggatcatccatggatacgggatcgggacaaactacagcgcactcacctagcggacacggtggaggaattgaaacgctacaatgcccggcgcaagctaaagggtgctgttcaggccatcgcaggaggcaccaacatggatccactatacgccaccgatgcggacatgcccataaccggcgccacggacgaatgggccgacgaggaggcgggcattgaggcagtgcagcgcatcttggactgtctggatgacatatattcgctgcaggacgcacacgttgacgccgatgtgctgcgggatatgctgcgcgacaacaggctgcaccagtttctgcagctgttcgacaggatcgcggcgacagtggtgaccagcaatggtagagcaccggctgccgaggccgtaggccgatgtcgcgatgtcctggagcagctctcatcgacgtccggcggcaactcactgggcggcaagtatgccaaggaggagctgatgcggctactggccgccccccacatgcaggtgagtgggaagctgggatga

SEQ ID NO: 31224 - protein, 450 aa, DROSOPHILA
MTEDEILFDDVYELCEVIGKGPFSIVRRCIHRESNQQFAVKIVDVAKFTASPGLSTADLKREATICHMLKHPHIVELLETYSSEGMLYMVFEFMEGSDLCFEVVRRAVAGFVYSEAVACHYMRQILEALRYCHENDILHRDVRPACALLATVDNSAPVKLGGFGSAIQLPGTRETIETHGRVGCPHYMAPEVVTRRLYGKGCDVWGAGVMLHVLLSGRLPFLGSGVRLQQSVARGRLSFEAPEWKSISANAKDLVMKMLAANPHHRLSITEVLDHPWIRDRDKLQRTHLADTVEELKRYNARRKLKGAVQAIAGGTNMDPLYATDADMPITGATDEWADEEAGIEAVQRILDCLDDIYSLQDAHVDADVLRDMLRDNRLHQFLQLFDRIAATVVTSNGRAPAAEAVGRCRDVLEQLSSTSGGNSLGGKYAKEELMRLLAAPHMQVSGKLG

SEQ ID NO: 31225 - DNA, 2821 bp, DROSOPHILA
ttgctttcggggttggagatttcgatggaaggtggatgcgaggttgcctatcgtttcactaatttcaattgtacaggtgtgtgtctaagggattaaatatttaatttatttgtattaaatgcgaaaacaagcgtttctggaaaggctctcagcggcgtgcaacattaaattaaaattccttaagcccgaaattccttttcccgctgtgctgagtttgtatatagttaacaccccttgaatccccacacacacacacccacacttcgcaagtcgaataaatttcgttaaattttgagcttttcaacgattttcctttgcagaaatcgcatgctagaaaatttgaaaatataaaagctaaaccaaaaaaccaaaacaaaatcaattcaaaattaaattcaaaaagttgcatcaaattaaaacacacacacatctatatagagaactcaataataaagcaagattaaaaccaagttaaaccccaaatacaacaaattaattacaattgtgatgaacaagttaattgcatcaattgcagcacataaaaactaaagcattaaaaatagcctaaatcgaacaaaagtatatatttgctgcccaggcaggctcaattaaaaaggatacaataatttattgccacatcaactcagcgtcgtgggatgcagatgcgaatgcacatacagatgcagatgcacattggatattggacgaatcggacacattatattaccagtgatagcaacagaatttacataaccattaatgaataatagacaacagtaataagcaagccccaacaaaaaccccgacaaaccaaattgttgtagactataaagcatcgcccagtttcttgttgttgattaatcataattaaatagaagttgttgttggaaaagctgtgatcgcagaagggagtctacgcggatgacacacatgacaaagcaaaaaccattgttaacaaaccgaaacaatacagagagttaaaaccataaacctgtaagcaatgcttgttggcccaaacgctgaacacagtgagaacagcataagccacatcagcacactgacactggcactggcagctcctggcctaaaccacatatcaagaggctagaacgtgctgcgcagcgcaggggggagcaaaccaagaaatcccccaaaggacacaacatttacccgcgccactcgtcgtcaccgcccccgcatcgcctgcaatgctctggtagccaagacagttttacggtggatcactactgcgccggcggcgacccacaagcagcggcggcatctggacctggagcggctggatctggagcgggcggcgggccatcgcagcaggcgggtcaatggtccaatgcggcgatcggcggcggcgtgacctcttgcggcggcggcgtcggtggcggaatagtgccccaatcccaccatcccattggcatgtgccagcatcatgggctgacatcacagtcgttgatgtccggtggctcgcacatatccctgctgggcagcagcggcagcagcggtatgagcggcagcggcgtcggcagcagcggtcagagtgtcccgcaatgtcccgccgctgtggcagccgcggatgccgcaatgatgggctccaatgccggcggccattgccgcagcctgagcggcctgagctcgatcagcataccgccgccgccgccggcgctcttcaatccgtgcagctcggcgctgtcgctgcagcaggcggcggtaaccaggtggggaccgcgcacctcctgcccggtccacagtccgtttcgtgtgcgcgtgccgaacggctccatctgctccggacaccaggtgagatgaggcgtctctgatcgtgatgtaaatgtacatgtattttatccgagggctggtcatatatcggccatataaaacccccaatcagtcgctaaaatccgttgactaattcagcttgccacaatatgattattgcgcttttcagtttgccatctagaaattgtacatattaattgtatctgatatgtagctttagttgcccaactaatcgcatcttgacttatgtctctttgtttcttctcttttctcttcccaaaatggcttgctcactcacttttctcggaccgtcaggtaagcaaatctaagcggaaactcagcattttggcagtactgcgaaatgtgtcaacgacatgtaagattattttcatttggccagcccaaaaagaccaaaaaagaaaaaaaaaaacgcacacaaagatcaggaaaatacgcataccgcatatgcacacttacacgaaacagaccgcacaggacaacgtggggggtttcatgggttgttgactgtttgcctaaacagaaaacacattgtggtcattgagagctatcgtctttgagatgatgtcttttatttttgtgaattgatttcataaataagtgccctgaatcctcttaaaattatttatcctgtacactgcaaggatactttgcacaaatcctattaagtgcagtagttcgctttgctaaagtaaatacaagtattaaatagatttccctaaatcctagaagactgacacatatgtatttaagtaaattgaattttaagtcaaagtgttgtcaaagctattagataagttatcagtatgcatgtatgtatgcccacgattttctttggagaaaaacaagttgcttggctagcattatgtattttatacaaggagctttaagttgaatggtgcagtaaacccaaagaagctggccacttaaaagctttctacagtatcataaaatgggcacctcgctttatattacaattcttggtaagagataatccgaacacaaaaggaac

SEQ ID NO: 31226 - DNA, 693 bp, DROSOPHILA
atgcttgttggcccaaacgctgaacacagacacaacatttacccgcgccactcgtcgtcaccgcccccgcatcgcctgcaatgctctggtagccaagacagttttacggtggatcactactgcgccggcggcgacccacaagcagcggcggcatctggacctggagcggctggatctggagcgggcggcgggccatcgcagcaggcgggtcaatggtccaatgcggcgatcggcggcggcgtgacctcttgcggcggcggcgtcggtggcggaatagtgccccaatcccaccatcccattggcatgtgccagcatcatgggctgacatcacagtcgttgatgtccggtggctcgcacatatccctgctgggcagcagcggcagcagcggtatgagcggcagcggcgtcggcagcagcggtcagagtgtcccgcaatgtcccgccgctgtggcagccgcggatgccgcaatgatgggctccaatgccggcggccattgccgcagcctgagcggcctgagctcgatcagcataccgccgccgccgccggcgctcttcaatccgtgcagctcggcgctgtcgctgcagcaggcggcggtaaccaggtggggaccgcgcacctcctgcccggtccacagtccgtttcgtgtgcgcgtgccgaacggctccatctgctccggacaccaggtgagatga

SEQ ID NO: 31227 - protein, 230 aa, DROSOPHILA
MLVGPNAEHRHNIYPRHSSSPPPHRLQCSGSQDSFTVDHYCAGGDPQAAAASGPGAAGSGAGGGPSQQAGQWSNAAIGGGVTSCGGGVGGGIVPQSHHPIGMCQHHGLTSQSLMSGGSHISLLGSSGSSGMSGSGVGSSGQSVPQCPAAVAAADAAMMGSNAGGHCRSLSGLSSISIPPPPPALFNPCSSALSLQQAAVTRWGPRTSCPVHSPFRVRVPNGSICSGHQVR

SEQ ID NO: 31228 - DNA, 4854 bp, DROSOPHILA
ttttgagttaagagaaagaatttaaagtttaggtaggatccatatcctaatctatactattgtatatcgaatactaaccggcgtgagggctcccatcccgccctgccagtcgtgggcagcgtgcggatccaacggatagaagccactcggattcttggcaccatgtcggaacagctggtgggcattggattggattgataaacacagtgctcagatctcgttgtttacaactttatgccagaagtggcggcagcttactatggatatcatgcgtagattccgcaaaccctgctcgtcgttgctgtcgccgaacacaaagtatgccatcatgacgaaacagagggcacttcccagggcgatcaccgatattttggtgccgcgtcgcgatttgcagtccatttttagggagggggtgcggtggcgtctctatgctcctgctgcagttgatcgagaaaatatatttcagatttgcagcctaaaaatagttttttgtttattttatagcgagtgttttcgatttcgctgcccccgtcgacgaaacaaataataaataaatacaagtcacgtccgatggcaacaaaagccgtataacaactgagcgactgtcgatggaaggttgcctcacagccagaaagagagggggcgctaagaagcgagagagaaggctatataaaacagaaagagccagctagagacagtcggagagccggggagacaagttttccatgtgattttggcattgcgcgagagtaaagtctttgaacatgtgcgaataattaaattagtcgctcattggcagtacaaattgggtctcgactaggtgctactgtgtgcaatatggtggtctatcaatttgcactcatgtgaaaaacattgtttttcaagttatttgtcttgcctttatatcttaccttgcgacatacaactatcgctaatcatatacacatgtaagttaaccaaataaatatttataaaatatatatattttgatcactacaaattccaacgaaaaatcaaagagggtaacgttttttttctatagtcaaacgtagatgctgaactgaaatatgagatatctattttctggattttggtgcctgttcctcggcatcctcctcagatggttcgctggtgggttcctcaaccaggtaaccctgctcggtggtatatttgcgcttctgcgatacttttcttcgcctcctgaaaaccgattctaatttaacgtattcccccgatcttgactgctcgctaatctccaccgatgaataactctttgacgaacgctgcgaatcgccagattcctcagctgcgccggactctgaatttgaacggtttaagcagagaacaatctcgggaatttcatagccgtatccctcgtcgtcatcggtgtgctcattctccatttgaacatattctagatttggctcatggaaacatgagttggattcaatggttggatatataagaccagtttccagattttgcctagttggcagagccaagtgcgtttgcatatccgattgatagtggataacgcccattggtccagctacataggcggcattgctatctggaattgaccaagttgatgaagcactggtcattatggagtcaatactataggaacggattgcactcgcatcacattggatcaaaggatactcataaatcccgggcattatgtattcgtagtatcccataacggtacggcgtcgcctcgatccagacattttggccagtttgctcctgaacaaatggacgtctagttaaccctgatcctggatagttaatttgctcgatattatgaataattctagtaggagaagtccccaattggctccagttgattaacaatggccactctcattcgcataaaatagatgcgaacatttaattcccacatcaagtgaaattccaggcaaagttcgatgatcatcagttttgtggatatcgagtaccagttctctaggggattaggcagtctgctgtagcgtgtatgggattgctgtaatcagatgcgatgatggcgatgtcggcggtgtccaaatgaggactttgtctgccggaaactgaagacgaaacaaatttggaatttcattcgacgaaaattttgaactttgcttagcttgccttagttacatgcgaacactaccttcacagacaaccaagtggcataaaagtataggttttctagatttttaaaaatgtccttattgatgtaggcattacagttgactcgattagctctaaagttcgcataaaaaattatatatttatttcagattgtaagtctacttttcataactctatagacagtctttatccataatcttaataagcgtagtgcagcttcaaaaatattcggttttaatgcttgtttcccccgaggacacacctttccgtgtccagatcctcgtccgaatctattcgctggcaatcgccgtgtcccacagagcaacgtttgtacaacagataactgaaccacacggtcaatggaagaagagccaatcccagtggcataaggaagagcagcaggaactcccgtcgatcgctagtcggaactccctcatcttcattaccgtagtccgaccagtactcattctcctgatccgtatcctccacatcggccagcacatccaggaaagcctcgcggatcttatggcctcgatagctgatggccacgcaggcgtagtgtccggcatctcgtaatctcactccgtccagaatcaatttgctgagatatatctggggtgccatcatcttttctggatcggtggacagtagttcatatgttcgaccattgtaccggacaatatggttgctaaaatttgaggttgtgggtgccgaggaggcttcgccacctgactgagttcccacgtacgtctgccggcgaaaccacttgattgtgggatgctcctcgctgtgaacacggcactggaacaccaccctactgcccaccaatgtggtcttgttgttgggatacgagtccacaaactcaggggctgccaatgaggtgtctacaaatagaatttatacataattttcgatatggtatatggtatatatggtgatgaaaattgtacatacttttaacatccagctgataggtgcgaaccagttgaacatccacagcctgggctttatcccaaatgtgcggattaatgctgcatttgtacagtcccgaataccgctccgtcacattccggagccagagttccggacgacaaagactcggctcacatggcagagcagtccactcgtccacagatcccaactgatggcaattgttttcgctgcattgctgaaatagtttaatgctaatcaatgggtaccaacaataataataataataatagtacataccttaaagtaccaatgtatcttgatgtcattcagcatactctcatcgaccagacctttgagattgcactgcagcttgacatcgaatccggctctctgttgaattaactctgtgttctctgcaccggcaaaaaagatataacaaaaattccgaaccattcaatcaaggcaatggcaatgtttacttttttctgtgtcaatgatagccaaattgacagtatcttatcaagcgttgtgctccccgaaattgcgattaaccttctgaatattttgacgaatgaaagcggaaatgtgtagtaacaaaaagagcttctaaatgaaaatatgcacgtacttatatatatatcttcgaaattaaaattacccttatagtaagaactaaactcacctgtatagtcaacaaaaaaacagcgggactgctgaaagccgcacaggcaaatgagtatcaatagccaaatgcggccagaccacagatcacaaatcatcggatccatttccacttagcatatccgcgacattgtcttccacttgctatcgccgaaggaacctgtcgaacactttgattagttactttggggcacacacaatcgtttggcatttatttatttgaattccgctggctggccggccattcgtttatttcccaaatgatcgattttcatttaatttcttagcaaacaaacgaggctctcaaagtttctatttatttatttggtcgacgcggttgcatttccactggttctagcacatttttcacacattttattgtgcgctgtcggcaatgagtgtaaaaatccacttttgtttatttacttggccattcgaagcgaacgggtgctctacattggcttacagacacaaacactgggccacaaatccttggtgcgctcatatatataaattatcagaatttcgcttcccatttattaataaatagtgagtgccatttatgcaacaataaatcattgccgcagcgataatgctcgtttatcaattgattggcggctaccacagaacttgcgggggcactcgatagattgagaagcgcgtagaaggggcctaactttacgaatagtttttttttggtgtgattagatgcgaaaagctatgaattgttgggaaacatatatgatctcctaatacataaacattagttatagacttttgattaattgacagaaatttagaaagatattatatttaagagaatcaaacgtttatattgtttcaatattccgtttgcgtggtatgtcacgaacaaatcatttgtcgaccacaaaacacgaagctcataaaacacttttaataccagggacgtttgtttatgcatttcattttccaagatctgcgatctcttcccattgtgatggagatttatctgtgttgccccacttgattggcatcgactcaattgatttatacgatatcatttattaggtgaaaagttgattgtttaatagacaatttgtttaccgaccgggccgcgaccagtgg

SEQ ID NO: 31229 - DNA, 1729 bp, DROSOPHILA
atggatccgatgatttgtgatctgtggtctggccgcatttggctattgatactcatttgcctgtgcggctttcagcagtcccgctgtttttttgttgactatacagagaacacagagttaattcaacagagagccggattcgatgtcaagctgcagtgcaatctcaaaggtctggtcgatgagagtatgctgaatgacatcaagatacattggtactttaagcaatgcagcgaaaacaattgccatcagttgggatctgtggacgagtggactgctctgccatgtgagccgagtctttgtcgtccggaactctggctccggaatgtgacggagcggtattcgggactgtacaaatgcagcattaatccgcacatttgggataaagcccaggctgtggatgttcaactggttcgcacctatcagctggatgttaaaaacacctcattggcagcccctgagtttgtggactcgtatcccaacaacaagaccacattggtgggcagtagggtggtgttccagtgccgtgttcacagcgaggagcatcccacaatcaagtggtttcgccggcagacgtacgtgggaactcagtcaggtggcgaagcctcctcggcacccacaacctcaaattttagcaaccatattgtccggtacaatggtcgaacatatgaactactgtccaccgatccagaaaagatgatggcaccccagatatatctcagcaaattgattctggacggagtgagattacgagatgccggacactacgcctgcgtggccatcagctatcgaggccataagatccgcgaggctttcctggatgtgctggccgatgtggaggatacggatcaggagaatgagtactggtcggactacggtaatgaagatgagggagttccgactagcgatcgacgggagttcctgctgctcttccttatgccactgggattggctcttcttccattgaccgtgtggttcagttatctgttgtacaaacgttgctctgtgggacacggcgattgccagcgaatagattcggacgaggatctggacacggaaaggagcaaactggccaaaatgtctggatcgaggcgacgccgtaccgttatgggatactacgaatacataatgcccgggatttatgagtatcctttgatccaatatagcaatgccgcctatgtagctggaccaatgggcgttatccactatcaatcggatatgcaaacgcacttggctctgccaactaggcaaaatctggaaactggtcttatatatccaaccattgaatccaactcatgtttccatgagccaaatctagaatatgttcaaatggagaatgagcacaccgatgacgacgagggatacggctatgaaattcccgagattgttctctgcttaaaccgttcaaattcagagtccggcgcagctgaggaatctggcgattcgcagcgttcgtcaaagagttattcatcggtggagattagcgagcagtcaagatcgggggaatacgttaaattagaatcggttttcaggaggcgaagaaaagtatcgcagaagcgcaaatataccaccgagcagggttacctggttgaggaacccaccagcgaaccatctgaggaggatgccgaggaacaggcaccaaaatccagaaaatagatatctcatatttcagttcagcatctacgtttgactatagaaaaaaaacgttaccctctttgatttttcgttggaa

SEQ ID NO: 31230 - protein, 550 aa, DROSOPHILA
MDPMICDLWSGRIWLLILICLCGFQQSRCFFVDYTENTELIQQRAGFDVKLQCNLKGLVDESMLNDIKIHWYFKQCSENNCHQLGSVDEWTALPCEPSLCRPELWLRNVTERYSGLYKCSINPHIWDKAQAVDVQLVRTYQLDVKNTSLAAPEFVDSYPNNKTTLVGSRVVFQCRVHSEEHPTIKWFRRQTYVGTQSGGEASSAPTTSNFSNHIVRYNGRTYELLSTDPEKMMAPQIYLSKLILDGVRLRDAGHYACVAISYRGHKIREAFLDVLADVEDTDQENEYWSDYGNEDEGVPTSDRREFLLLFLMPLGLALLPLTVWFSYLLYKRCSVGHGDCQRIDSDEDLDTERSKLAKMSGSRRRRTVMGYYEYIMPGIYEYPLIQYSNAAYVAGPMGVIHYQSDMQTHLALPTRQNLETGLIYPTIESNSCFHEPNLEYVQMENEHTDDDEGYGYEIPEIVLCLNRSNSESGAAEESGDSQRSSKSYSSVEISEQSRSGEYVKLESVFRRRRKVSQKRKYTTEQGYLVEEPTSEPSEEDAEEQAPKSRK

SEQ ID NO: 31231 - DNA, 2303 bp, DROSOPHILA
tccctttgcatttagtttactatcaccatttaattcagtataaatttatcgagttattggtcttaaagccaaggatataaagttttaggttttggttcagaatcaggacgatatggacgacttgaacgatgtcatcgcaaatttgagcattaaatccaagaactttatagatgaggctgcaaaatcattaaccccaacaatggtgggattcaaaagagaacctgagcgaaatcaaaactgtacctactttatgcagaatacctgccagctttatcaaaacatttctaaatcccatcccaagattgaaaacagtgttaaattcgatgaagattttgtgatgcatatggaacctgagatcaaggtggaatgctctgttgatgatcccaataaagaagttcaaattttgctgtatgatcctaaatcatttacgtataatatttacatgaacatttttttttaacacagaaaaaaggaacgcttgaagcagaaatatatggaagctttgaagctggatgaaaaccttgaagctagagtgaaacaatcggccattgaatccaatcccgatatggaggaacaacaagctgaattgtgagatcataactttatttatgatagcatttacttaactttattggcatttatagaagaaaacttcacaaggatcaagtggaaatgtacaaaggtgtgcaggaagaaattatggtttccttcaagagagacatggatgatctaatgcaacagtatgaagctgagtactcgcgacttagtaaggtccactctaagtgggtaaattccgagaatgattccaccaataactcaaacactcatcagccttagtcatcgcttaggaatttttaagattttagcattttattagtgaaatcaaaacgtatttatgtagtttcttgggttttaacatttgacaataaaaaatattcagtatatcaaatattttgtttattttatacagcttttttatcacttttcctttggcttcagctcacttagttccgtcgcgctcggccagcagatccagcatcacctcgatcttaagattacacatattgttctcctcctcgagggcacgaaacttcttgttcagccggagcatatcatctacgtcaccctttcgggtcgaatgcatccagatgccgtccgcaaaacgcagctccttgttgcccagcgttagggaaatctggcggaagtcatccagatcctcggtggccaccggatgtcctatattgcaacgtccctgacgcactggaatcggcttcgactcgaacttcttgttgaagagcggcattgcaaacaactgaaacggaaagttgaccacatttcgattacatccccatttgtttgccactgccccgttgcccaggacaacagacacttgtcaggggatcagcgttcgcggcaggactcgtgccaggtttttaatggctagtaagaccgtatccatatgtacctgcttgaagggtagcggctggctgtcagagattgacgaggggcagcaaaaggttgccagttgcataaaatcggtgaaatacagagaactccttgctgcacgcggggatacggatggatttctaagccaaactgccttcaacaggattttaaatgcctgataatttaaaagacaaagcttgcttcatcgcagaaactcgtctcatgtcaaacataaacattttgtttggttcattgatgaaattctatacaaacacacaataaacccgatacacaactctgctgtgaaaaataatatgattccaaacacacaacaaatatgacacaacacgaaaatcagcaagccattctcaggtaggagagcaaaggaaaatttgtcaactaaagttagtcaacgcgcagccaattcaccatttagcaactttgtgctggaaatgtgtgaaggagtggatcgactgatgcgggatcaggccgaactgaaggttcacctcaacgaaattctaaatgagaaccgccggctggacatcgaattggccaaatgcaggagcatcttggttagcggcgattaccaggagctcaagcatcgccttcaactcagcaacaaggctttggacgcgtccaagaagcaggtggatgagcttatcaaggaacggaacagcctgaaaaccatgcatgacctctccaaacagaccatcgaaaccatggagatggatcttaagaattatcgcgtccaattgaaaatgtctggagatgaccaggtattattgcacttcatcattccaatcccgtattgattatcatattatagtaagctttgaccaaatcgtatgttttaggga

SEQ ID NO: 31232 - DNA, 303 bp, DROSOPHILA
atgccgctcttcaacaagaagttcgagtcgaagccgattccagtgcgtcagggacgttgcaatataggacatccggtggccaccgaggatctggatgacttccgccagatttccctaacgctgggcaacaaggagctgcgttttgcggacggcatctggatgcattcgacccgaaagggtgacgtagatgatatgctccggctgaacaagaagtttcgtgccctcgaggaggagaacaatatgtgtaatcttaagatcgaggtgatgctggatctgctggccgagcgcgacggaactaagtga

SEQ ID NO: 31233 - protein, 100 aa, DROSOPHILA
MPLFNKKFESKPIPVRQGRCNIGHPVATEDLDDFRQISLTLGNKELRFADGIWMHSTRKGDVDDMLRLNKKFRALEEENNMCNLKIEVMLDLLAERDGTK

SEQ ID NO: 31234 - DNA, 3006 bp, DROSOPHILA
gccattctgcgaagacaatacagtttcaatctctggggcttggttatcaaactactcatcgatgtggtattgctgaccatgtccgtgcattcagctgttaatggttctcgattgataagacgtctgagctttgagaatttctatgtgactgatagccagagttaccaccaaaaggtaagtccaggagctataatcttaaggattaaatataatacttttccaatcttgcagctggagcttttcctgggccgccttcaacaccaggagctgcgagtgtttcctttgggcctctttgaggtctccaacgaactgaccctgttctttctctcggcaatggtgacctatctagtctttctagtacagtacggcatgcagtcgcagcaaatttgattcaacgtcacgcattgcttgcggcattgcaccctaccaaaaacctcgcgatacgatacacctgccaagcccacttgcccacttgcccacctgtcctgcggttgcacgcaaataaaacaatgaataaagagaacggaatttcataagacaaaactagaaaaaaaaaaaacaaaaaacaacaagctgaaatcggcagttgcaggacccaattcccaatttccggctaaccgtttgttccgctgcaatttttcccatgaaacttggtcgcggcattaattaaacattcatgctgacgtcaagcagaaaatttatgcggcacttggtagatggtgggaccgaggggggggggagaggggcgcattatcagcgcacagttcacgctaagaggcgcataaaaacaaggccgaggccgtcgctctaattagcataggttagggtacaaagccggtcctcagaaagacacaaaacccataaaggtgcacttgccactgcacttgttctttggctggcaggttcaggctcagaaaaaaaaaatgaaaataaaaaacaggaaaaaaaataaacataaactggggacaaagggccgaccaacggcggcgataataaaaaatcaaattgccgcaagagcagagacccaagatgagatgagcactattatctcggtagtggaactgggctcagaataatgacccaatcggttctgctcctgctcctgctgagatttgcctctttaaagtggaatgttggggtgccctaggtaccctgtaattcgtagggcttgatgggttttttttttgaatgagcttgagttttgaaggctttacatgaacacataaatatataagatctaaaggattttagcgaacaataaagttatttcaattatttgaacttcttatagttcttggctagaagagaattaacaaagtttttttttttgggtatctcccagtcgtagaagggtgaccaaaaatatggcttgtgacttaatttttttgtgtaaaggcaagttgtgtaaacggcaagataatcataaaacatggcattgctcaaataattgtacttcataagagacataaccgagaatcagagaaagggcagggggcgggggtggagaacgggtggcgatggtatgggaccgagccaagtttcccatgattgttctgctgcctgggtaattatgggtcacttttttttttttcattgaatctttctctctcctttcattcggcaattatcatacttacctgcaactatgtgccaggcaaagctaaagcaaaaggcataaagccggaatcaagggagacgaaaaaaaaaaaatatataaaaccaaattaatgatgctttcaacatttcactagacaaaagaaccagccggagctcaaaacttgggagcttgagtgcctgagtgcaggtagcggtgcttactttttggccaacaaaccatacagcccatactcattctgggtaaaaagtacagctacatcaagagcggatggaaatctcatcatcattacgatgattatgccgatgagagcctcgatttcaatcaagagtccaagattcagagcggcaaccggtagcaacttggcaatcagcagggaacgaagacccattagccctaaaagctttcgtggccaacggaaacccatcgggaattgctaaaatgtaactgctggtcggtcggtcggtcagttagttgattgctataattccgcccaaaattaagtggcgaaatgagaaaacacccgcgaatgctaacataatataaaacaaaccctttttcaccgatcgacaatgggcggtaataagttctaatttatttatggctcaattaggcaaagggcttcgagttggcagctcgatgatgatataagccttttcggcttgatgatataacagctaaaggtagccgccggcctgttatctaatctcatctacatggggcaacatctggtcatgaatgtttcaacggaataaatttgtaggtaactcaatttttaagaattgcccgtgcaaggaagagttatgcaatcatacaattgaatttataagaaagcgaaaagatatgtatgtatagttaccatcttaccctatttgtagctccaattgaacaactaactttaaagacaataatgggttgtaaaagtttatcgtgccttatcaatgtatgtagcgttttggaaaatttatcacaccaatttgtagttgcttttcaaaattacccctactagacgctgggcaaccaatcaagtcaatcaatttaggtcatattcaatcaaggtattccaaaaaaggttccgccacgaaatgcaatggaattttctatcttcggaatgcacagctaaaatggacttgattgcgtttcaaacagaaaaatcacgtgtatcgcttctgattccatcatcccacctttctggccaagtcctcagtcggtagtcgattttattcatggcgcagttaaaagtggcacataacggcaattgcagcccagtcgattttagacgacgtgccatctactaagtacacacattaaggtgggtcgttatgggtatagaatataataataataattctaataaaatgtataatttatcttaagttaaattgtttaag

SEQ ID NO: 31235 - DNA, 306 bp, DROSOPHILA
atgggtcttcgttccctgctgattgccaagttgctaccggttgccgctctgaatcttggactcttgattgaaatcgaggctctcatcggcataatcatcgtaatgatgatgagatttccatccgctcttgatgtagctgtactttttacccagaatgagtatgggctgtatggtttgttggccaaaaaaggcaaatctcagcaggagcaggagcagaaccgattgggtcattattctgagcccagttccactaccgagataatagtgctcatctcatcttgggtctctgctcttgcggcaatttga

SEQ ID NO: 31236 - protein, 101 aa, DROSOPHILA
MGLRSLLIAKLLPVAALNLGLLIEIEALIGIIIVMMMRFPSALDVAVLFTQNEYGLYGLLAKKGKSQQEQEQNRLGHYSEPSSTTEIIVLISSWVSALAAI

SEQ ID NO: 31237 - DNA, 3321 bp, DROSOPHILA
ccaggttcggttgcctggctccaaatgcgaacgcgcgaaaaaaaagcgaaaaatttgaatgtgctctcgtcagtgtcagggattgaaagatcccctcctccaagctggcacatacatattgtagctacctcaccccgcgccccaaaaaaaaacaacagaaacccaggtcgtgtgcagcgaagcagagagctcggaaattaattcagttgcaggcaaaggcgcgtacttctgccgttgggtttgctttgtttccatttcgccaccgtcgcactcacgggtcagttgggaacgaaatcccgggtcagatgcctcatcctataacccctcagcgcacacatacatatatattcatatacatatattttccgagcatatatataataggcgtgacaagcgcgttacgctccgttgaggccaaaaataatcaaagacttgagtcgagacgattgcgatgacgatcaagtgatggaataaagatcgggggtggtagggggcgtacactgatgggaatgtgattgtaaaatatatttcatattgtatatattcatatatgataagtgcatgtatcgattccattaaagttgctaagaaaatttattcccaaacttcaaatttctttattaaggatgtcgatttttttccagtgtagtgggagtaatagacgtaagacttaagtagcgggagtacgggagttggggaagttatgataattacaccgtttcagttttgttgttgctcattcccatttctttaattttttgttggacgtttaacaagttcatcgcggaggcagtccgaaaattgtatcagaatgtcttgtggcatgggacataatgaacgataatgaactcagggcggttcaggtgaacttctctgctggagcttgaggttaagatacagatacagagtccatacagcgagagtgtcgagaaaacttagaaaaatacctaacatatctattgacaattcacattcaaagttaaacagaactgtaagtagcttaatcaaaacgatttttaatgtcctcggacgcctcaaagccacctgtaatgccgaactgaataaggataaacaggtacgatattatggcagacagaatgagaagaatgaactcattatttagatggaaaaatcccaatactttgatctccagtcgttgggtttgcagctgaccgagaaatgtttcaacctgggcaagttaatatgattaaaatgtgtaattagcaaatgacaaacaatagcaaactcacactcttatcccatcgctcatccatatcgctgcaaacgatatccaaaggcaatttctttggcacttctgactgcctcaccgtataatccgcacacatcatgagcaatactagattagccaacttaacaaaagccatcacaatggacacaaagaccacttcgtcgtcgttcagaaaatgcagaatatattgatatagcattaggcaaatatttataaagtttaggtagatatagaagaggatctgccattgtagaattcgacggaatgagtttgtgacgtggtagagttcgctgtagatagcggcacactcgtccaactcatcggcaaaatcgcacaggagttgcattctacgatacttagtcatacgatatctttcgtcctgcgactctatgggttccattcgcttcagcatggcaatgatattgttggccatatgttcgtacagtattccggataccaaaaatcccaggaagcaggcatcgaggacacagagcgtaccaagccacatgtagatgccaaagccagtgcccaccatttgactgatatcatcgaagtgtgagttttcaaaaagaggtattatttcgtggaaacaaccgcacaaagtgaagaacaactttagcaaaaagaaaaccacaaatttcgttgggaacaggtgccgcagacgcgtagtcaagcatatcctttggtaaagcgctaaatatctattcaacacctctcggaattggttctcgccccttgcctggatcacaaacgatatgactgccaaaatggacaccgacatggactgggccaaagcaaggacatcagcatagctctccaatcgtttgcctattacggctgaggtcaacattggccataatccggcgtatatcataaccacaatgcagcgccacaggatgtgcaggaagcgatttctgctgccctgtttggtcgccttcagctgcagcttatccctgtccaagctggaggagagcaccagaagaccacgggcacaacgatatagccacaagagcaacaatcgcgaccagctctccgctcgtttcccggtcatagccgagctggaactgaacatgcagcctggctaatgacatgtccatgtcctggcgtccaggggattgcgataaggagctgaagctatcggccctgctgttgattttattaattgaatgtgtggatatcgtgaatatgtggatatcggcaattgccattcacgctccgctgagtgcctcgctgactgattggccccaagaactcgactcgactcgactctctggtctcggaactcggcaatcgatgatgatagacaggccagcccttggtctcatacccatgtccatgcccaggcccagatccacttgggaacttggacacttggacaggccttcaggcacactggcacccagcagatggtgctcgagaaataaaaccatcatcggcacaacaaaaaatgggcgtaaattgatatttatgcccgtgtcaataaagttgttttgggttgatggacttctgaaatcggccgatattctcattggacttttgtaacgaggtgaatggacgaatgagtgggaaaacctattcctaggaaactactcaaaccatttgtggaaagaaacttccatcgaaatagaaaactgctcaaaccatttgtggaaagaaacttccatcgaaatactttgaattattccaatgaaaaatatttcatttaacaaatgaggattttaataaactttgtcgtttttttgaatgttgttatacttgtatgttattgcttgtatttatcaaccaaaaatcgagtggacaatcgatatcttaagtatcttgttacttagagctattagttaattactcattatcatcgagtgttagcacctaattacctgagtacacaagttaaatgttgattagccaacaaagttctatttattctacaattaatttgcaaacataataataataatctaaacagagcagcattatattactcagttaatatttaaaagtatttttatgagtttgtgtatgtaaacaagtatcgccattaaatttgttaaatttacttataattgaaattc

SEQ ID NO: 31238 - DNA, 1128 bp, DROSOPHILA
atgttcagttccagctcggctatgaccgggaaacgagcggagagctggtcgcgattgttgctcttgtggctatatcgttgtgcccgtggtcttctggtgctctcctccagcttggacagggataagctgcagctgaaggcgaccaaacagggcagcagaaatcgcttcctgcacatcctgtggcgctgcattgtggttatgatatacgccggattatggccaatgttgacctcagccgtaataggcaaacgattggagagctatgctgatgtccttgctttggcccagtccatgtcggtgtccattttggcagtcatatcgtttgtgatccaggcaaggggcgagaaccaattccgagaggtgttgaatagatatttagcgctttaccaaaggatatgcttgactacgcgtctgcggcacctgttcccaacgaaatttgtggttttctttttgctaaagttgttcttcactttgtgcggttgtttccacgaaataatacctctttttgaaaactcacacttcgatgatatcagtcaaatggtgggcactggctttggcatctacatgtggcttggtacgctctgtgtcctcgatgcctgcttcctgggatttttggtatccggaatactgtacgaacatatggccaacaatatcattgccatgctgaagcgaatggaacccatagagtcgcaggacgaaagatatcgtatgactaagtatcgtagaatgcaactcctgtgcgattttgccgatgagttggacgagtgtgccgctatctacagcgaactctaccacgtcacaaactcattccgtcgaattctacaatggcagatcctcttctatatctacctaaactttataaatatttgcctaatgctatatcaatatattctgcattttctgaacgacgacgaagtggtctttgtgtccattgtgatggcttttgttaagttggctaatctagtattgctcatgatgtgtgcggattatacggtgaggcagtcagaagtgccaaagaaattgcctttggatatcgtttgcagcgatatggatgagcgatgggataagagtttcggcattacaggtggctttgaggcgtccgaggacattaaaaatcgttttgattaa

SEQ ID NO: 31239 - protein, 375 aa, DROSOPHILA
MFSSSSAMTGKRAESWSRLLLLWLYRCARGLLVLSSSLDRDKLQLKATKQGSRNRFLHILWRCIVVMIYAGLWPMLTSAVIGKRLESYADVLALAQSMSVSILAVISFVIQARGENQFREVLNRYLALYQRICLTTRLRHLFPTKFVVFFLLKLFFTLCGCFHEIIPLFENSHFDDISQMVGTGFGIYMWLGTLCVLDACFLGFLVSGILYEHMANNIIAMLKRMEPIESQDERYRMTKYRRMQLLCDFADELDECAAIYSELYHVTNSFRRILQWQILFYIYLNFINICLMLYQYILHFLNDDEVVFVSIVMAFVKLANLVLLMMCADYTVRQSEVPKKLPLDIVCSDMDERWDKSFGITGGFEASEDIKNRFD

SEQ ID NO: 31240 - DNA, 2918 bp, DROSOPHILA
acttgacatttgtctgacaggaggaattcgaggcaggaagtgcgcatgtccttaaaccgaaagctgtcactgctccgccttggcctaggctttccaacccccgtaattaccataaacccactgcgcttgtaaacatcctgcaacaggtggtcccatcagctggtactccggcaattgttgtgcccgttgccatggactactggggtcgaaaaacgaagtagataactgctcggaaaattaccaaattgaaaattgtgagtaaccataatggaggactatgcgcccagccgctataaaatgcttgagaaaatcggcgaaggcgtccatggctgcgtgtttaaggccatcgatctgcagcgcaacaaggaggtggccatcaagaaggtggcccttaagaacaagttcggaaacatagccctaaatactttgagggaaatcaagaccctgcagctttgcaagtctgaatatgtaggtataccatatatctattttccatttgttaattatgtaactaattgtagattctggacatcattgatatatatcctgacctaactggtctctccttggtgctggaataccagccggacactctgtacaaccgcctcaagagcgaggttaatcccctgagccgccagcaggtgcgtaagtttgcacaccaaatgttcaaggggattgcatatctgcatgaagcgggtctcatgcaccgggatattaaacccgccaatctgcttatcagcgatacagatatgcttaagattgccgatttcggactggcccgtctgtacttccctgaagacgagtcgcgcctttattcgcctcaggtctcaacccggtggtatcgagcgccagagattctatttggcagccagaagtatggaaccggagtggatatgtgggcggcaggttagccatgactctttgatgggtttacatatatccttatggctgacattattgctatccaggttgtgttgtggcggagatgctacgcggagtgcccctgtttgcgggaaccaccgacatcgagcaattagccatcatcattcgcactctgggcagcccacgtctgaatcagtggccagagctgacttctctgccggattacagcaagatacggtaggcattcttaccgtctatgattacttaatccgtaatattcttgacgtaggtttcccaactccgtgggcattcactgggacaacttgtttcccagctgcacacatgcggtggaaatcaatctggtctcgaatctggtggtctacaatcccaaaaaccgactcaaggccagcgaggtgggttctgcttcaagtttgacaccggttaggtattataattggtaaattctatatttctcaggccgtcgagcatgattattttcattaatctaggactatttacacggacattgctagcaactaagagttttcggattctttgaatctgcaaggtagaatgtgtgtgattagttgtggaagtgaaggaatatgtttatcaggacacctacttgcacttaaggcaggtaaagaacaccgtctggccttcgtccgccgatcgaagctgcagggtggcataggacatcttgtcgtggttgcacttgggacacttcctctccacaacggggccatccgcgtccgattccgactcccttttcgtcctgttgaacaccttgctgggatcgtaggtgttgaagtgtatggtaaactcggacttctcgccgctgtaaactatttttaagtgttaaataaattaaacaaagttgtaatttctggatttaccatctggctgaaactccttcttgcagttgtagcaaatcacattgcccttgacttgaagctcgggcagaatggagccgcaggaggggcaaaagcccggacaattggaaaaaatatccatgccagtatatatcacccaaaatcaaaatcaaaatacaaaaaccgcacgtgctatttcggatttcagtatgagcgtaactgaaccgtttgaaatataccacacggtattaaaaatatacttgattcatatactaaatacgtaagggtggaaaactagaataagtctggttgaaagccttgatgaaacgggtagagccgtttacccgtttcgattaccggttcttaatcaaaatcaattattcaaaataaactttcaaaatagtatttgatattcatagccaatattacgtaatgaaaacagttagattttaatagccaatatcaagttatgaaaacagtaagatttttacttttatctttactttgtattaaagtttacaaaactattacatcaataaggcgatcttacggtctagttagctgaaatgcaagtcggatgtgtactgtgttccaattaaactacctaaaactatcacaggcagaacattaactacgcactagaggttcctaactacaactaagcatctaggaactattgatccttggctgccacatatcgcacagtatatatatatttaaaatgcagctatcgggtgggatgactctgcggcatgttaagctcccagagcttcacattgttgtcgagaacctcgtggtaccagctctccttttccggctcctcccggaagatgggcttcagcgacttgaggtccaactgcagtatggcatcgttgccgagcagcgagtccagggatcgcagtagagtactattaccgtgcagtttcagcagggtcacatacttgaccacatagtactcgtactgcagcttccttctcgcccatctttccactgtagcattggcactagccgatcgaatctggcccagatgggcggcaaaccagggcgcaaagtagttgtaaagatccaacttggacagtccgttcagacctttactcttgattcgctccttgatcatgctgtagttcttcctgctgtacacaaacacctgatacagcgaattgc

SEQ ID NO: 31241 - DNA, 803 bp, DROSOPHILA
attttgggtgatatatactggcatggatattttttccaattgtccgggcttttgcccctcctgcggctccattctgcccgagcttcaagtcaagggcaatgtgatttgctacaactgcaagaaggagtttcagccagatgtttacagcggcgagaagtccgagtttaccatacacttcaacacctacgatcccagcaaggtgttcaacaggacgaaaagggagtcggaatcggacgcggatggccccgttgtggagaggaagtgtcccaagtgcaaccacgacaagatgtcctatgccaccctgcagcttcgatcggcggacgaaggccagacggtgttctttacctgccttaagtgcaaattcaaagaatccgaaaactcttagttgctagcaatgtccgtgtaaatagtcctagattaatgaaaataatcatgctcgacggcctgagaaatatagaatttaccaattataatacctaaccggtgtcaaacttgaagcagaacccacctcgctggccttgagtcggtttttgggattgtagaccaccagattcgagaccagattgatttccaccgcatgtgtgcagctgggaaacaagttgtcccagtgaatgcccacggagttgggaaacctacgtcaagaatattacggattaagtaatcatagacggtaagaatgcctaccgtatcttgctgtaatccggcagagaagtcagctctggccactgattcagacgtgggctgcccagagtgcgaatgatgatggctaattgctcgatgtcggtggttcccgcaaacagggg

SEQ ID NO: 31242 - protein, 120 aa, DROSOPHILA
MDIFSNCPGFCPSCGSILPELQVKGNVICYNCKKEFQPDVYSGEKSEFTIHFNTYDPSKVFNRTKRESESDADGPVVERKCPKCNHDKMSYATLQLRSADEGQTVFFTCLKCKFKESENS

SEQ ID NO: 31243 - DNA, 2644 bp, DROSOPHILA
ggctgtgcagataccaggccagcaattgcaggccaaaggttaacgttcagttcgtaacaggtcatgaagtaccatcgccggattaccgggaaacgttctattgtgccgccagtggtgccgattacaactcatacaccatgttgtggggtcagtattatttggaaaatcgcactagcgaaaagaatatgctctgggctgcaatcagctgcacgagagactacgaaacccattaccacaagatgatcatctctggtacggaaagtgttgaacaaaagaaaattggtatcgcccgtatgtacgaggagaatcctgacttggttcaggcaattttcgaaatgattaccgaaaacattatggaattagcgtataagtgagttatttttcataatttgatcatctgagagtgtggtttgattgtttattgaacacttaaccttgtcgcttttcagcttccagagttggtcgggacacggccgaggtgatcaatgacatggcggagtacttcaccacccgggagcaacagcagttgctcaaggaattctactacagcaatcaccagttcttcggtgaatcggaagagctgctctccaagtccctggtcactgtggaaaaaaaccttaactgggcggaaacccatttggaaggcttagtaaaatatctggcggacagaaatggtagctcctgcctgggagccacttccttggtggtggttctgcttttagcagtgggcagcatgttggcctggccctgattagccaataagttgtgagggaaataaagagattgccgtggtcgtgcgccgcgggagaaatgcccttttcgtgtacgcaattactaggcaaaaaggtttggacggcccttgctttattaggccataatttacgctgtcgagcggccattagagcggcatccgctggccaagttggtctataaaagcccggcggctgcaagtggcgttttccattccacgtgaaaggacactcgcagtcgggccgacgagatgctgcgccacctgctccgccacgagaacaacaaggtcttcgtcctgatcctgctctactgcgtcctggtcagcattctgaaactctgcacggcacagccggatagctctgtggccgccacggataatggtatttgataaggcatttgataatatcatattattcgctctaatggattccatttaccatccagatattacgcatcttggcgacgattgtcaggtgacgcccgtcatccatgtgctccagtatcctggatgtgtgcccaagccgattccctcgttcgcctgcgtgggtcgctgtgccagttatatccaggtgggtgttgatatacttgaaatataaattataatttgatataatctgatgactttaggtttcgggcagtaagatctggcaaatggagcgttcctgcatgtgctgccaggagtctggtgagcgggaggcagccgtctcgctattctgtcccaaagtgaagcccggcgagcgtaaattcaagaaggtcctgaccaaggcgccattggagtgcatgtgtcggccatgcacttccattgaggagtctggcatcataccacaggaaattgccggctattcggacgagggtccactcaacaatcacttccggcgcattgctctgcaatagattcccccatcagtttagcactcatacccatgcccatttgctcattaaaataaattagagttgccgtttctgcttgtacacagtgaaaaatgtgcctctgaaagctcatgccagtgaaagggaaacatcagcagatatatgattattttaaattgtaatttatttcccaactatctcatgtcattgctactagttcactaaatggtgtgtgtcctgcttcacagggtatgtatgtagatgcgtaactccaaagaaaacaaagataatctttacactgcaactggatctaacaataggagtttaactacggcataatgcatatgactcgcgccgcctacaagtactcgacgatatcgcatttgatggatatattcggacagctctggcccacggcactgcggccccgatagttgggactcttctcggtgaggagtttccggaagatgggcaaaattgccgtctcgccctcgagcagttccgtctcgctgctggcgccgtagatgctgctatcctgcttgccgcgctgcctgctccgctgcttatcgggcgccacattgggcgaactgtggtggtgggcggcgtgctggatgttagagctccggctgaccttacgcggctggacgcacggctgactgttgggcggcggatctcgttcccgttcgctgtccgtctcgctctggcaaacggtgcccttttgcggttttggccgatgtttgttgcggttcttctcggagacggaccgctggatgggcgaggtggtgttcgggtcataggtcatcccgtggccgccatgatgttccgcacagcgctgcggactggcgtagttccgcggcgactggcgctgcttggcgtgcgacagcgtgtgcgtgtcccagaggtcactctgtgaaaccacgaaattggacttcagagcggagcccatgctggtgcggcgatggtcggaggcagtgggagctattttcgattagaaaatcgatagtattatagtattataagagac

SEQ ID NO: 31244 - DNA, 522 bp, DROSOPHILA
atgctgcgccacctgctccgccacgagaacaacaaggtcttcgtcctgatcctgctctactgcgtcctggtcagcattctgaaactctgcacggcacagccggatagctctgtggccgccacggataatgatattacgcatcttggcgacgattgtcaggtgacgcccgtcatccatgtgctccagtatcctggatgtgtgcccaagccgattccctcgttcgcctgcgtgggtcgctgtgccagttatatccaggtttcgggcagtaagatctggcaaatggagcgttcctgcatgtgctgccaggagtctggtgagcgggaggcagccgtctcgctattctgtcccaaagtgaagcccggcgagcgtaaattcaagaaggtcctgaccaaggcgccattggagtgcatgtgtcggccatgcacttccattgaggagtctggcatcataccacaggaaattgccggctattcggacgagggtccactcaacaatcacttccggcgcattgctctgcaatag

SEQ ID NO: 31245 - protein, 173 aa, DROSOPHILA
MLRHLLRHENNKVFVLILLYCVLVSILKLCTAQPDSSVAATDNDITHLGDDCQVTPVIHVLQYPGCVPKPIPSFACVGRCASYIQVSGSKIWQMERSCMCCQESGEREAAVSLFCPKVKPGERKFKKVLTKAPLECMCRPCTSIEESGIIPQEIAGYSDEGPLNNHFRRIALQ

SEQ ID NO: 31246 - DNA, 2566 bp, DROSOPHILA
ttacatccagaaaaatgcactttctttatgaaagaggttacttatttaggtcacaagtgtactgacaaaggtatattgccagatgactctaaatatgaggtaataaagaactaccccaaaccagtaaacgcagacgaagctagacgcttcgtggcattttgcaattattacagaagatttattaagaacttttctgagaaatcacgccacttaacgaggctttgtaaaaagaatgttccatttgaatggacaagcgaatgcaatgatgcattcgaatatctcaaaagggaattaatgaaaccaacactccttcagtacccagatttcagcaaactgtagttaattagaattccaatacttctgatgtagttaataaagtctcaaaacgcagttggtcattttatctttatttggtttttattaagcgagcgtacattccagatctattcctgatttataactgatcttagtgtggtctacaggcagatctcttgtgacagccaagtgctgacactagcaaattctgcaatatgtaagtatgtagttcatactcgataaccaatgggagtcgagtgcgacccctaaaggcgtacatgctgaattcgcatatttagtattagggtgtatctaaagatctactagggtgaccctaaggaattagggtggtcctaagtttacttattagtcgacttattattatgattcatattataattattattaatattattattattattgttattattattgttattatgttcgtatatactacactccgctggatgtggccaatcgcaacaaactgatcaaatggctgtgcagataccaggccagcaattgcaggccaaaggttaacgttcagttcgtaacaggtcatgaagtaccatcgccggattaccgggaaacgttctattgtgccgccagtggtgccgattacaactcatacaccatgttgtggggtcagtattatttggaaaatcgcactagcgaaaagaatatgctctgggctgcaatcagctgcacgagagactacgaaacccattaccacaagatgatcatctctggtacggaaagtgttgaacaaaagaaaattggtatcgcccgtatgtacgaggagaatcctgacttggttcaggcaattttcgaaatgattaccgaaaacattatggaattagcgtataagtgagttatttttcataatttgatcatctgagagtgtggtttgattgtttattgaacacttaaccttgtcgcttttcagcttccagagttggtcgggacacggccgaggtgatcaatgacatggcggagtacttcaccacccgggagcaacagcagttgctcaaggaattctactacagcaatcaccagttcttcggtgaatcggaagagctgctctccaagtccctggtcactgtggaaaaaaaccttaactgggcggaaacccatttggaaggcttagtaaaatatctggcggacagaaatggtagctcctgcctgggagccacttccttggtggtggttctgcttttagcagtgggcagcatgttggcctggccctgattagccaataagttgtgagggaaataaagagattgccgtggtcgtgcgccgcgggagaaatgcccttttcgtgtacgcaattactaggcaaaaaggtttggacggcccttgctttattaggccataatttacgctgtcgagcggccattagagcggcatccgctggccaagttggtctataaaagcccggcggctgcaagtggcgttttccattccacgtgaaaggacactcgcagtcgggccgacgagatgctgcgccacctgctccgccacgagaacaacaaggtcttcgtcctgatcctgctctactgcgtcctggtcagcattctgaaactctgcacggcacagccggatagctctgtggccgccacggataatggtatttgataaggcatttgataatatcatattattcgctctaatggattccatttaccatccagatattacgcatcttggcgacgattgtcaggtgacgcccgtcatccatgtgctccagtatcctggatgtgtgcccaagccgattccctcgttcgcctgcgtgggtcgctgtgccagttatatccaggtgggtgttgatatacttgaaatataaattataatttgatataatctgatgactttaggtttcgggcagtaagatctggcaaatggagcgttcctgcatgtgctgccaggagtctggtgagcgggaggcagccgtctcgctattctgtcccaaagtgaagcccggcgagcgtaaattcaagaaggtcctgaccaaggcgccattggagtgcatgtgtcggccatgcacttccattgaggagtctggcatcataccacaggaaattgccggctattcggacgagggtccactcaacaatcacttccggcgcattgctctgcaatagattcccccatcagtttagcactcatacccatgcccatttgctcattaaaataaattagagttgccgtttctgcttgtacacagtgaaaaatgtgcctctgaaagctc

SEQ ID NO: 31247 - DNA, 408 bp, DROSOPHILA
atgctctgggctgcaatcagctgcacgagagactacgaaacccattaccacaagatgatcatctctggtacggaaagtgttgaacaaaagaaaattggtatcgccccttccagagttggtcgggacacggccgaggtgatcaatgacatggcggagtacttcaccacccgggagcaacagcagttgctcaaggaattctactacagcaatcaccagttcttcggtgaatcggaagagctgctctccaagtccctggtcactgtggaaaaaaaccttaactgggcggaaacccatttggaaggcttagtaaaatatctggcggacagaaatggtagctcctgcctgggagccacttccttggtggtggttctgcttttagcagtgggcagcatgttggcctggccctga

SEQ ID NO: 31248 - protein, 135 aa, DROSOPHILA
MLWAAISCTRDYETHYHKMIISGTESVEQKKIGIAPSRVGRDTAEVINDMAEYFTTREQQQLLKEFYYSNHQFFGESEELLSKSLVTVEKNLNWAETHLEGLVKYLADRNGSSCLGATSLVVVLLLAVGSMLAWP

SEQ ID NO: 31249 - DNA, 15072 bp, DROSOPHILA
acttggcgagaagtttaaacgtggctggttaaagctgttcaaggaaaaacggaaggccagcgagtgcagggtgcaatttcagaattgaattccttgccttttaaatggatttcagatcgaaattgggcaagggtatccgatggcagtgtgggcattttgacccgatcagcacagtttcgtaaaaatatcaagtaaatatttctagtgaactagtgtattttccggccaaacaaaaatacattttcgtttgttttcttgcatatactaaacataattttgattgttgtaataaaagggtaagcttaactatagcaatatggtttattccgaacctgcagtttcaatttgggtcttgtttttttggccaactccaaggggaatgaggatgcagggttacctgtgcattgaggcggccacagcttgcaatttaccattaaaatttatatgcgtttccaaaggcgtttagctgaaatatatggccggcagagttggcctggccgaatattgttggtaaatagttgctgccgacgtcgctgctgttagatgaagcgcaaagggctaaaaggggcggtatgggcggtaggggcgtggccgtgttttacaaacttcttgagcatgttgaacatgctcagtttgtttgtgtgtgtgcgtgtgtttgtctgtgacatgtgaagcgtaaaaccatggcaggatttagaactttgtacgttggttgggaaattgcaaaaagggaaaaaggaaccgaggataaaactttaaagaagatattagattaaaagttgccccagtccggggtggacagtttggacaacttgccgctgctgctaatgctcgaaaggggtaggaaattcccaggacttgatcaggccaagcaaatttgccagcaaagcgatgataatggggttggctcaaaatagttggccaagttggctcacccacataaccaaaaataataagaataccgtttggctggcaagagcagtgtagagcagtcaaaacaatgaaaacgcaaaaaggcggaatgggtaaatcccaagaatatggggaacaaaaaattaaagctccgcagggaaaatagaggaaattcctcgttcaactttgactgcacctgttcgaacatctttccttttattttccactttgctaagtggcaacagcataagtagtcctcttaaagctgtgacagtcaagcctttaaggagcttgctggccaaataggtgagttgacagcccaagaaggctttcccagtcgatatgcatatcgcacggtggcgatgttgtgtaagggcacttggcagtgtgcaagccgcaatactgaagagtactttctgctttcttcgtttcagttccgcccgagtcggtgattatattggacagcaagggtgtgaccatcgaggatcacacgctgggtccttacaacgagggctctgggataaacatcacgtgcgtggccatcggcggtaagtccttaccagttttcataccatatacgtacgtacgatgtgtgtgtgtgtgtaaaagtgttgacgctgcaacgcttgtgtctgacaattaaaagtgatgagcgtgaaagtgcaggcgaaagattttcacattttatttaatttccacccgcctgtcgactgcacggacacgaactcgaactcaaacaagggctggagctggaaaaccaagtgcagacaatcgaggagctcggcagctcacacaatgcccacacaaattgcattgagagcacttgagaattgctaaaagccaaacaagacaacaaatgaaacagcgaaaggcacttgtacacacacacacacacacaaacacacgcgcgcagcccacacacccacaaacaccgattcatatagaccacacagcacatataccctagtgaaagacactcatccactccgtgcacttgtgagcacataaacaaacagaagaccggctaaaatgctgctagctaaacgcagagacaactccaagtctaagccgcatggcaaacatatcagttgcacacacccacatccatacgcacacgttacccacaagcccgataattctttttcttgcccgggcatcttgtaagaactccccaattcctccaccttccacaggccgcccgcagccgagggttacctggctgcatggaaacaccgtctacaagaatgccagtgtgggccaacccctgtccgagcgacgggtgggcaataccctgtccttggctcgactggagcgcaggaatcttcacatgcagctaacgtgccgggcggagaacaataatttgacaacgccaattatcagcagcgtcgtcctcgacatgaaccgtgagtagtgcttggcccccgggagtccccttgattccccattccccattcgatttcggtccgggcctaactaattaaattctatcgcctccaacagtgcgtcctttgattgtgaagctgcagggggagaatcgagctctgtcggcggggaattcttatcagctcagttgcgttgtcatcggagcacgtccagcgccgacgattacctggtggaagggcagtacccccatgaagaatactcacgagattgtaagtggaaacgcaaggcagccgtacaaagttcgactagcaagaggtcctgtagatgtttacttgaaaataactcgactaaaatatcagtggaacttgtcaaactctgctgattgaattttcttgtatgtttgtaatctaattgataagttgtttaaagcatttgtttctaatgctttaaagcagtctcactttatcaaatttaaacatttaaaaaaggactaaatataagtaagaatgagtaatattgtttcaagctggtggtcggaatcacccgactgctaccctggtcaaaatgtttataaacatgcaaatttcaaatgcctgtcatccttgttaatggctgccccagagtacactttccattccccatcgagagacagagccgtacacatgctttgtggtaattgaagttactcgaacggcagtcacgtagcaaggacctcaattaaaagtcaccccctatccatatggcaggacgtgccaaccctttccgagtcctttgtcttggccaactgctcagccgttaactaattgtcccgatctctcgcccacttcttgttatttaggctacaccggacggtaatctgactacctcggtgctgacattcacgcccaccatcgatgaccgcggcaagttcctctcgtgtcgcgcggagcagagcatgatacccgagtccggaatggaggacggctggaaattggacatatatcgtgagttttgcttaatatttaatatgaagtgccaaagtttttaatgaaaccgaaatcctaaagtcggctagcggttttaaagtcgctgtcctcaacttcaccttttacattatacatatatatatgtatatatagtggtccatatttttcttcgattctcctcagctgcgcaagttttggcaaattaatttccagcggccgccggtgaaacttttccacaaaaacttacgaaactttttaacccgccacaagcaccgcaacgccgcctgcaaagtcatctttacgcttttacagttttcgacctgtttgcacaaaatttaaatggcaaagccaccgccgcccccttcctgactccaaaaatcgaggacgagttccgcttcctgtttgccttgggagtgcggttttgttgcttaccttttaacttttccacttttttgctgcacaaccagccacgcccgcccaaaactcgattcgattgaaatatctggttcatacgccgcgaaacgaatccttcggcgcgcgaagggggcactgtttgctcaatttgatagattgcttaataagcttaattgattcgcattcgcgcaccaatttcgaattaatcaagttaaaatgttgctcagttacccaatggcctaccctaaccaccccaacccaccaactcgccacagccagccgaacaccattttgaaggcctaattgccgagttggccaacggaaaaagtataatcataaacaaacaagctggcacggaaaaaatcgtagagcgagttgagtgaaagtaggggaagctgaacatttgagcaacttaaattggctaatttgtgcggcttacgcagtaattacatctttcggccctgtgcttccggaattttatttgcctgccaggtttattactcgtctggccaggcgatttaaagtaattagctacgccgatgtcatggcagcaaaatctgttttccttcatagccaagcacaatgacgtctatccaatttacacgttcttttcattcgcagacataccggtggtgagcctggagctgggaaccaattcgcttaactcaactctgcgcgagggaatcgatgtcttcttcgagtgcaacatcaaatcgaatccctggatatacgaagttagctggcggcacaatgtaagtgacagacagatgccattttacacgcgattcaccgcctaccccacaaatttcgaaagtaaattgaacgccccactgcctttgccaactcgcgtctaatttcatacgacttgggggcacttttgagaccaggagagcgcaggagagcctcttaacagcaacatgcatatatattagcagcgatattattattataattattattttatataccatacatacattagcctttggcggctgatcgaaagcccaaaactccggccgaaatggaacgcataattgttgcatattttagggcggctgccaaggggctaaaaattggaatctactcaacgcagcgcacacatagaaagcgagcacacaatttattattgaattactgggctgtgagagcacttaataatttatgcagaccgggcctaatttatgcagcagccagcgggtcttcaatcagcaatcccgccctccggccgacggggcgtatgcgcaatgtaacgcaacataaaagtgttattagctttgagaaattaaatttatttcaatttagcagttatcggtaaattgaattcaattcaataaattattgcgccacacacgaatggggtggaatttggtattcgatatattccattttcaatttacctttcacttttcactttttgctttcaatttcagggtaagattctaaccaacaatccagccgaaggcatcgccgtctccaaccagagtctggtgcttcaaaatgccagccgggcgagaagtggcatctacacctgtgtgggcagtaatcgggagggcgacggcgagagcaatcccgttcagctggacatacgatgtgagtatgggtgtccttcgtccttggacttagctgcagtgtgttaatttacataacagcttaattaaaacgaagtggatctttcgattgcaatgtgtaactaacacgttacacaatgcaattacagcaggacgagtgtccgtctgtccgtcagtgtctgtttgcgacttatcctgtcagagacaaattgaatttttcccgtaaatcagacaaataaatcaattaagcaagcaacaatgcagccgcaaacgaggcgacaatgctggcattttctttaaatatttaattgtggaaaatccaggagttctcgtcgtcaagtgaaatgctcccatcgagcgcgtatcaagctcaagttgggccaatgtttttctttaattatgcagatagccatgcaattgaaaccgatgccctgcgctttgtctccttgcagttgctcctgtttgccgacctcgccagcgtctctcctatagctcgggcaggcatgagactgtcaaggtggcctgcgaaattgatgccaatcccgcggaggccacctacgtttggaaattcaatgcaacccagggcgaaacagttgacataccggcttcgcaagtggccgtggatcggggccgaagtatagcccattacacgcccatgacggagaatgtaagttcaccacatcccagacccattgccctgttcatgtccatgcccaatcccatgcccatttccattcccattccgaatcctgctgccccttctggaggccatataaatcagtccgtggcacgcccttgagggccagcacataattttccaaacgagttgcggttttgaattttcaattaaggttgaaaaggtgtgttgccaacggcgttgccatcgccgcagtgcatgcataaattaagccaacgaaatgcattgtcactcaacccgaccccctatccctgccacccacctggcacccccatacggccgtatcctttcgccacccacactcgttctgatgcccgtgtttgcgatttcttctttgcattgccaggactacggtacgctgctctgctgggccaccaacgaaattggcgatcaaagtgaaccctgcgtatacacaatattcccagcaggtgagttgcaattgggggtagagatgtgggcgggaagtgggtgattcacctgtatgccgggctatgtgccttcgtgcctcgcgtgccgacagcttggaccctatctatttcgggctttataggttttatccggcactcaaatagggtaacttgttacatttttttatttttatttaattaatatccaatttgtattatttaatttaattatttaattttttattttttaatagaaaataatgataattattcagtataattcttatctacacggtatctatgccgccatcatcaaaatttctagccgtgggaaagagtttggctttcagcggtttttgtttgtgttttgttttgggttttgcaaagtcccgctgtgctgatttgtcgatgactttggcactttggcgcttcgctttttctggctgctggattaggcaaacttgcgctgcgagttagcttattgattttgaagagtatgcgcatgcaagagccgtagacaaatgcttggggtctcggcaatttgttgcctgatctgccactaagccggaataataaatacctatttctacgtctcctcgcttgcaggcgagccggatccgttgctaaactgcacggtgctcaaccagacatcgacgggcttccaaatcgaatgcatcgagggcttcaatggcggcctgcagcaggactttataatggaggtttacatgaacggaacgacacgacatcccaaaatttcaaaatcaaagtgagtacggctcgagtgccggaactgtacgcaaaaagaaaaaaaaaaaaaaaaaaaaaggcagaaaggggcaaaataccagaaaaagaggcggaatggacacggagcaatcagaatcacacgccgtgtgacttctgcattacaacaagcccaacgagccgtggcatcgaacagaacgcatggccatggttacgtttggatccatggatccatggcgatgtgaacatcctgcagctgcagctgctccttcggcgaaacccatttgtcctgctctttgctctgccactggcactggccttttttgcggtttcctcgttcttgatttggacattcaaatatcgattcaacttcgttgcaggcgaccgtactttgaggtaagcggactggtgcccggaatgggctacaatgtcttcctcattgccaacaacagcaagggccgtagcaatgccaccattttgcaggtctacacgctgaaggatccggagaagcagacgggtgagtttaatcacacgggactcaccctgcgaatcttccagtttcgaggaccaaatccatcctacacatataaggctcgagtgatgcgggctgtcctgtcattctcttctccctgtgcgtttgcaatttcatgcatgtcctagtccgagtccttgcccactgcctataaattaattggcaagggcctgtgcacacttacagctgtttcatttgtcttttagttctgccttcagttctttctaacatggtttctttcccttatgccttatttcaaactgcacgctttattttagttaaaataacattcactaagtccttccaaggacttaggcctgcctataccaaaacaaaagcgacagcgaccacgaccagcgactgcgtttgcgatgaggatgagttcctaaatctgggcaagggaattagccacgacgagggcacagacgctgaccagcaagaaggtagcggtggactatccttttctataattttctattaactatgctttttattgtttaacttgtagtactgccttgtttgcttattattatttgctttaatattaattcaatgttattatttaaatatgaattttaatttgatttatgatttgttgttgtacgagtatgtagctttagttgttattcatgtgtttaatattaaatatttatttgtgtttgtttcccttagccgttttgtaataatatgttagttttatatttgctgtaattaatttccacttaaacattttttggtttatagcaccattaattcactttaacaacttcaccccaccaagtctgcaaaaaaaaagctgcacaaataaatccggatgccaaatggttttattttcctgttcccttttttatgttgggtcactaaaaattctcgacatgccgacatggactgagaccaaaattagctagccagggggttggcggtggcggtggaaagcggttcggattacaactcgcagacatgcacccacacacatgcagctcattagggcggcactaaattcaaggcacgtgcgacacaaactgccaccgacaacagcaacaacaataacagccaaaggacgaagacaggaccaagaacggaacgtagttagcagctcataaaacaatgcagtgtcgctgaaagaaagaaggagaaaaggtggtgcacagagaaaaatccatcacaattaaaatcattttcaaagaaaatgcagttcagtctagctttgaggcgcttcataagtgttttcatgaaattatatacatcacattaggtacaacttatttcaaggagctatgattgctcaccgttatttttttctgtgtactcgaagcaatatgtaaatggagaagcacttgcttatccaccaatctctggtctctttccggtttccccttttttactttccctcattctctcgcagacctctcgttggcctatgcccccgtcatcgaggacatccggccattcctcggcattctggccggcatcgtgggcagcattttcctggtggccctcatcattgtgattgtggtgcgtgtgcgcggctcttcggggcgcgatcgcaataattactcacatccgggaagcggcgtcggcggcgtgggcggcgtgggcggcaccaccggcaacggcagtgggatgggcggcggtggcggcggtgtgggcggcaccacggccaacgggaatggcagtctggggctgctggctagcaacaacaatggcagcctcgtcatcggcaccctgggccacaatggtgggcaatcagtgcaggatatgcaccgcatcggccgggagacgtgccatgtgacgagcagtctggacagcatcgacaagaatccggacatcataccgcaaggtgggttgggtgagtttccacaggtggcttcgattataacggtcgccgagctaatcctcaatgcccacggggctgaatccctttttttttttttgcagacggacacgacctagacgatgagtggacgacaaagggacatggtcgcacttacgccacggcagcgatggccgagcaaaatgccgtgataacctccggcacctatgatcacctgatgcccacgtacgccgttgtcgacaagaagacagcaccgcctcccggccatggccagtacatccagtataatacactcattcccgttagcaaaatgggcgcttatgccaatcaacagcagcagctccagcagcagccgcaacagaaggtaagttatggacaccctaatccactttcactggcgggcacaaaaccttttacaatatgcctgagataccgccatcggagccttaatttatgacccatggacggctgaccaggtgatggtcaccccttattgtttcacttggtaatagccatccacatatttctggttaagtggtttttatagccagcagtttagtttgttgccgttgcctcttgataatcacaaagaagtctcttaaaggaagctcttgcttagaagtacggctattaaaaagtatataactattaagtaaaagccattaattgggctagagtcaatttaacagtatataattaatgcacaataattagaagcaaatggatcaatattaaacattaggatacacataacttgaacaaaaagttaatggggctgaaaagaaaactatttaaaactaactcacagctaccacactctgtcattgaagaactacaaaaatatagcaaacttacaaaaaacgaaaagtttcctaacaaaaactcctgaaggtcgccagtgaaaaataagcgaaacaacaatgactctgatgggaatagaacagcatcatctgcagttgtacgagaagcgaagaaaccaacataatttgaaaatcatttaagtagaaatttctctatgctagccacgcccctttccgaaggagtaagagccagtaagcgatagctgaagctccaagagcagccgcagcagctgcagcaatataaattttccatttgcgaatttaataaaaataagttgcaggcggacccagcgccattcgagactgcgaagcagcaaccgctaaggagccaaaggatgtgcgcatcctgtttccaaccccaccgctccttcgccagcaacctcgaaatgcaataaacggccaagtgtgtgcctcgctgagggttctggttttggttctggttctggttggaaaacgactgttaagggcagggccagcaacggcagacacattacaaacaggcgccggaagtgggcggtgtctggcctaaacaaacagaccaacagcagacataaagcagtcagaagcgaaccgtgaattctgtttgatgtgtattagcttaaacctgctcaggttattaataataccttctgctcgtgtcacttaatatctactactttatatttccttggaaaggatttgacaataccaaacattgtatgtttaatagggcaatcattgaaagtttccagcagctttgcggtttgttttatttagaaaggcggttatgattgtgacaatgatgagtgaggtggtgtatcaaatataatttcattgagtgacagaaataattttataagaaaaaacagttttcaagatttcttcgaaaattcataggtcaaaaggtataattttgtaatatctttgtttccttcaactttctctccttcagactgagctcagttatagcgaactaagcgctcctctcgtcagcggcccggtgggcgttcaacggatggcaccctactgcagcgcgaccttgggacggccgggcaggcaggcggaacttaagcgtgcggagccgaacatctactcgcaggtaaatgttatgatggacgacgagattctggccgacttgcaggcggccacagcatccggcagaagctatgtggctggagccgtggtcgacaatgtgggcggagcgcccaatctctacgttcaaggctatgcgacgcgtgtttagcattgaatcgaatagttgattataatttcgttatttatattgatagtttttggttattaaaaataaacttaatttattccactcattaactgtatgatttgtgcacagttctagcttaattacattctatatttgtggggagccacagaaaataaattatcatccagccacgataaaaagctgaccaaatcaatgaatcgacgtccaaaaaaaaatactccgagccggcatggaaaatatttatcttccatcgaaaagcaattttggttattacacatacgcaccgtagcacacacacacaagtgaagaccaaaaacagggaattctgaggttcgagctttagaagacacagaaaatctgacagatgtagagtaatgacgaaggcataccctcgatgaaagcgcataaaatatttgatggaatttacccagaaaattgagtacctgggactctggccacagacttgcaaagaacttgcctgtgaaacgtaaatacataaacttgacagatatgacagaggagaagaaaatttttcgaatttgtctggcaatggcagacaagttgtgttccgattttgtggaacactcccatcgggacttttgcacagtcgagactacttctctttgtttatccggccagctttcattcctctcaattattgaaaagacttgagttatgaccaagtgtagttgaatagatatagattcaggctggacaggtagcaaatgcactagaacagccattgtgatgtaggagaactcgttcgttgggaatacaaaccaaaacaacgattaatgcaaccacatgagcgcagttctggcatccatttcacataatgacattgtttggccttattgtcatttatcgaaaagttgtacacgacatgtacttggctctcgagtgcttttcctatgcaatccaaaaaaaagttcctttaatatccagctaatagttgtattattttatattttgaaataatttcagttggttttctttatgtcccataagtaaaaaacaaaaatcccttaaaccgctttattaaatataacataatcttttgttgccacacttaattgcatattttgaagtctatgccagaccatatactccaatttgaatggagctaaaaattaattcattaaaatcccgttgtgcccattaagagaacaacgtcagcatgccccgcccaggcgtacgcgttaattacggatataagcatataaacatgcgtcgcatactcgcgcccacaaagccagctcgcagaaacacgacccaccgatgggccaattattgtagtagctcaccacatagccagcctcttgtatgccacggcaaccatgttggctaaataaacgcctgccgcgatgttaactatcagtaacatggcgaggggtaagtgggggcggtggaaccgcagagtccgcgatgccagcaatatgcgtgggaaaccacatatacatattaacatacaggccactggcacagtattcagatttactataccaaaccatggcattaaattgcggaaaataattaatattatctttcagtactatgcaatcaaattgtttaagtttaaagtttgattttagtacttgtgtactttggtatttcatacttagaagtttgaaaaggtttgggcccaacgaatagccactgctaattagttggcgcccaacgtgggacctaaattaacgcgttctctaaattaattatgtttaggttcagcattatcatttactctcctcatcgatcaattacttttgtttcaaccctcaaactcgtgactaactcgcagcatataaatcatcacatgactaaaacctcattacctacctcctctacctaaccgccacagatcgatctggcacatcatcccatgcccatgtactcaacgagcccgatgtttggcacgaacagcaccatcaccggagtcaccatgtcgcatccatcacaattggccaccttctcgccgacgccgccgccgcccatcttcacccacagtatggtgaccactggcgatgggctcctgcagccggtgacgtgcatgggcctggtggcaacatcttcggcaggggcatcggttcctggtcctgttccactggccccgcagcaacagcaacagcagcagctgacagcggccaatggcggaaacggaagcatcgtcggcatgggcatgagcctttatggcagcgatgtggtaagtgtcagtttgatgtacttccccaattcctggaagctcctgctgctccttgttgatagcgaaccggtcgtcaaggcaactctctcgcctaatgtccaaaacgttgaaagcatcaatatgcaaagtggattttcgggcaaggatttttggcagtgcttcttggcacgaaggggtttgggggaaacggcagcaggaaacatttatcttcgcccccgaaccacccgcacctcggggccatcttttgtgcccaattttgttttcgtttttcctttataaatggtagccgctggggcggaaaatgggtttttgcggtcgggctgataactgctaaagtgattgcaaccgccgaaagggtattcaaatgtagaaaattaagactggaaactgttcgagttcagatatttaacgcctaagtagaacacgattgaacaacttcatttttgggacctaagagctcccgtttttttgttcggttctcatcacaatttcctctacattacgcgcctttcaatcgattagcccacccagtgcgtcatcgatcaacagatgactcaccgtctcctcaactcagtgacagtgcaattttctggcaatccataacctttgatccctcaacagacaactttaaactcagcttgagggagacagagaaagatagatagaattttgccggcattttcaatgggttcaaggcggtaaatgacccctgaatgtgctgcaggataataaaaaaaaaaagctagccgctcgctgtcccgctcccgccgccagtgtccgccattcattgtctctgtccgttgctttataaataccccattatgtatactcccaacgcagcagcgcagcagtgcgttcgtcctggcccttctccacgatatagccgctagtggaccaggccaacaggctttggccattgcattgtccccgctgatgttcgttccacaaaaagaattacgtttttacaacaatatcatgccaaaaggacactgcggtgtgacaacttttgactctaatgattgcaattattatgacccaaataagaagaagagcaccgggacatgaagagaatgggcaaaaaaacgggagcagaacaacatcatcatcaagagcagcagcagcagcagcagcagcagcagcagcgactgaattcacaatgttttattcctctgctgccttctcggccattttttgtgttgccttttcttgagctgctcctttcgtttgtcactgatgtggcccttgtttttcccgcattcggctcccaaaggcggccaaaacactttgggccttgttgacccaggggagttggccaaaaacacagaaaatggctg

SEQ ID NO: 31250 - DNA, 3544 bp, DROSOPHILA
atgaaaacgcaaaaaggcggaatggttccgcccgagtcggtgattatattggacagcaagggtgtgaccatcgaggatcacacgctgggtccttacaacgagggctctgggataaacatcacgtgcgtggccatcggcggccgcccgcagccgagggttacctggctgcatggaaacaccgtctacaagaatgccagtgtgggccaacccctgtccgagcgacgggtgggcaataccctgtccttggctcgactggagcgcaggaatcttcacatgcagctaacgtgccgggcggagaacaataatttgacaacgccaattatcagcagcgtcgtcctcgacatgaacctgcgtcctttgattgtgaagctgcagggggagaatcgagctctgtcggcggggaattcttatcagctcagttgcgttgtcatcggagcacgtccagcgccgacgattacctggtggaagggcagtacccccatgaagaatactcacgagattgctacaccggacggtaatctgactacctcggtgctgacattcacgcccaccatcgatgaccgcggcaagttcctctcgtgtcgcgcggagcagagcatgatacccgagtccggaatggaggacggctggaaattggacatatatcacataccggtggtgagcctggagctgggaaccaattcgcttaactcaactctgcgcgagggaatcgatgtcttcttcgagtgcaacatcaaatcgaatccctggatatacgaagttagctggcggcacaatggtaagattctaaccaacaatccagccgaaggcatcgccgtctccaaccagagtctggtgcttcaaaatgccagccgggcgagaagtggcatctacacctgtgtgggcagtaatcgggagggcgacggcgagagcaatcccgttcagctggacatacgatttgctcctgtttgccgacctcgccagcgtctctcctatagctcgggcaggcatgagactgtcaaggtggcctgcgaaattgatgccaatcccgcggaggccacctacgtttggaaattcaatgcaacccagggcgaaacagttgacataccggcttcgcaagtggccgtggatcggggccgaagtatagcccattacacgcccatgacggagaatgtaagttcaccacatcccagacccattgccctgttcatgtccatgcccaatcccatgcccatttccattcccattccgaatcctgctgccccttctggaggccatataaatcagtccgactacggtacgctgctctgctgggccaccaacgaaattggcgatcaaagtgaaccctgcgtatacacaatattcccagcaggcgagccggatccgttgctaaactgcacggtgctcaaccagacatcgacgggcttccaaatcgaatgcatcgagggcttcaatggcggcctgcagcaggactttataatggaggtttacatgaacggaacgacacgacatcccaaaatttcaaaatcaaagcgaccgtactttgaggtaagcggactggtgcccggaatgggctacaatgtcttcctcattgccaacaacagcaagggccgtagcaatgccaccattttgcaggtctacacgctgaaggatccggagaagcagacgggtgagtttaatcacacgggactcaccctgcgaatcttccagtttcgaggaccaaatccatcctacacatataaggctcgagtgatgcgggctgtcctgtcattctcttctccctttaaaataacattcactaagtccttccaaggacttaggcctgcctataccaaaacaaaagcgacagcgaccacgaccagcgactgcgtttgcgatgaggatgagttcctaaatctgggcaagggaattagccacgacgagggcacagacgctgaccagcaagaaggtagcgacctctcgttggcctatgcccccgtcatcgaggacatccggccattcctcggcattctggccggcatcgtgggcagcattttcctggtggccctcatcattgtgattgtggtgcgtgtgcgcggctcttcggggcgcgatcgcaataattactcacatccgggaagcggcgtcggcggcgtgggcggcgtgggcggcaccaccggcaacggcagtgggatgggcggcggtggcggcggtgtgggcggcaccacggccaacgggaatggcagtctggggctgctggctagcaacaacaatggcagcctcgtcatcggcaccctgggccacaatggtgggcaatcagtgcaggatatgcaccgcatcggccgggagacgtgccatgtgacgagcagtctggacagcatcgacaagaatccggacatcataccgcaagacggacacgacctagacgatgagtggacgacaaagggacatggtcgcacttacgccacggcagcgatggccgagcaaaatgccgtgataacctccggcacctatgatcacctgatgcccacgtacgccgttgtcgacaagaagacagcaccgcctcccggccatggccagtacatccagtataatacactcattcccgttagcaaaatgggcgcttatgccaatcaacagcagcagctccagcagcagccgcaacagaagactgagctcagttatagcgaactaagcgctcctctcgtcagcggcccggtgggcgttcaacggatggcaccctactgcagcgcgaccttgggacggccgggcaggcaggcggaacttaagcgtgcggagccgaacatctactcgcaggtaaatgttatgatggacgacgagattctggccgacttgcaggcggccacagcatccggcagaagctatgtggctggagccgtggtcgacaatatcgatctggcacatcatcccatgcccatgtactcaacgagcccgatgtttggcacgaacagcaccatcaccggagtcaccatgtcgcatccatcacaattggccaccttctcgccgacgccgccgccgcccatcttcacccacagtatggtgaccactggcgatgggctcctgcagccggtgacgtgcatgggcctggtggcaacatcttcggcaggggcatcggttcctggtcctgttccactggccccgcagcaacagcaacagcagcagctgacagcggccaatggcggaaacggaagcatcgtcggcatgggcatgagcctttatggcagcgatgtggtaagtgtcagtttgatgtacttccccaattcctggaagctcctgctgctccttgttgatagcgaaccggtcgtcaaggcaactctctcgcctaatgtccaaaacgttgaaagcatcaatatgcaaagtggattttcgggcaaggatttttggcagtgcttcttggcacgaaggggtttgggggaaacggcagcaggaaacatttatcttcgcccccgaaccacccgcacctcggggccatcttttgtgcccaattttgttttcgtttttcctttataaatggtagccgctggggcggaaaatgggtttttgcggtcgggctgataactgctaa

SEQ ID NO: 31251 - protein, 1162 aa, DROSOPHILA
MKTQKGGMVPPESVIILDSKGVTIEDHTLGPYNEGSGINITCVAIGGRPQPRVTWLHGNTVYKNASVGQPLSERRVGNTLSLARLERRNLHMQLTCRAENNNLTTPIISSVVLDMNLRPLIVKLQGENRALSAGNSYQLSCVVIGARPAPTITWWKGSTPMKNTHEIATPDGNLTTSVLTFTPTIDDRGKFLSCRAEQSMIPESGMEDGWKLDIYHIPVVSLELGTNSLNSTLREGIDVFFECNIKSNPWIYEVSWRHNGKILTNNPAEGIAVSNQSLVLQNASRARSGIYTCVGSNREGDGESNPVQLDIRFAPVCRPRQRLSYSSGRHETVKVACEIDANPAEATYVWKFNATQGETVDIPASQVAVDRGRSIAHYTPMTENVSSPHPRPIALFMSMPNPMPISIPIPNPAAPSGGHINQSDYGTLLCWATNEIGDQSEPCVYTIFPAGEPDPLLNCTVLNQTSTGFQIECIEGFNGGLQQDFIMEVYMNGTTRHPKISKSKRPYFEVSGLVPGMGYNVFLIANNSKGRSNATILQVYTLKDPEKQTGEFNHTGLTLRIFQFRGPNPSYTYKARVMRAVLSFSSPFKITFTKSFQGLRPAYTKTKATATTTSDCVCDEDEFLNLGKGISHDEGTDADQQEGSDLSLAYAPVIEDIRPFLGILAGIVGSIFLVALIIVIVVRVRGSSGRDRNNYSHPGSGVGGVGGVGGTTGNGSGMGGGGGGVGGTTANGNGSLGLLASNNNGSLVIGTLGHNGGQSVQDMHRIGRETCHVTSSLDSIDKNPDIIPQDGHDLDDEWTTKGHGRTYATAAMAEQNAVITSGTYDHLMPTYAVVDKKTAPPPGHGQYIQYNTLIPVSKMGAYANQQQQLQQQPQQKTELSYSELSAPLVSGPVGVQRMAPYCSATLGRPGRQAELKRAEPNIYSQVNVMMDDEILADLQAATASGRSYVAGAVVDNIDLAHHPMPMYSTSPMFGTNSTITGVTMSHPSQLATFSPTPPPPIFTHSMVTTGDGLLQPVTCMGLVATSSAGASVPGPVPLAPQQQQQQQLTAANGGNGSIVGMGMSLYGSDVVSVSLMYFPNSWKLLLLLVDSEPVVKATLSPNVQNVESINMQSGFSGKDFWQCFLARRGLGETAAGNIYLRPRTTRTSGPSFVPNFVFVFPL

SEQ ID NO: 31252 - DNA, 2610 bp, DROSOPHILA
acgaaatcaaatttcgccctaataaacccataacagcgatatcgtgtttcgcgaaaatgccaaattttcataaaacctcaaaaattgatgggctgagaaataggcaaaatggcatcgcaattatgcagcaggacttgacaggactagaagcgacaggctgggtcagccgaggacacagtttagcacctagctatgaccataaaaatttgtaattttccccaacacatatttcctttttggcaaccgtccaaagtatgcagcgtgaaaagaaagagggcaaaaataagaaaaaaattgttcaggccgtaaataaccaaagtaaacaacgcgacaagcggtttggcggagcaggaggtcgctggaaaagagcagacaaagtcccggccgcaaaagccaaaactcactgcgaatgtgaatattcttggaattttcatttgttgtctacagttgcatggggttgcatagttaggaatgtcttttctccaaaaaaaaaaaaaaaaaaaaaaaaaactgtagtcaaaccaaaccaaaccattccaaactaaaacccccttttccacccactgtcaacgcaatttgtcgctttgtgttgctcctgccgctgcagttgtcgcttcatttttgcaacaaaagtgttgcaaaatatgttgacaggaaatgttatgcgaatttcactgcgtataaaatgaaatttacgtgcaactttgcacagtgtgtgtgtttagttttgccggaaaagctttggtggccggcctttaaaaattgtaagagtatataattgccaatgaaaatcaatcattggattcgagctcaatgcaagctgattcagttccgagttttgagactcaattaaatgcacgacagatcgtacttccaactggctcatattgtgtacagtaaccagttgatcgcaattaactagctaactagatacagataagctagacgccataaattagccacaagccagtgtgtataaaattcagaaccgcctttctgcgagtaacagtttatcgtgaggtgctactgtgctaggaaaacccatgtccatatttatcttgaaacagattctgcgaatcgttagataatgcttaagctatggctaatatgtatcttgactgtcagcgtggtctccatacaggtaatcacatctgaggtctgtttcatatggcagttaattggaaagtatggtttttattatagagtctctcacttctggaggaaaccaattacgtgtcagattgcctggccagcaataacatcagccaggctgaattccaggaactcatcgatcgcaacagctccgaagaggatgacctcgagaataccgacagaagatacaaatgcttcatccattgcctagcggagaagggaaatcttttggataccaatggctatttggatgtggataaaattgatcaaattgagcccgtgagcgatgaactgcgagagatactctacgattgcaagaaaatctacgatgaggaagaagatcattgcgaatatgcgtttaagatggtgacttgtctaactgaaagcttcgagcagagcgatgaggtcaccgaagcgggtaaaaatacaaacaaattaaacgaataatcggtctaaaactggtcaagcaacttaatcgcaattgttttatgccagcgggaaattcacaagcaactgtttagtttcatttctacaatgttcatctacagacttgtatttattgcgcctctgattttgttattgttcagcttggccaaggtgggattgatatttatatttgactaagcttttgatttattttcaacaaactacaatatataggctcgccacccctttgatatatttcattggaattggcaagactttcaggagtgtctacaagttaataatattaccataggagaatatgagaaatacgcgcgacacgaaactttggattacctgctcaacgagaaagtcgacttgaggtacaagtgcaatattaaatgtcagctggaaagggattcaacgaaatggttgaatgctcaaggcagaatggatttggatttgatgaatacgaccgataaggcatccaaatccattaccaagtgcatggagaaggctcccgaagaactttgtgcgtacagttttagactggtgatgtgtgcatttaaggctggccatcccgtaattgattcggaataaatgtcaataatttaaatatatggaaacaatcaaagtactacaatttccacacataactcacataagttttactatttcaaacgagtgatttgtagagattgtagatctagtatgtacttaacaccagtcaaataggcgtgccacgtaatttttattagagcttattcgaaacgagtaattaattttaagtgtaacaaaaagttgtcgcataaatcaaatgatcttaaattatgggtacataaaaccgagggaaaatatagacgcttagcttatgaccctaccaatgattgatttacaatctcatgaaattaaaaatactcaggcactattctgaataacaggtctatcaactcaatggcaattgtgttaaataagtggaaaattgattttaagctgttcagtctgaagttaacaatgttcaacactagacttgcc

SEQ ID NO: 31253 - DNA, 548 bp, DROSOPHILA
gagtaacagtttatcgtgaggtgctactgtgctaggaaaacccatgtccatatttatcttgaaacagattctgcgaatcgttagataatgcttaagctatggctaatatgtatcttgactgtcagcgtggtctccatacagagtctctcacttctggaggaaaccaattacgtgtcagattgcctggccagcaataacatcagccaggctgaattccaggaactcatcgatcgcaacagctccgaagaggatgacctcgagaataccgacagaagatacaaatgcttcatccattgcctagcggagaagggaaatcttttggataccaatggctatttggatgtggataaaattgatcaaattgagcccgtgagcgatgaactgcgagagatactctacgattgcaagaaaatctacgatgaggaagaagatcattgcgaatatgcgtttaagatggtgacttgtctaactgaaagcttcgagcagagcgatgaggtcaccgaagcgggtaaaaatacaaacaaattaaacgaataatcggtctaaaa

SEQ ID NO: 31254 - protein, 149 aa, DROSOPHILA
MLKLWLICILTVSVVSIQSLSLLEETNYVSDCLASNNISQAEFQELIDRNSSEEDDLENTDRRYKCFIHCLAEKGNLLDTNGYLDVDKIDQIEPVSDELREILYDCKKIYDEEEDHCEYAFKMVTCLTESFEQSDEVTEAGKNTNKLNE

SEQ ID NO: 31255 - DNA, 2459 bp, DROSOPHILA
aagccgaaattagttaacaaactttgtctaataacgcaaatgtagttagtatatgttccttgagcactggagtaaatttctagcccaaagccaacatggttaacattgcgtcctgactttgggccactgacagcaattgactgtctaagaatctgccactagaaggacctgctttgtctgcaacgcaaatgccaacgaaggatgccaagcctgtgtttaggtgagcggcaagtacttgcataacatacttgcagcccaaaagtaaaacaggactggcaacaatgccgcaggattgctgtgtggccaacgaggcgggcggatcatctgcatatatttatgtactcgcatatagtcgcttcgcacaaaggagtcgttggcccaaagaaaaccgcacacatgtggcgaggtttgtagattaaagcacttctttatcaacccgctccattcttgagaaatattgctatgcaaatatttgtattgcatattttggcgcacgcggtcaaattcgcgaattgcaggggtagatagcaaagtggtttggcattctaattttctaagcttttatatatattgtatattactttctacttagagctaatttagttgttaatagtcatattaaatcttccatatttatcataattttcacagcatgttgtgcagttcattttaaatcatatttttgctacaactaaaattaattcaaattgaaaatatatagtaaaaaaaacctattcatggttatacaaagctaaatgctctttgcccaacaaacggtctcgttttttaaaaaatattgctgtgcaaatattttgattgcttactttcaggcacgcgtcagaatttttgtttaaccgggggatgcactggcgggaaattcacagcttacagggagcaaaaaaaaataaacaagtctcagccagacgagataagctttagatggtggactacaaaagccgcgctgaagcctcagttctcggcaaatccagttactatcgccatggcgcaaaactcaaagttaacaatctatctgttcctagtcgcaatttccgtgggctccagcctgtcctacgatgtgcccaaggccaccgtcaaggtcaactcaccgaagggattcgaagtctccattccggatgagccaggcatttccctattcgcttttcacggcaaggtcaacgaggaaatggacgatctgagcgatcagacctgggccgccgatgtggtcagttcacgcaatggacgctggacttatcgcaaccggaaccatcagcttagacccggagatgttctgtactattggacaacggcgcgttaccatggagtcgactatcacaactacaaccagaggtatgtggttgggcagggggattcccagagaatcgatgtcaacggctccaacggcggtcgccagccgattgtggccaacggccataatacgttcaatatatatgtacaataaactatgcttgaataaatgtgtttattattttattacccacgccctgccacttacattctgaaaagaaaaccagagagtctgtttttttaatggtatttttatgaagacctgaactcggagcttatcttatgaatcgcaattccaacaatctgatatcagttagatcagattttgcattaaataatcttttatatgccaaatggcgccactaattattatatgattaaaaacagcctgtgctgttgtgtaataaattgatttttaaattctattaaaaatacgatgcatattaacagcagaattattttattcagcaaacaatgtattgcaatgtatagttttgtttttacacattagggctataaatcaaagaaacactttgtcacagatacgcaagcaagtatccggatcgtataaatcatactcaaaagttcccctgcccgttcatcaagcgacacccaaaaaagtatacccatatatcgaagagttgcaaccgaggataacgcaaaaaatgctacaacgaatttggccaggtatgcaactaaaaccaccacctactttaacaccccccccacgaccataagcaactgcataaaaggttgctcttggaccatttaactttccctcgaggctaacagtaagcagataaaacttttagccatctcagttccagttgagcttctagttatttcgaagttttcgattctgcgtgtgctgagaggtttttattttcaagttgaagataggtgtgatttaatcgacctgaaattgggcttctttgaagttactttaatagagtacgattggctctattaaaaatttaataactatatattaagtgtatatttaaaaaatgatgatttctgataccagtcatatattttattttccttatacccttaaccataacctcgatccgctcctgtttgccgactgttttgtgttcgttttgggctgccttgcgcttgacctggctcgctgaccgctttcagccgaagaa

SEQ ID NO: 31256 - DNA, 459 bp, DROSOPHILA
atggcgcaaaactcaaagttaacaatctatctgttcctagtcgcaatttccgtgggctccagcctgtcctacgatgtgcccaaggccaccgtcaaggtcaactcaccgaagggattcgaagtctccattccggatgagccaggcatttccctattcgcttttcacggcaaggtcaacgaggaaatggacgatctgagcgatcagacctgggccgccgatgtggtcagttcacgcaatggacgctggacttatcgcaaccggaaccatcagcttagacccggagatgttctgtactattggacaacggcgcgttaccatggagtcgactatcacaactacaaccagaggtatgtggttgggcagggggattcccagagaatcgatgtcaacggctccaacggcggtcgccagccgattgtggccaacggccataatacgttcaatatatatgtacaataa

SEQ ID NO: 31257 - protein, 152 aa, DROSOPHILA
MAQNSKLTIYLFLVAISVGSSLSYDVPKATVKVNSPKGFEVSIPDEPGISLFAFHGKVNEEMDDLSDQTWAADVVSSRNGRWTYRNRNHQLRPGDVLYYWTTARYHGVDYHNYNQRYVVGQGDSQRIDVNGSNGGRQPIVANGHNTFNIYVQ

SEQ ID NO: 31258 - DNA, 3492 bp, DROSOPHILA
ttaccgagcttgcggcggtgtttatgaacacttcttggtatttaaatgacggaatttcccaacgaatcttcgtaaataagaccaaggtctcttattctttatatttgtgttttccaagctaacttaataaattcttaattaatggccttgatcttttgtcagccacaaattgtctaattgcattgctgtatacatttgcttgtttatgaaaaatgcttttaattgaattagggtgggtcgaacgaaatttctgcttattttgtatttctaaatcgagatttgaaattaaatttccatcgatgttaaatcttaaatttctatatcaggttgacagttatatatttaataaactgctacaaatttgttaagtgagaatgctatagtcgacttgggcaaatcgatagaaatttacaagacaaataaaaatatataaaaagttttagttttgggcggcttgtcggcgtaagagggatcgttcagaatgtgtaaggttgatctagagcttgatttgcaacccatagtcagtacaaaccaagtatcttatctgtgtccttgttgtccatttcgaagattgattcgctgccatttcccattttcaaattcaatgtcaattctgttaatatgagcggaatgaacgcagtggatggatatgtggggtgaactttttatcttaatgactttatttataggctgaaacttaaaagcgaaaacaatggtattcaagttatgtgaagcaaaaatatcgaactgcgcgcgagcagctagagatgtgttttttttttatcgatccggtatttgattgataaataatcgattgtaagtggacacgtgcccaaacacgttgcgtttgacaactgcttttctatccaattaattgcgataaatagacgaaacgaattcggaccgaaagataggtctaaatttatagtgtctattcctgcgctttctaatgtcaaccacttgagatattcggaataagatcactcgtcaagatacgaaaatgagctttttgttgaccgaaccgcagtggtccgcctggtactccgccttttacgcgtcttcgatgaatcgtctggcccagaatgtgtgcaccgctcaagatcccatcactgtatgcctgcgatccgaggcggacttatgctccgttccgtcaggtgtgaaaacctggatagagttgagcaggcagggcaaggccactaccggtggtccgggatggatatgcacgggcctggacctgctgtgccaggagatggacagaaagttgccgcttccactggactttgaactctccgccgcacatttgtttttctggcacaagttggagcgatgcaactacttcctgtggacggtcgccgatcttctaatgcgttgcgaaccgctggatgggcgctgctttcggaatttaattaagaacccagtgccagatggaggcaactggcaaatgttcgttaatctggtcaaaaaatacggagttatgcccaagaaatgctacctccactccactcagcgaactacaaaaatgaacctcatactgaagagtaaggttggtattttgtattgtactgaatattatatacatatgtatatatttccttcacctaaagctacgtgaatatgccagcatgctgcatgctcagttcacctttaatgggaatggctgccgtctccccgatctcattcaagaaatgattccgcatctcttcaaagtaatatgcatctgccttggtgaacctcccaaggttttcacctggtccttctacgaccacaaaaagcgttaccagtgcctgaatgatatgacagcggtccatttctacgaagttatggtaggctgtacggtgaatctagacgcctttgtctgtctgggtcacgatccgcgaatctcatccagctaccatagcaactatcaggttgccaacagctcgaatatgatgggcggaaaacctcataggtataataaccaatcaatggacatcataatgcagatcatggtgacttctctggaaggtgataaacccgtttggatggcctgcgatattcgtagagcaatcagtttgaagtccggtccattaagcctgagatcgcatcaatttgatttgctatttggctttaaagtgggcgagtcgctcaccaaagcagagagacttgactacagagcatcccgacgggatgcagccctgctccttacatccgttggattggacaccttgaaacagcccgtacagtttcgcttcataaatgcttctacaattggcgagtctcccgccaccggaggtcttaatgaacacgatgtggacgaaaaggttacgaaggcattaagaaagaagtcggtcaaaccaccggataacaaattggacgccgaatggttaagggagtacgcttttgagattgtagtccacgaaaaatttgtcccatcgggtgttttacatgccgcaaggatacataaatggaaagaactgcctgcttgggatcccatgggcgcattacttaattaaaaaattgtttagaaccaaaaaaaaaatctttcataagaaatacatttactacattttatttgccttcttgaatagataaaaactaaatccattcattcaattcaagaagaaagttcaacaacaatgacaaatttcaagtatttttccgaactgtgggcgtggcaacgtgaaataaacttgcgctgcttaatttcaactttctagcttttatagtacctaagatctatcgatcgtgatcatgaatacttgatatggtcgaaaacgctttcttcttcccttttacccttttactctacgtgtaactacgagtataaaaacagtcagcacgattgagttttgttgtttgttgaaaatagttttagtaagtagtgaacaattgactacactctcgtttaaagtgtcccatttttgagtttcctgcgaactcttgtgccagccgccaatcgcttgcataaaattatttaaatatcccgcaacgttgtgtcctttgtggcagttgttgtcatcgtcaccgaggcgcgaccttcactaagtttttcgggaatcgctcctacgtgcccggcatgactaattaggcattagggagttctcgacaagagttgttggcgcggccagcaaaacggcgactgttttcaacttaagggatttgctactctaaggaatttgccatcgcacaaaataaagaacaacaaaattaatctttgacttaaaggccaggcgtctttattttattaaattcggttacaaatagctgcttaaaatacggtctaccagtagcgtcggccctggttgtagtacggatagggctgtgcgtatccggggtactgtcttggagccacctgctccacaatcactggctgcaccaccacggtcttgggctggaacaatttgctcaggagatggcgtggaccgcgtatgctgttagagacttggtctgccgacgtcgggggatctgctgctgcggccagtggagcaacatgctgcatatcagctggcacaa

SEQ ID NO: 31259 - DNA, 1431 bp, DROSOPHILA
atgagctttttgttgaccgaaccgcagtggtccgcctggtactccgccttttacgcgtcttcgatgaatcgtctggcccagaatgtgtgcaccgctcaagatcccatcactgtatgcctgcgatccgaggcggacttatgctccgttccgtcaggtgtgaaaacctggatagagttgagcaggcagggcaaggccactaccggtggtccgggatggatatgcacgggcctggacctgctgtgccaggagatggacagaaagttgccgcttccactggactttgaactctccgccgcacatttgtttttctggcacaagttggagcgatgcaactacttcctgtggacggtcgccgatcttctaatgcgttgcgaaccgctggatgggcgctgctttcggaatttaattaagaacccagtgccagatggaggcaactggcaaatgttcgttaatctggtcaaaaaatacggagttatgcccaagaaatgctacctccactccactcagcgaactacaaaaatgaacctcatactgaagagtaagctacgtgaatatgccagcatgctgcatgctcagttcacctttaatgggaatggctgccgtctccccgatctcattcaagaaatgattccgcatctcttcaaagtaatatgcatctgccttggtgaacctcccaaggttttcacctggtccttctacgaccacaaaaagcgttaccagtgcctgaatgatatgacagcggtccatttctacgaagttatggtaggctgtacggtgaatctagacgcctttgtctgtctgggtcacgatccgcgaatctcatccagctaccatagcaactatcaggttgccaacagctcgaatatgatgggcggaaaacctcataggtataataaccaatcaatggacatcataatgcagatcatggtgacttctctggaaggtgataaacccgtttggatggcctgcgatattcgtagagcaatcagtttgaagtccggtccattaagcctgagatcgcatcaatttgatttgctatttggctttaaagtgggcgagtcgctcaccaaagcagagagacttgactacagagcatcccgacgggatgcagccctgctccttacatccgttggattggacaccttgaaacagcccgtacagtttcgcttcataaatgcttctacaattggcgagtctcccgccaccggaggtcttaatgaacacgatgtggacgaaaaggttacgaaggcattaagaaagaagtcggtcaaaccaccggataacaaattggacgccgaatggttaagggagtacgcttttgagattgtagtccacgaaaaatttgtcccatcgggtgttttacatgccgcaaggatacataaatggaaagaactgcctgcttgggatcccatgggcgcattacttaattaa

SEQ ID NO: 31260 - protein, 476 aa, DROSOPHILA
MSFLLTEPQWSAWYSAFYASSMNRLAQNVCTAQDPITVCLRSEADLCSVPSGVKTWIELSRQGKATTGGPGWICTGLDLLCQEMDRKLPLPLDFELSAAHLFFWHKLERCNYFLWTVADLLMRCEPLDGRCFRNLIKNPVPDGGNWQMFVNLVKKYGVMPKKCYLHSTQRTTKMNLILKSKLREYASMLHAQFTFNGNGCRLPDLIQEMIPHLFKVICICLGEPPKVFTWSFYDHKKRYQCLNDMTAVHFYEVMVGCTVNLDAFVCLGHDPRISSSYHSNYQVANSSNMMGGKPHRYNNQSMDIIMQIMVTSLEGDKPVWMACDIRRAISLKSGPLSLRSHQFDLLFGFKVGESLTKAERLDYRASRRDAALLLTSVGLDTLKQPVQFRFINASTIGESPATGGLNEHDVDEKVTKALRKKSVKPPDNKLDAEWLREYAFEIVVHEKFVPSGVLHAARIHKWKELPAWDPMGALLN

SEQ ID NO: 31261 - DNA, 4739 bp, DROSOPHILA
gaagacgttatcatggggcatccgcgcatccaggaatgggcaccctgtagcccagtagatgttgtggatttggctgctggccaattggaaactagtgtcagccaggccgccggctaatttctcagatcctcccctccattcggatcctgagtgccccttttccattttccattctgtctgaattatgtgttcataatttcgaattaatgaaatttttacagggggcttgggattgggattcaaagaaatagaaagttataatatgaaatatctgtaaggaaggtgttctaaaaactcaacaattaagttatgattcaaaaaatgttgtgcttcaaaattactgtttctcagatttaaattgaatatattatacacattaaaaatgtttctcaagctagtagaacccaattatgcattgcgttacaatcacttagactaatggccttgtattactttgttaagagatttaaaaaattccaaaaaatcgacaaagaaaccatttgtacatttgaatacaattttttgaatgctgcattgtttaaagaattctgaattaacccaaaagaggacacgtgcctgcacaccaaagcactgaaaacaaatccagtcaaagaaattgctcgccgttcattaatcaaatggatgaaatatgttggcaaacgtattaaatatatttagcaaagccatcgaaatattaaatagcgctacttgtagacaattagccaaaaattatgacttttaatcacgggcaaggcgacaaaaacaatttcgaaaacccagaagacggcgttgaacgcgagccacgcccctcatcccaaacatttcacacatgttttaaaaataaccgaacttgtgtgctgtcttcagtgaaaatcgaatagtatgtttctgttcctttctgtcgttctatttgcgcatatggtgtgagcggtgcggagatatatgattttaggctccgccccgccaggcgatcatcttgaaaaatcggccagtgagcaggatgctccgcatattcaaattagttttccgtaagatctccacgcgcgctgttgtctccggaatatcttcaaaatatatatcgctcgcaatcggcggaaacatgaattcgcaatcggcagtgcgtcgctatccacacagtttttccatcgaacaaattctggccaagccggaaatgcgcagctccacttcctttgaggactccgtgcaggatgaaagcggtcgcggtggcaattgtctcggtgcttcacgggcttccagtccggcaacatcgagttgcttggatgacaacatggacgacggcaaaagtgatatcgatttggcctcagatgatggaaacggtgcgtatgatcgatatgccggaatataagctttacaacgacgagaattttggtgtctggaattggatttgggatctaaaaacttaacttaaagctcaattggatccttattaaatagcaaatatacaaaatatagatttatactgaacttcatcaggataaatagcaccaacagccaaatagtcagtgctttagtgcttttaagtgtagtattatcaaggttcaaggaattatcaaggatctttcaaataatacagttacaatatacaaattttaaattctgaaaaaaaatgtctctaaaagatgatttacctcctaatggaatcacccataacgagctcagcacagccgttcattattgtatgtaaatatgcaatgagtttcccacctgaacgaatgagtgagtgcctatggctgaatgatctcatctgtcatccgtgcgatcaagaaacaaatgatcagaaattagcttctgggtgacagggaataagccatccattccatatccacattttcgtcgacaccaacgcagtcgactaatgatgcaaatgtcacaagcgaacaaagatcgctggcgatctcaaaggagatattcttccacccgttaagaaggaatttatatggctatttgttttcggtcggccaagagaatgtatgccaaaatggccaattagacgccttggctaagtgaaatgcaacagtgtgatttgcaatttgccaggggttttgcggtgcgacggggcattttacatacacatacaactgtgccaacaacggatcgacaaattaccattaggcgaaaatagttggcaccgcgcgccggattgcccgctgtcggtagcaataaatgtctaattgggatttcgatttcccactttgattccattgcaggccttggtgatgaccgcaaaaagcgaccgcgtaccgccttctcggcagctcaaatcaaagcactggaaacggagttcgaaaggggaaagtatctttcggtggcgaagcgaactgcactggccaagcagctgcagctcacagaaacgcaggttagttgtggaatctatcaaaaaatttaattactacccaaaaaagtttgccattctatctaaaagcgattaataacatgaaatgaaatcccttgtatctatgagatacaattggcattcctcgtaaataattcattcattcatttcacttttcagatcaagatctggttccaaaaccgccgcaccaagtggaagcgcaagtacacctcggacgtggaaacgctggcctcgcactattacgcccagctgggtatcgggggattggccaggccgatggtggttggtgatcgcctttggctctttagccaaacgccaacgggtcccacgcccattcagtccattatgctaaatggcagtggctccgctgcacccatggcctcagcaacgacggccaccggctcacccatgcgtccgtacgcgactagcggcggaatgccaccgttgccgggtcccagtgtgatggagagtgcccgtaatgccatactggcacgtggacaacccttgaacttcgccctgccctttggcgtggctaagccgccggcgggtggtgtgcctgcggccagctacatccctcgctgcaagccgtatgcgaccagctatgtggactacgcggcgtcactgccaacgaacgagagctatctgcaaatgaagtacgcgacgctgccgccggaagcggaaagcggcgcctccaatggcctcgccgaactggaacgcgtctttggggatgccaatgccaactttctgcaacaacgcagcacgccagtcgctggaacagccacagcctacggccacgatggattaaatcaggcgcagcggagccgcagacccacacaatcggagtccgagtgcagcgacattgactgcgagcatctggacgaggatgaggagccacctgctgcggagtgaaaaggcgattggttgtctttagaatttatgttccgtacgtctctcatacacacaaaaatatgctcatacaaagtgtagtcatagggggtagtagagtaggtgtcctgtctgggttgattccattacaactagctgagagtggcacactttcagatctggccgggattactggcgtacccctggtggctcagcactggtctagtttacgttgtggttctagtactagtactagcgctagttattgctattctatgttacattgtgtgggtcgggtactgtttactgactggctctcaacaattaataaatgtaaattaaataatcaaaaatcacaaatattacacgtccgttgccgttagaactctagttggatcaacttaaatgctacaaattacacgctgcatactataacttaaccattgctataactatttgcaatttaacacgataaattgagagagatagacagatagagagagctgtaacaaaagcgaacgacactgacttatttacaattcattgcgttgcttgtgtggctggtgtgctagaatggaacacttttggctcttgccacacacagttcggttcggttgactactatacatagtggagactcatttgatttgattttgttacgccaacagtaggtccgtaggctagggatctggagcagacgaattgcgttttctatcagaaatcagggctagtactccaagtactcctgcctacgcgatggctgcgaacagcgtctactgttcgaggagattccatagttacaacttagctaattggtcaaataaaaattaaaactcatagggctatttttggtattgcaagcacgcggagctagctgcgtggtaatggaagtggagctggcggtactctgtccttagcgtcgttagctccaagagagctcgtagcccttccagttggcgttgggtgccagatgcacgcgccgtttgttgtagtagaaggagacgatgccatggtaggcagtccgcggaacaccgctctacaaagattaagaataatcatagtttcaagcacatagattgattgatctaccttgaaatcatccataagacccagcatcttagttgtccgcttgtactgctccctagtagtgtattgaatgcgaactggaccttcgattctgcaacaccataattggaattatgtagatactttctatatatcatatatcaactcacctaatcaggtttcgccgcagctcatcgtacgtaacaatgggatacgtataaacgcgccgcagaaacgtgttatcgtaattgtcctgaacatgaaatagttgttagtgtaatgaggcaacaatgcacgggtgtgtacctaccttcagcaggtagctcatattgatttttgtaaactgcacaaagtcctcgctcagtttaatgtgcttcagatacttatcgaagaacaaaccgctgttaaacaacaa

SEQ ID NO: 31262 - DNA, 1692 bp, DROSOPHILA
atgctccgcatattcaaattagttttccgtaagatctccacgcgcgctgttgtctccggaatatcttcaaaatatatatcgctcgcaatcggcggaaacatgaattcgcaatcggcagtgcgtcgctatccacacagtttttccatcgaacaaattctggccaagccggaaatgcgcagctccacttcctttgaggactccgtgcaggatgaaagcggtcgcggtggcaattgtctcggtgcttcacgggcttccagtccggcaacatcgagttgcttggatgacaacatggacgacggcaaaagtgatatcgatttggcctcagatgatggaaacggccttggtgatgaccgcaaaaagcgaccgcgtaccgccttctcggcagctcaaatcaaagcactggaaacggagttcgaaaggggaaagtatctttcggtggcgaagcgaactgcactggccaagcagctgcagctcacagaaacgcagatcaagatctggttccaaaaccgccgcaccaagtggaagcgcaagtacacctcggacgtggaaacgctggcctcgcactattacgcccagctgggtatcgggggattggccaggccgatggtggttggtgatcgcctttggctctttagccaaacgccaacgggtcccacgcccattcagtccattatgctaaatggcagtggctccgctgcacccatggcctcagcaacgacggccaccggctcacccatgcgtccgtacgcgactagcggcggaatgccaccgttgccgggtcccagtgtgatggagagtgcccgtaatgccatactggcacgtggacaacccttgaacttcgccctgccctttggcgtggctaagccgccggcgggtggtgtgcctgcggccagctacatccctcgctgcaagccgtatgcgaccagctatgtggactacgcggcgtcactgccaacgaacgagagctatctgcaaatgaagtacgcgacgctgccgccggaagcggaaagcggcgcctccaatggcctcgccgaactggaacgcgtctttggggatgccaatgccaactttctgcaacaacgcagcacgccagtcgctggaacagccacagcctacggccacgatggattaaatcaggcgcagcggagccgcagacccacacaatcggagtccgagtgcagcgacattgactgcgagcatctggacgaggatgaggagccacctgctgcggagtgaaaaggcgattggttgtctttagaatttatgttccgtacgtctctcatacacacaaaaatatgctcatacaaagtgtagtcatagggggtagtagagtaggtgtcctgtctgggttgattccattacaactagctgagagtggcacactttcagatctggccgggattactggcgtacccctggtggctcagcactggtctagtttacgttgtggttctagtactagtactagcgctagttattgctattctatgttacattgtgtgggtcgggtactgtttactgactggctctcaacaattaataaatgtaaattaaataatcaaaaatcacaaatattacacgtccgttgccgttagaactctagttggatcaacttaaatgctacaaattacacgctgcatactataacttaaccattgctataactatttgcaatttaacacgataaattga

SEQ ID NO: 31263 - protein, 411 aa, DROSOPHILA
MLRIFKLVFRKISTRAVVSGISSKYISLAIGGNMNSQSAVRRYPHSFSIEQILAKPEMRSSTSFEDSVQDESGRGGNCLGASRASSPATSSCLDDNMDDGKSDIDLASDDGNGLGDDRKKRPRTAFSAAQIKALETEFERGKYLSVAKRTALAKQLQLTETQIKIWFQNRRTKWKRKYTSDVETLASHYYAQLGIGGLARPMVVGDRLWLFSQTPTGPTPIQSIMLNGSGSAAPMASATTATGSPMRPYATSGGMPPLPGPSVMESARNAILARGQPLNFALPFGVAKPPAGGVPAASYIPRCKPYATSYVDYAASLPTNESYLQMKYATLPPEAESGASNGLAELERVFGDANANFLQQRSTPVAGTATAYGHDGLNQAQRSRRPTQSESECSDIDCEHLDEDEEPPAAE

SEQ ID NO: 31264 - DNA, 2373 bp, DROSOPHILA
cattgcatttaaaggaccctcgttcaatatctgagttgtttcaacttttcccgcgattcccgcgagaatgcctgtacttaattccgaccacgtcaatttcccttcatcaactcctttgacgcctgttgcacgaacgggccgttaaaggatgcaactgcgtcgaagttttgaataaattttcgccatttgccggcggcaacagcgggaacaacaaggcaactcgactgtgctcctcgcaacgccgcaaggacgctgatgcggatgcggatgaggatgcggacggggacgaggagatcgtggcatcatcaattttggtttgcgagactcatcaataaaacataacagcagcaaatggagacacatgcgacaatgcacatgcgagagtccaagggatatggatactgatgcgtcaaggacctggctcttgattccctcagcagcggctgccagtgttcagataaaagcttcgtccattgatttggtcaacaagttttgccatcctgctaaaacaaaaaaaaagagcagttgcagtttttagttttgcgtgaatataatttgaaaagaacatagccgaacaggtgagtatttctttaaggaagccagattcctgtccttagctgcctggaaaccatttaacaccttagtcactatctggcagatatgaatctacaaacaccccaattcagcatgctgacaaaataatactcctacaatcaatggaatgaaatgtgtacttctaaaatccggcaatccggaagcaatttaaattaaattaaagagtctttaaattgaatacatataagccgattcctgaaacgattcaaaagtgcaacatacgtattcaaagaaaaacctggcaaggaaaaggatgatctccttcacaacggcaggtcaaaccaacaatcttgtctctgttccagagactttggcctccgccaagaaaactttctcgactttaagaagcggaattgaacctttatttccactcgagttttagccctcagtccatgatgatgttgactatgggtatgtgcatcagcttaacgacgaatccaatcaagcccatgataaggaatcctacgccaatgccaatgctgatacgctggaactcccgacgatctggttttgtgcagcgcttgtagaaccgcaacgagttcttatagaaatccttggacggaaccattaagatcagcagatccttaatctggcatttaatgcgttccacagacttgcacttcaaatcgggtaagaatttgcggacactcctggaaatttaatagatgatttcgaagatgcgatagtatttgaaaacatacctacctcttggcacatttggccctgtatctgcggcgacgagaaagtagttgctccatcttttgattcgttcgaatatctgagtatatcagtcgcttgttttgcgcaaaacaaatttctgtccgagcgttcgaactaattctaacggccttttgagatcgacatgaaatttcggtcctaataattggcagctgttgtgccgaacatagccggcagcattgttagcacatgcaaagtgtagcaacttaaaatggaaaatactggccggtttacacacataatcaaactttacgcaaattgtttgccagctctggacacacaagtacgaacattttcgactagttttcctactcccgctgaacagagagattgttgagaagtgagctgggtgggtaggtggatgggaacttaaatgctgcaatttgtttcactgccgaatcgttgctgtcttcacttgaagcttaactaaatgcagagggagccagtctgaaagttctccagctccaactctaagccaaaaattgccccctctttctggctacccgtcctacttccttttgcatctatctctatccatctcggtgcgtggaggataggtggtgttgttgctacgatttgacagccttggcttcagagatccccaggacaattcactgcaaaattggtagacaaaactgtgccacaacgggctccggtcgggctcctctttggctctaccaagtatataattacactgccagaaaatagcaattaaatgattaagtgtaatataatgaattcaattgtgtgctagtttaagcaaacaaggtgaaatgaaacttatatatttatttataaatacaatatatgtcgagttatatgaaatcatttaacatatgtttcaaaaataaattcaaataaatgtcttcatcgacattagtgagccattacatttctctgtgtaagcatacggatgtgaatgtggcatcgccatcgcttgtgcgcctgtgtttgtggatatttatgatggtgtgcgtgcttgccgtttcaggcattgccattgagattgaaaaatgttaa

SEQ ID NO: 31265 - DNA, 318 bp, DROSOPHILA
atggagcaactactttctcgtcgccgcagatacagggccaaatgtgccaagaggagtgtccgcaaattcttacccgatttgaagtgcaagtctgtggaacgcattaaatgccagattaaggatctgctgatcttaatggttccgtccaaggatttctataagaactcgttgcggttctacaagcgctgcacaaaaccagatcgtcgggagttccagcgtatcagcattggcattggcgtaggattccttatcatgggcttgattggattcgtcgttaagctgatgcacatacccatagtcaacatcatcatggactga

SEQ ID NO: 31266 - protein, 105 aa, DROSOPHILA
MEQLLSRRRRYRAKCAKRSVRKFLPDLKCKSVERIKCQIKDLLILMVPSKDFYKNSLRFYKRCTKPDRREFQRISIGIGVGFLIMGLIGFVVKLMHIPIVNIIMD

SEQ ID NO: 31267 - DNA, 2318 bp, DROSOPHILA
ccgccaccggaggtcttaatgaacacgatgtggacgaaaaggttacgaaggcattaagaaagaagtcggtcaaaccaccggataacaaattggacgccgaatggttaagggagtacgcttttgagattgtagtccacgaaaaatttgtcccatcgggtgttttacatgccgcaaggatacataaatggaaagaactgcctgcttgggatcccatgggcgcattacttaattaaaaaattgtttagaaccaaaaaaaaaatctttcataagaaatacatttactacattttatttgccttcttgaatagataaaaactaaatccattcattcaattcaagaagaaagttcaacaacaatgacaaatttcaagtatttttccgaactgtgggcgtggcaacgtgaaataaacttgcgctgcttaatttcaactttctagcttttatagtacctaagatctatcgatcgtgatcatgaatacttgatatggtcgaaaacgctttcttcttcccttttacccttttactctacgtgtaactacgagtataaaaacagtcagcacgattgagttttgttgtttgttgaaaatagttttagtaagtagtgaacaattgactacactctcgtttaaagtgtcccatttttgagtttcctgcgaactcttgtgccagccgccaatcgcttgcataaaattatttaaatatcccgcaacgttgtgtcctttgtggcagttgttgtcatcgtcaccgaggcgcgaccttcactaagtttttcgggaatcgctcctacgtgcccggcatgactaattaggcattagggagttctcgacaagagttgttggcgcggccagcaaaacggcgactgttttcaacttaagggatttgctactctaaggaatttgccatcgcacaaaataaagaacaacaaaattaatctttgacttaaaggccaggcgtctttattttattaaattcggttacaaatagctgcttaaaatacggtctaccagtagcgtcggccctggttgtagtacggatagggctgtgcgtatccggggtactgtcttggagccacctgctccacaatcactggctgcaccaccacggtcttgggctggaacaatttgctcaggagatggcgtggaccgcgtatgctgttagagacttggtctgccgacgtcgggggatctgctgctgcggccagtggagcaacatgctgcatatcagctggcacaagaacatttttatcgtcgttatcaggaaatgccaaaaccatcgcaatggtgaggctgctcagcagaagaatggccacgaacttcatctcgaaaggtgtgtgtgcgtgttgtatgatctgttggcaaatgtaaactgatttccgaagagcacagactcaccttaaataggagcaatagatggtgcaggtagaacaggttttcttctctacctgtcacaggattatggcccattatcccgagagcagctgcacaaggtgattagcccgttgaatttcccagaaaattaccctctatggtttatggttaatggcttaaggaaattcgggtgtggtcatttttggaatgcttcaaactacttttattagcttcgatgtggttcccaaatacatgcacaaacgcccaactttatgctttacattactttagagaaggaactggggtggtggtggaaggccgtccggcggtggtggcattccaggtggagcctgacgacgttgctgaggatggaggaatagtaatgggttaaggatcactccacttattttgaacagcggactgtgcttactctgaactgcggcggtggtggaggatcatcattggccacgagcttgtcctccaatgtatcacgacgggactggaaatatttcgcaaattatgtattaatatatatatcaatattaatttgccaattaaaaataaagtaacagaaaggcccttcgatatacggccgcaacacaattgcttatataaatgttctagttttctacattttactaagttcttactcggaatttcggaggtggaggcggttcgttgccgtgaagaagggcggttttcattgcggggacatggcgccttgcctagaagtaggcatttaacataattttgcattaggagtgctaaattgtgaatgcgccgccagtgcactgcctcctgggcatctagttgcttcatctgttctggcgcctttagtttcgtttgtagggccaatagtcttagcaatcactggccttcagtttgacccattctttgtgtactcacccgcctgaacaaaccgacgaactttggttcctgcaaggagagacg

SEQ ID NO: 31268 - DNA, 318 bp, DROSOPHILA
atgaagttcgtggccattcttctgctgagcagcctcaccattgcgatggttttggcatttcctgataacgacgataaaaatgttcttgtgccagctgatatgcagcatgttgctccactggccgcagcagcagatcccccgacgtcggcagaccaagtctctaacagcatacgcggtccacgccatctcctgagcaaattgttccagcccaagaccgtggtggtgcagccagtgattgtggagcaggtggctccaagacagtaccccggatacgcacagccctatccgtactacaaccagggccgacgctactggtag

SEQ ID NO: 31269 - protein, 105 aa, DROSOPHILA
MKFVAILLLSSLTIAMVLAFPDNDDKNVLVPADMQHVAPLAAAADPPTSADQVSNSIRGPRHLLSKLFQPKTVVVQPVIVEQVAPRQYPGYAQPYPYYNQGRRYW

SEQ ID NO: 31270 - DNA, 2800 bp, DROSOPHILA
gaactcttgtgccagccgccaatcgcttgcataaaattatttaaatatcccgcaacgttgtgtcctttgtggcagttgttgtcatcgtcaccgaggcgcgaccttcactaagtttttcgggaatcgctcctacgtgcccggcatgactaattaggcattagggagttctcgacaagagttgttggcgcggccagcaaaacggcgactgttttcaacttaagggatttgctactctaaggaatttgccatcgcacaaaataaagaacaacaaaattaatctttgacttaaaggccaggcgtctttattttattaaattcggttacaaatagctgcttaaaatacggtctaccagtagcgtcggccctggttgtagtacggatagggctgtgcgtatccggggtactgtcttggagccacctgctccacaatcactggctgcaccaccacggtcttgggctggaacaatttgctcaggagatggcgtggaccgcgtatgctgttagagacttggtctgccgacgtcgggggatctgctgctgcggccagtggagcaacatgctgcatatcagctggcacaagaacatttttatcgtcgttatcaggaaatgccaaaaccatcgcaatggtgaggctgctcagcagaagaatggccacgaacttcatctcgaaaggtgtgtgtgcgtgttgtatgatctgttggcaaatgtaaactgatttccgaagagcacagactcaccttaaataggagcaatagatggtgcaggtagaacaggttttcttctctacctgtcacaggattatggcccattatcccgagagcagctgcacaaggtgattagcccgttgaatttcccagaaaattaccctctatggtttatggttaatggcttaaggaaattcgggtgtggtcatttttggaatgcttcaaactacttttattagcttcgatgtggttcccaaatacatgcacaaacgcccaactttatgctttacattactttagagaaggaactggggtggtggtggaaggccgtccggcggtggtggcattccaggtggagcctgacgacgttgctgaggatggaggaatagtaatgggttaaggatcactccacttattttgaacagcggactgtgcttactctgaactgcggcggtggtggaggatcatcattggccacgagcttgtcctccaatgtatcacgacgggactggaaatatttcgcaaattatgtattaatatatatatcaatattaatttgccaattaaaaataaagtaacagaaaggcccttcgatatacggccgcaacacaattgcttatataaatgttctagttttctacattttactaagttcttactcggaatttcggaggtggaggcggttcgttgccgtgaagaagggcggttttcattgcggggacatggcgccttgcctagaagtaggcatttaacataattttgcattaggagtgctaaattgtgaatgcgccgccagtgcactgcctcctgggcatctagttgcttcatctgttctggcgcctttagtttcgtttgtagggccaatagtcttagcaatcactggccttcagtttgacccattctttgtgtactcacccgcctgaacaaaccgacgaactttggttcctgcaaggagagacgattaagcccgttgataggtcactaaaccaccgaatcctacctccactccatttgtggtgcccccaccacgtccatcgactccgaagagggtcagagccacaacgtaaataaccaaaacaacgcagagtagcttcatttccgagctgtcacgttcttacggctcactaaaatggttgaaaatgacccgtacaattcgtttggcttttgctgtacgtttgctccaagttcgacttctttatataccccataaatccactgggtgcagcatttaattgccttgttaaaaacgctatccagaatcttgtaaagttgtggccgatacatggcaggcgatagacaaaaacacgttaatagcgtattaaataattattggccaagatgcatcttgtagatacatcgcgaaacagacaaagttgccgcttgagttgaaaacttcaaatgatagcatgatcaaataattctattcgactgagagaagtcagagagcaaatataaaatatattgcaaaataaaatgtaataatataacttattaattttaaattcaaaattgagcaatggttttaagtgtcttcaattgaagtatctttcaattaattgaaatcaatgtttttgtggtggatttgtcatctgaaactgttgcatgtttttcacagtgcagcctttaaattccaagtagtcaaggtgttacagcgaattcggtttacagctgcaatctccgtgttccggtattgttgccgttacaacgttatgcaacaatctgctgccgcttccgcttggccacgcccccatattttcgcccacgcgaaggcgacaaatgatgccgcgtctcgcgctatttttcattatttccgcttgtaaacgccacaatgcgtccacgtttgctaagctttgcataattcggaattataacgcgctttgatgtcgccgctgggatctcgctgtccttgtcccactccgcctccctctcgctcgctccttcgtcaagtcaaacagaagtgcaggcgaaaacgcaaaaaactgtcaacagggggtggtggggaagcgagggggttgggtcgaaaagaaagtataaaaataaataagcgcacttttttctcatttccgttgcttactttgacgtgtttagtttttgat

SEQ ID NO: 31271 - DNA, 345 bp, DROSOPHILA
atgaagctactctgcgttgttttggttatttacgttgtggctctgaccctcttcggagtcgatggacgtggtgggggcaccacaaatggagtggaggaaccaaagttcgtcggtttgttcaggcgggcaaggcgccatgtccccgcaatgaaaaccgcccttcttcacggcaacgaaccgcctccacctccgaaattccgatcccgtcgtgatacattggaggacaagctcgtggccaatgatgatcctccaccaccgccgcagttcagacaacgtcgtcaggctccacctggaatgccaccaccgccggacggccttccaccaccaccccagttccttctctaa

SEQ ID NO: 31272 - protein, 114 aa, DROSOPHILA
MKLLCVVLVIYVVALTLFGVDGRGGGTTNGVEEPKFVGLFRRARRHVPAMKTALLHGNEPPPPPKFRSRRDTLEDKLVANDDPPPPPQFRQRRQAPPGMPPPPDGLPPPPQFLL

SEQ ID NO: 31273 - DNA, 2872 bp, DROSOPHILA
ctgtgtctggtaacgcacacatcacgtagcgaagttgccgcaactaaaacttcatcaatttgccttgtgaatccttcgaaactttccgccgacccccccccccctcgtctgccgtgcgtgagtgcaagtatgtgtttgggtggcaagtacgtatggatgtacttacagctgccgttgaaatactagtggtgcacttcaaattaaattcaaggtagcattaattatgaatctagaataacatattctgtgtggcaagtcttaggatgaggtaatgttataaacgttatagttcttcagaatctatcgttgcttagatggcacatcttatttttgaccaaacataccatttatttagttaagtttgttttatatgtcattctgattatacctattattttgaccaccatcgtattgaaggacgtaaattgcggacagtgcataaagcaaattatatcggttggtttgagagcgagcttcattttacgcaattttcagaccatcgcattgctgtgtgccctggcgttccatttgcccattaaggcctcgcattttatttatgattaattacagcgtttaaaagtgcataaatttgcatgggataaaagtgtttttactaacgaaaataattaaatacgtcacaggcacaatgaaaagcgcagagtggataaaatatgaattaacattcctttgatttaaatatcaattgacttgattacatcttacttggtcgttttaaaaaagtgcacactaaagcgataaatgttatcttgaagttgatgataactagactaatgaacagaaatattaaatatgttttgataacactttaatttggtgaattattattattatttgtgaacgcattgttctttgtgtagcaagcaaaaagattagctgtgagccaaaagagcggattagcatggaaagtacgctccataaacaatggttcaagacgagctttaagctcggctacgatcccataattgcttgaaagatgaccctatttatgtggattgtcgtaactggtgaccacatgagcaccttcatcctgtctatagcccagcccgttgtaaatgacgtaggtccaaaagtacagggtatctccatggttgagctttgtcttgtgatctcggaatgtccaacgtccccgcttggctttcggaatatccctggaccattgtcccgcctccaggccgtcgaactcctcgtttagcttgccatggaaggcaaacagtgaaataccctccgcatccggaatggagacctcgaatccccggggatagaacacgcgcacctgagcctcaggtgcctcgtaggcgtggccaaaggcaatcgccaacaccaggagcagcaggcacagcggaagtgtaggcatcacgaatcgaaatggaacgtgttgcggtatcggacctccgaacagaactaaactcgatgagcggacctgccttcaaacgcttatcaaatgattgaaagctcgcagcagtcgtaaaattataaatataaatcacccatataaatatttgctcagtatacatattaatcatttttttttttttatacaatgaaatacttttcattttattgaatctactttgcattactaattgaaacatacttctcggccgcaagcttcacatccttgaagcagttgaagattccatatgatagctcgcacagatccctttcgtcgctgaattctatgcgacatgttaccaactctattgccacccattgccagtccaccactccggatttcatgtacttatcgatctgcacattaccccgttcatcaatcagacccaaatccaagaggacgcatgttagaaagcatttgtaagcccgatcgatgggcggaactggccaattctccatcacttggtgggcttcatattcggataactcattttgcgaaacacacggattaaatactgaagtgttagcctttacaacgagatagatacatgcatgttatatgagaactttataaatatataaataaagcttacgagaacatttgcgcacagaaaatttagcaacaaacacagtgtaagttggtccaacatacttgctatattcctagggaatccatcgtatcatgtacttataacaaacccaatacgagcaattaaatttcaatataatggataatcacatttttaattgcacacacattcaacgatttaaattacctctttttaatttgataactgacttattaattaataatataaacaattgaatatacgtggagatgcgggtggcaatcgcatgtatagttattttatggattcttttctttgttatatacccgatactagaatatcgtaccctaatattagttattaatatgcatccaaaataaaaaaaaacaatcttattctttacaacggcttttatgactttgttaatatttcttgccttaaacaattgaatatagcaaaaattcggctacaataatctgtttccattctaaactcatatcggcatcgattgattttgggtgccaccgccaattcatcaatgactccagtatcgtagtacttgtccagaaatatctcaccagaagcggtcacaatattgtaatattgcaaaatacaggtcacataacacttgtgggaccttttcacgctagtcaaatccacatttgcaggccagtcacctagaattgattcggctatatcttcgtctattccttgattatgggggcacggatcgttagaatcggcaattctctagaagaggagtcttatgttaagtttttccgaacaactgcatcaagaataaagtgttgaacttacaaattgaatttccaaaataaaaataatacaagccagatgcggtacaagtcttagagacattttttcaggcatca

SEQ ID NO: 31274 - DNA, 702 bp, DROSOPHILA
atggagaattggccagttccgcccatcgatcgggcttacaaatgctttctaacatgcgtcctcttggatttgggtctgattgatgaacggggtaatgtgcagatcgataagtacatgaaatccggagtggtggactggcaatgggtggcaatagagttggtaacatgtcgcatagaattcagcgacgaaagggatctgtgcgagctatcatatggaatcttcaactgcttcaaggatgtgaagcttgcggccgagaagcaggtccgctcatcgagtttagttctgttcggaggtccgataccgcaacacgttccatttcgattcgtgatgcctacacttccgctgtgcctgctgctcctggtgttggcgattgcctttggccacgcctacgaggcacctgaggctcaggtgcgcgtgttctatccccggggattcgaggtctccattccggatgcggagggtatttcactgtttgccttccatggcaagctaaacgaggagttcgacggcctggaggcgggacaatggtccagggatattccgaaagccaagcggggacgttggacattccgagatcacaagacaaagctcaaccatggagataccctgtacttttggacctacgtcatttacaacgggctgggctatagacaggatgaaggtgctcatgtggtcaccagttacgacaatccacataaatag

SEQ ID NO: 31275 - protein, 233 aa, DROSOPHILA
MENWPVPPIDRAYKCFLTCVLLDLGLIDERGNVQIDKYMKSGVVDWQWVAIELVTCRIEFSDERDLCELSYGIFNCFKDVKLAAEKQVRSSSLVLFGGPIPQHVPFRFVMPTLPLCLLLLVLAIAFGHAYEAPEAQVRVFYPRGFEVSIPDAEGISLFAFHGKLNEEFDGLEAGQWSRDIPKAKRGRWTFRDHKTKLNHGDTLYFWTYVIYNGLGYRQDEGAHVVTSYDNPHK

SEQ ID NO: 31276 - DNA, 2825 bp, DROSOPHILA
ggtgcttctgggtggcatgtgcaacggcggcgctggcatggggggcatttgctagtgcctacaaagttgtggaagacaatgcatcattacaaacaatttggagccacacctgtgcacggcacactcacaacttggcctggcgtgtggttggcatgctcttgcgcaatccgattgtaggccgcgaagtgcctttgcttggctgcctggacggcggcgctgtcctccagtttgtggctaagctgaggatggaaaccatgctcatccgccacatactgtacggtgcgcacctggttctttgggtccacataggagaaagcaccgcggatcacacccgatccatcggacacctcggtatgctggcgatccacatggccgggagcacggccagcttggtagctgaacacatacggacttgctggaaccttcggttccggggtgaccagatgggacacatcggccgcagcgactgccagcaaacaaacgaccttgacatgcagacaggaagagttatatgtagttgagtaacatctgatatagtcgctcacttaccaaaactataaacatggttgctggattgtgttgcctctctactcaagttgcgattggtaactggcggtgacttggacaacacttcggtattcgcagttcgtaagagccaaaaactggtattcgaggtgccgagatgcgcattttatatgccactacgatcggctaatccacgaatccgaaacttgtttttacattttgcattcataaacaaggtaatttgacattaaagttgaattaacaaattgtttttcgatatataacattctatgcctttggttagtcatctgaacttgaaattagcaagttattagcgtttaatacggttcatttacagaggtgaaaagtcttaagtattagatttcgtattagtatatatgggattacgttataacttaaacttagcagtggttttgaccattatttctatgttgtaatacagtttaaaattaggctagaccagctcctcaattgtctgcgctatccagtcgtcataggccgaaacttttgtgtaaattccaggaaacatggcgtttgcgcatccaaatccccaggacacaatgccgtagagctttagacggccatctatagatgtgacaagtggaccgcccgaatctccctggcagctatctcttcctcccgcctgagttcccgcgcagaacatggtgttggtcacggtgccagctccgaaatagtttctggcacactggttctgatctctcagatggacaacggtgtagcgaagacgcttttccggctgcatttgtgagatcgacgtgctgccccagccgcttacaaaaagctgtgcggtcggcataatgatgtccttactggtggccaagcttatgggtcgtatatcctgactatagacaaggggttgctgcagctgaacaatggcaatgtcattgttcatcctcgtggggtcatggaactcaggatgcggaatgatctttttgacgcgaatatagctgccgcccttcgtccaatcgctagatccggctcgaatcacgtaatattgcggtttactgtactccagcacacagtgagcagcagtcaagatgatgttgggcgaaatgatggttccaccgcatgcatgccgggtgcccaactgcagggatacttggtgcggaaagaaggtgatgtgcgtctcccagccgccgacaatgcggccatcctgttcgacatccgtggagttctgggcagccgacgtacagattagccagagagctactgccagtctgaaatccaagctcgtcattttctctttgattgcccgtgactgtgatggaaatcactgtggttcaggtcttttataagggaactccaagacacacggcttatcttatcggcggacccaactcttttggtggcccctgaccttctcggactatctttcgggatttatagatatttatggatagatggcttgggacaaattaaacagatggcggaggtcaagggtgctgctagtgtctaggcttttgctcttccaatcatctttccatggccgtcacctgctccttgaggtaatccaagtggttgacactgtcctgcatcacatcgtactggtagcccacgtgctgcagaatcagcgtcatcttctgcagattctggtggctgtaatccgagaccacgtccacttgggtgaagttcttcagggtttggtgcataatctgtgggcgaaactgctaaagtagtatttattattcaagggattaaagtctcagcatacctcattgctcttggaacctcggactacttgtcgggccacagaacctattgaacgccacgaaagaaaaagagttcatatcgattttgctgggatatactcgtattaactcacccaaattatttgcattctcacccacgcggacacacaatcgcttcttagactcgtcgaataaatgccgagcacttgaactggtcgcagaggccattttatttatgattaaactttgtttaaatgctaataaactcgaaaaatgtaaacaaagtcaaggtaaaacagctgagatagattgggtgtccattaacagcagtgtgaccaagtgtaccacaaggtacgagttaaaacattgcgttggccaacgggttgaaacccttgctagactattagcggtgaccgaaaccctggaatatggagacatctcacatggaggaaatttgtagagtttacaaacaatgttgtagacattaaacgctgcttttcggaataaaattcctaaattcaattcatcgagttggaaaacgtacccttaatttaaatctaaatctcattt

SEQ ID NO: 31277 - DNA, 825 bp, DROSOPHILA
tcacgggcaatcaaagagaaaatgacgagcttggatttcagactggcagtagctctctggctaatctgtacgtcggctgcccagaactccacggatgtcgaacaggatggccgcattgtcggcggctgggagacgcacatcaccttctttccgcaccaagtatccctgcagttgggcacccggcatgcatgcggtggaaccatcatttcgcccaacatcatcttgactgctgctcactgtgtgctggagtacagtaaaccgcaatattacgtgattcgagccggatctagcgattggacgaagggcggcagctatattcgcgtcaaaaagatcattccgcatcctgagttccatgaccccacgaggatgaacaatgacattgccattgttcagctgcagcaaccccttgtctatagtcaggatatacgacccataagcttggccaccagtaaggacatcattatgccgaccgcacagctttttgtaagcggctggggcagcacgtcgatctcacaaatgcagccggaaaagcgtcttcgctacaccgttgtccatctgagagatcagaaccagtgtgccagaaactatttcggagctggcaccgtgaccaacaccatgttctgcgcgggaactcaggcgggaggaagagatagctgccagggagattcgggcggtccacttgtcacatctatagatggccgtctaaagctctacggcattgtgtcctggggatttggatgcgcaaacgccatgtttcctggaatttacacaaaagtttcggcctatgacgactggatagcgcagacaattgaggagctggtctag

SEQ ID NO: 31278 - protein, 267 aa, DROSOPHILA
MTSLDFRLAVALWLICTSAAQNSTDVEQDGRIVGGWETHITFFPHQVSLQLGTRHACGGTIISPNIILTAAHCVLEYSKPQYYVIRAGSSDWTKGGSYIRVKKIIPHPEFHDPTRMNNDIAIVQLQQPLVYSQDIRPISLATSKDIIMPTAQLFVSGWGSTSISQMQPEKRLRYTVVHLRDQNQCARNYFGAGTVTNTMFCAGTQAGGRDSCQGDSGGPLVTSIDGRLKLYGIVSWGFGCANAMFPGIYTKVSAYDDWIAQTIEELV

SEQ ID NO: 31279 - DNA, 4721 bp, DROSOPHILA
gctccgctgcacccatggcctcagcaacgacggccaccggctcacccatgcgtccgtacgcgactagcggcggaatgccaccgttgccgggtcccagtgtgatggagagtgcccgtaatgccatactggcacgtggacaacccttgaacttcgccctgccctttggcgtggctaagccgccggcgggtggtgtgcctgcggccagctacatccctcgctgcaagccgtatgcgaccagctatgtggactacgcggcgtcactgccaacgaacgagagctatctgcaaatgaagtacgcgacgctgccgccggaagcggaaagcggcgcctccaatggcctcgccgaactggaacgcgtctttggggatgccaatgccaactttctgcaacaacgcagcacgccagtcgctggaacagccacagcctacggccacgatggattaaatcaggcgcagcggagccgcagacccacacaatcggagtccgagtgcagcgacattgactgcgagcatctggacgaggatgaggagccacctgctgcggagtgaaaaggcgattggttgtctttagaatttatgttccgtacgtctctcatacacacaaaaatatgctcatacaaagtgtagtcatagggggtagtagagtaggtgtcctgtctgggttgattccattacaactagctgagagtggcacactttcagatctggccgggattactggcgtacccctggtggctcagcactggtctagtttacgttgtggttctagtactagtactagcgctagttattgctattctatgttacattgtgtgggtcgggtactgtttactgactggctctcaacaattaataaatgtaaattaaataatcaaaaatcacaaatattacacgtccgttgccgttagaactctagttggatcaacttaaatgctacaaattacacgctgcatactataacttaaccattgctataactatttgcaatttaacacgataaattgagagagatagacagatagagagagctgtaacaaaagcgaacgacactgacttatttacaattcattgcgttgcttgtgtggctggtgtgctagaatggaacacttttggctcttgccacacacagttcggttcggttgactactatacatagtggagactcatttgatttgattttgttacgccaacagtaggtccgtaggctagggatctggagcagacgaattgcgttttctatcagaaatcagggctagtactccaagtactcctgcctacgcgatggctgcgaacagcgtctactgttcgaggagattccatagttacaacttagctaattggtcaaataaaaattaaaactcatagggctatttttggtattgcaagcacgcggagctagctgcgtggtaatggaagtggagctggcggtactctgtccttagcgtcgttagctccaagagagctcgtagcccttccagttggcgttgggtgccagatgcacgcgccgtttgttgtagtagaaggagacgatgccatggtaggcagtccgcggaacaccgctctacaaagattaagaataatcatagtttcaagcacatagattgattgatctaccttgaaatcatccataagacccagcatcttagttgtccgcttgtactgctccctagtagtgtattgaatgcgaactggaccttcgattctgcaacaccataattggaattatgtagatactttctatatatcatatatcaactcacctaatcaggtttcgccgcagctcatcgtacgtaacaatgggatacgtataaacgcgccgcagaaacgtgttatcgtaattgtcctgaacatgaaatagttgttagtgtaatgaggcaacaatgcacgggtgtgtacctaccttcagcaggtagctcatattgatttttgtaaactgcacaaagtcctcgctcagtttaatgtgcttcagatacttatcgaagaacaaaccgctgttaaacaacaaattatcattattagctggcacgttgcattgttagctagctatatctcttacttggaaacgcctatttttccaaacgtgcgagtgcgtgatatttcgggcctaatgcacacgcgatctttgcgctgggcgggatgacgtatccaatcatcccagaagctagaacagttaatgaaccattagcgattggctggcaaacaccataattgccccactcacgatttgggccatttgaccgacagctcggcccacagatctttggtgagcatccagccgagaccgggaaagaaatcggtgcggtagagcagctccggctgcgcggcgtccacaacagcagccttgccattgtcattccacgcggacacgcaccacaggctggggtcctgcttgagcagcttgtgcgtgcccaggaagtactcaaagaagtcgggcgccacgttcagatcgtcctcgacgattatgacgaactcaaagcccacagcgaaggtggtgttcagggcccagccgtagtgtcgggctatcttgtagtagcctttgaattttttctccttcggcagcactgtgatgtcgctgagatcaggctgctcgatgagcgtgacctgtttgccatacgagaggattgcctccttggtgggctcatcgccgcagtcctgtattagagcataagtataagtataagatttagattgggtagcccatttcgatccctacctgtgacacaataatggggaactgctccacgctgggcctgtactgaaccaagttatcgatgcacttcttcaccgacacccgattgcaggcgaagactacgactggaaacacgggctcgccattggccagatatgttttcgttggaatgcgcgccgttgccgacttggccacatgctgctccggcagctccgccgatatttcggcggcaattatgctaatttgcggcgtggatgccaccgacggtggttgcttctccaagtacttcagcttgacgaactcaaacacgttcttggccagatgatggctttgcatattggcatcgcgagcctgcgagttgagcttgtaggcctgaagcgactgatgccggctcgtatggatgcccgtttggcgcaacagcaggtagtaggtggcataggtccacgtaaccagaaagccaattaccaatagcaccttgcgcgttcgcatctttttggggggaaattggtgggtgggggtgctgatggaactggtggacgtctgctgcagtgcgtcgctagcgatgcagcggcattggcgatcggttttggatacggattcggtgggattggaagacctcggccggcccttcttctacagccgagcacccgtgtcgagcagccgtgtccaacaagcgtgtccagcatcgggcacgggcccagccggatgcctcggcatctactgaatatgtatgactagctgtcgccggtcacacgtcacacaccagcggtcgccaagctggcagatttcgccgattctcggggattcgggatttggattcggatcgaatctgtgtgtgcaaatcgaattgtgaatgttttacacgttcggcggctgcactggaagctcgattgacttgttcgccggttggagtgacgagttcgattgccgcgctgcctcgtccagcgtccgctgacaaccagtggttacgtgtttggtcgtaatttgtataaattcaaaatgtaaaccatttcgtgaaacgccagcgttttagagatggggcaactgtggtcctccgctcgatactatcggtgaggagtgaaataacgcactaacgcatcacgccaaaaatcttcagtagggggactcgcaattaaattggcggtaattttgaatttgattttgttttataattactttttaattgcattgtttttcgctttaattcgaacttattaaggcacattgggatacttgggaatcagcaactccagtcgcatatgcctgcgcacttggcactcgagaaagtcctgaacattcctcatttccggctgatggcatttctcagcatccgccttttcatacatctcactacgtagatcctttaaataacgccgtggttcttcgattagacggttcctcttcttaatagccacccaaggaaactcattttggtagcccgttgagtggcactgctgcttcaacggtttgtttgtatccatggtgtagcctttgataaaaaaataaaacttcttgtaagactatcaaaacaaaatatttacctaccccaatcggcgtacaaacgcaaggcatttcgctttctagaatgaaattccttaatgactgaaccatttaattgagcttcaatggtagataatgacaaactttgctccgcatgcgcaatccgcatgtagatagatagtaaatatatccaccagattattccaacatacttcatcttaagctacaaatcgaacagattgagcaaaggcgcttagatcagagtttcgtttaatcaattaattcgtttagtttacgcgttaattaaattagcttaacagttacacttaggagactagtaggtgcttatgagttagaccgagttcttcaagttctccaatatatatatatatatatgcatatttatatatttatatgtaagtgttttttgtgtatttttataagaatcactgttgtctgtctgtttctgtttctgtttctgtcgcaatgtctgctgccataagtcgttgaaaacctacgctatgcatacattt

SEQ ID NO: 31280 - DNA, 2367 bp, DROSOPHILA
ctaaaacgctggcgtttcacgaaatggtttacattttgaatttatacaaattacgaccaaacacgtaaccactggttgtcagcggacgctggacgaggcagcgcggcaatcgaactcgtcactccaaccggcgaacaagtcaatcgagcttccagtgcagccgccgaacgtgtaaaacattcacaattcgatttgcacacacagattcgatccgaatccaaatcccgaatccccgagaatcggcgaaatctgccagcttggcgaccgctggtgtgtgacgtgtgaccggcgacagctagtcatacatattcagtagatgccgaggcatccggctgggcccgtgcccgatgctggacacgcttgttggacacggctgctcgacacgggtgctcggctgtagaagaagggccggccgaggtcttccaatcccaccgaatccgtatccaaaaccgatcgccaatgccgctgcatcgctagcgacgcactgcagcagacgtccaccagttccatcagcacccccacccaccaatttccccccaaaaagatgcgaacgcgcaaggtgctattggtaattggctttctggttacgtggacctatgccacctactacctgctgttgcgccaaacgggcatccatacgagccggcatcagtcgcttcaggcctacaagctcaactcgcaggctcgcgatgccaatatgcaaagccatcatctggccaagaacgtgtttgagttcgtcaagctgaagtacttggagaagcaaccaccgtcggtggcatccacgccgcaaattagcataattgccgccgaaatatcggcggagctgccggagcagcatgtggccaagtcggcaacggcgcgcattccaacgaaaacatatctggccaatggcgagcccgtgtttccagtcgtagtcttcgcctgcaatcgggtgtcggtgaagaagtgcatcgataacttggttcagtacaggcccagcgtggagcagttccccattattgtgtcacaggactgcggcgatgagcccaccaaggaggcaatcctctcgtatggcaaacaggtcacgctcatcgagcagcctgatctcagcgacatcacagtgctgccgaaggagaaaaaattcaaaggctactacaagatagcccgacactacggctgggccctgaacaccaccttcgctgtgggctttgagttcgtcataatcgtcgaggacgatctgaacgtggcgcccgacttctttgagtacttcctgggcacgcacaagctgctcaagcaggaccccagcctgtggtgcgtgtccgcgtggaatgacaatggcaaggctgctgttgtggacgccgcgcagccggagctgctctaccgcaccgatttctttcccggtctcggctggatgctcaccaaagatctgtgggccgagctgtcggtcaaatggcccaaatccttctgggatgattggatacgtcatcccgcccagcgcaaagatcgcgtgtgcattaggcccgaaatatcacgcactcgcacgtttggaaaaataggcgtttccaacggtttgttcttcgataagtatctgaagcacattaaactgagcgaggactttgtgcagtttacaaaaatcaatatgagctacctgctgaaggacaattacgataacacgtttctgcggcgcgtttatacgtatcccattgttacgtacgatgagctgcggcgaaacctgattagaatcgaaggtccagttcgcattcaatacactactagggagcagtacaagcggacaactaagatgctgggtcttatggatgatttcaagagcggtgttccgcggactgcctaccatggcatcgtctccttctactacaacaaacggcgcgtgcatctggcacccaacgccaactggaagggctacgagctctcttggagctaacgacgctaaggacagagtaccgccagctccacttccattaccacgcagctagctccgcgtgcttgcaataccaaaaatagccctatgagttttaatttttatttgaccaattagctaagttgtaactatggaatctcctcgaacagtagacgctgttcgcagccatcgcgtaggcaggagtacttggagtactagccctgatttctgatagaaaacgcaattcgtctgctccagatccctagcctacggacctactgttggcgtaacaaaatcaaatcaaatgagtctccactatgtatagtagtcaaccgaaccgaactgtgtgtggcaagagccaaaagtgttccattctagcacaccagccacacaagcaacgcaatgaattgtaaataagtcagtgtcgttcgcttttgttacagctctctctatctgtctatctctctcaa

SEQ ID NO: 31281 - protein, 458 aa, DROSOPHILA
MRTRKVLLVIGFLVTWTYATYYLLLRQTGIHTSRHQSLQAYKLNSQARDANMQSHHLAKNVFEFVKLKYLEKQPPSVASTPQISIIAAEISAELPEQHVAKSATARIPTKTYLANGEPVFPVVVFACNRVSVKKCIDNLVQYRPSVEQFPIIVSQDCGDEPTKEAILSYGKQVTLIEQPDLSDITVLPKEKKFKGYYKIARHYGWALNTTFAVGFEFVIIVEDDLNVAPDFFEYFLGTHKLLKQDPSLWCVSAWNDNGKAAVVDAAQPELLYRTDFFPGLGWMLTKDLWAELSVKWPKSFWDDWIRHPAQRKDRVCIRPEISRTRTFGKIGVSNGLFFDKYLKHIKLSEDFVQFTKINMSYLLKDNYDNTFLRRVYTYPIVTYDELRRNLIRIEGPVRIQYTTREQYKRTTKMLGLMDDFKSGVPRTAYHGIVSFYYNKRRVHLAPNANWKGYELSWS

SEQ ID NO: 31282 - DNA, 20625 bp, DROSOPHILA
attcgaacttattaaggcacattgggatacttgggaatcagcaactccagtcgcatatgcctgcgcacttggcactcgagaaagtcctgaacattcctcatttccggctgatggcatttctcagcatccgccttttcatacatctcactacgtagatcctttaaataacgccgtggttcttcgattagacggttcctcttcttaatagccacccaaggaaactcattttggtagcccgttgagtggcactgctgcttcaacggtttgtttgtatccatggtgtagcctttgataaaaaaataaaacttcttgtaagactatcaaaacaaaatatttacctaccccaatcggcgtacaaacgcaaggcatttcgctttctagaatgaaattccttaatgactgaaccatttaattgagcttcaatggtagataatgacaaactttgctccgcatgcgcaatccgcatgtagatagatagtaaatatatccaccagattattccaacatacttcatcttaagctacaaatcgaacagattgagcaaaggcgcttagatcagagtttcgtttaatcaattaattcgtttagtttacgcgttaattaaattagcttaacagttacacttaggagactagtaggtgcttatgagttagaccgagttcttcaagttctccaatatatatatatatatatgcatatttatatatttatatgtaagtgttttttgtgtatttttataagaatcactgttgtctgtctgtttctgtttctgtttctgtcgcaatgtctgctgccataagtcgttgaaaacctacgctatgcatacatttaaagttaattacgttccgtaaatggcagttacatcaagtataggtatattttagtagttaggtagtacattaatattccctccttcgttcattgccactgcacgcaattccgccctgattagcattcctcgcactcgcacgtcgttcacgccttgagagatttacaacttctacatcagccgccaactccatgcccccagaatcgtccagagagccagcgacaggccgttcgatgcggctcccgatccggcactgagatgtcccagctcccgctcgtccacgacaaaggcgggctgagcactggcgggcgtctgctccatggcaaagttgccgcgactattcctggccaagcgctggttggccagcttcagctccctaagcttctcctccagctgcaggacctcatctggtaaatgggaagcattcaaatgttatatagttttcatatatgtaagtaaagaaatctgcacattactcactcttgttgacaccctcgatatcctgaacctgcaggaacatggccagcgagatctcgtagaccttgttcgctgagctgatctctcgcttgcgtcgaccgaagcccacctggttgttggagcactgggtgccgaggcacttgtccaaacacacgttgaccgtggcacggaattgcacgtacgacgagtcggggaacttgaaggccttgaacttggcactcaaaatgtcgccatcaatggtgttgaagttctcgaagagatagggatccactgtgcagctaaaattcagaaagttaagaactttattgaatgttcaatgtattgtcatgtgcaacacaccccttgaagatcaacgtttccgatgacgtatgcgtatccgtcacatccaaatagttgacacccagaccataaacaggtgcagagtcctcatccagattgatttccattgtcaaaggtgtgcccttttattgcgaaatttaatcaaattaatcgaatctttaatataaagattatatgagtttgatttactcaccgacttgacagtcaaatccctggtgaacttctgaccatcctggctaacgccaattgagagtcgtggctccggggcccgcttggtcagcgatgtggtgatctccagatccctgcaagcaaaccgattcagtattcagtgtattctgtactcccgattcgaggtcttaatgatcggcggggcaggacgccgccaataaggttgtaaatcaatgtcgggcaacgaaaaacaaacattgtattcgatcagggaatcggggaatcgagggatcgggggctgtgggcaaaagtgtgtggcaaaaaaagaaccgcagacccaaggcttgggagaggtaccccgacacgccccgcaattaaattgactgtggaggtattaacgcatgtgaagccgccggcgtcgatttggcggctaattacctcctggtaatggcaactctcggaaaggcccaagaaaggagatcgggagaaaggaacgagagtgggaggcagtgagctggaataggtttgatttatggccctcggttgggtctaagtctgggccggactgggtatttaatatgccataagcttttgcatagaccgggccataaaattgtgcatagatgcattttgcatttatgggcaattaaaagtagaccaggggaagcactcgaatccggagcgcgcctgccgaggtacttactcgggttcctggaatcccgccggcagcacatcccgcttgaccaggccgtggatgccgccgctggaagtggacgtggaactggacccggtggtggcattcatcatcacattataggcgggactggcggtggtgatgcacttaacgctgacgatctccttgccgctggttgactcgatgatgattttatggtaatacaccttcttgccctgaaatggaatcgaaaaccaagaaccaagagctagaggattgcgccaaaggagcagtgaaactttcctaccgttagctggttgaccattcgagttactccgcactcgtaaaaatcgctgagtgaaagccgaaaaacggccagggatccatcgatttgcggctggcatcgttcatccggatatcccttcaatccctccaaatagatctgaggagcactctgatcctttgactccgcatccggcagtccgatgtcaaccctcatctgatcctccgaacagtgcaccttgtgggaacctggaaaatagaatatgaaaccaaattggttactatatgtatatctgtgcagccgacattccacattctctgctacgagtatattctaaaaagtgggctagcatgtcgtccagtaatcggagctggactggattctggatactagactggctagccggaccacgccccctatcatcatcatcgccgtcgtcggacgttgacgagatggacccggctggcaaacactaaacaattgccaaacgtaattgccgtgcagtgaggatcaagtttgtggcttaagtcttttgttttccttgcactattacacgggaataaaataattatcaaattaaccaacaattctatatatttagtcttaaaataggttgtgaatcatcattcatttttttcatttgagaatttttctttgtaaataataatgatgttaagactttttatgtagcatatttcttggtaagatgaacaatgaaaactctgtagattatattcacattctttcttagtatttatctgagtgtaccgctctgcgttgcctattatcgaggtggcttaataaacccgcagggctactttctgaggccggtggaaagcaaaaacttggcattagcccaagacacactcacacactgctttggtttagtttggtgggctttggctctcgctttggcataattttagcccggatagggcaatcaaattcttattaccgtcgaacatgtgtagtatgccacgaaattatcggcttaaatgctctgccgacgaagccatttgttttgcaggatttgttgcggcctgtgggactaaggcattgccattcgtagatggcaaaaactaatttaaataattgactctaactacttaatctcatactaatggccgcggcaaattcgcaatttctgggcggaatcgcattggtaatacgagccgcggacatgcgataatttggcttaattagccattgcgagagtgaaatctccactccaaacaatgagatcgggcagtaaatgcggaaaagcgctagccgaggcaattaaaaaaaaaaaatggcaatggaactgcaacggctcttgttctctcagccagcaaaacccttcgcccctgcctttccctttccccctgcactctgcgactgtgtaatccgagcaactgcctcaaggtgggcgcaatgcaagcggcgcccaaagaaattaaaataagagtcagcctgcctacaaacggcagctcgacttccgccaagaaacgaggtctggctctagaggatgcagaagaagaaacgacaaacaaaaaaagagagtgaatgagctggaagacagaaggaacgccgccaataaaacaaataccacggcaagggcattaatagagaattaaggacgccggagatgaggcgttgaaaaggtctgatggactctaaattacacacaggcatggcagccagccattcaattcctccgagcggatgggataagatggcagtgtgactgggaatggtgatgggaatgggattgggattggttataaggatggacggagtaatttggtagtggcaaacaggttgctttgtttcaaatcaagtaatttgcggtcccataaatatttcttattttatacttatgttcttaaatttaaatacgctgctgttcagttttcttactatacgcatttgcatagattgttgctaccaacttcagctatctacatatttttctcctcttctgctagagaaaagaagtgagagaactccacgagacgatgtccagtcaagtctgggaagtttggatggtggatgcacccagagccaaagtcttgtccaataaagttgttggctcttaaaattggctagtgggcgaagcggtcgactgcagtcggaataattgaatttcaaagtatcttggcccttgcctggcttttctgcaacttcttttattgaatttttattgctggccgctgattacaatttatttgacaccgtttttatggggcaagccaactcgtgagaaccctaaaccgcttcgagacaaagtcaagacttaacccacattcggaaggaatcgctgtggagcagtttttttggggggcatcgtcagtacttgaaatcagattgagtgagccagccaagtgggagtccgaatcgaagactgagtgtgccgaggcattagcatttaacctgcgaacatgacaaatcagcaaaacgtgccacatgggccacatggccacattgccacatgccccgccgcccaatcatgtaagcagcatgtcgttgccgcaaccgttgagagcgtagcataaatttccattaacaataaatttaaaagaaataacattacagccgaaaatgacccgtagcgaagttccctggaaaaagctggcgttgagtatggggagcatgaaatatcatggcggagcagcggcagcaattcggggagtcatcaacgggcgaacatgcctcgaagcctcgaaggtggatagacagacgggacagtcaagtcagcaccactctgccaagtggctatatatacacatacatacatatatactcctatcgcaatcagcagccacgacaatgtttttggccccagctctcggctctgcttcaaacaatttggcaacaaatgcgcgcgcacaatcaaatgaatgcacaaatcaataagacaacaactgctgcaactgcaacagcaatagcaacaactaccgacaattgcaacgtgcaaaatcgtttacaagccacgccaagtcaactcgagccgaagtagattccaaacgccggcgaagagaacgaagtttgggccaaaataaccaaatcattgccatgcaaatggcatcgttttgtggctgaagtcatcgccagcctctccgacttttccactttttccgccaaggaagagtagtcgtgaaaggtgggaaagacatctccgcctgccactgcctggattgcactttgtccccactcagctggtctacactgcaagaaaaatgcacaggaaaccttttgccatgttctgttctatatatgaaatggcaaaaagcttacacaaatatatccgtataaccaatgtacttcgctcagtgcagccttggggcaggggcaatgttgcaacaattgtttcccgggccaatgtgtctatgtgtgtgtgtgtgtgtctcgtctgggattgcaagtgcaactgcaattggaatcgcaatcgcaattgccatggccatggccacggccagattatgcaattgtctgactcggcgtcttctcaccctgcacactgcacccgcaccctggtaatctcctccgcctcctccgtctgtgtcactatggcagcccctgtgtgggatttcagtcacgtttctggctgctggtggcggatgaggatccacggatgagcatcggatctgggctggatcggaaactcgaaaactgttttcggcgctcctcctcgcgaagaagtgttaggcctggaggcgcgtctctccactcagcgggaaatgcaggatccattcaacgggaggaattaaacaagcgatttgtcaggtgggctggaaggggctggtcctgaagcaggagtaggattgggacatagaggtaggtgaaggtggaggtgccatttgtgactttcacatttatgacaagacttctacggctgatagcgcattctggccgcacatacacccgcctggtaactcgcggaattacttggcctgggccactaacttgacacacacgacgcacgattatcatcaatcttgggttggagccacaggaaatactggtaattttcccgaacccccccgcttcatgccatttccccctcccaccaagaactcggcttgcagttagcctcatcatccttttcagtgaccaattacacttaacggccatgcatacgaaataaattagaaaacctcaactgcagctgggtaatgggatgggtaaatgaaggcatggttagccatagagttggctaaccatcaggtcagcgccagccgccttcctggtgggagttgtccgctcctaatggctcccccaatatgctaagcagtgtcaatgtgtcaatgttgccgcgtaaatccatcaaaatgcgacgggaactcaataaacaaacgggtttagccgttcctcacgaacagcaggaggtgtggtgcttatgtggcggcatggtgcttcggagtggacacagacgacaacctactgcaaatgtgataattgcaaagcatttagttggagtattagagatcctatgtctagtcgttcaccctctctaccaggaaatccatttcgaagcccactcgtacacttagaaaatatctatatctattaggcataagctgtctcattaaataatattataagaaagttcaaagcttgctggaattgcacaaaaatcattgaagcaatcgatttgaagattggaatattattgctttttatctcctcccgttttccttttagagtttactataatttttgggtaggtgaacttggcttttcctatgtcaaatctagcagggaaaattacaactgttgaaaggattttccctgtgtactttgccgatctcatcgtggcctctgcgtgttactcctgtgcgcagagtgaatacagtggcagtcagttgtatgcgaccggcgcaaattgccattcgttccatcttttcaaacgctctgtcaatggtgtcctcttcgtcattatcggccaacaactttttgtttgttaattgtttccaatgacgcaattgccggctgccatttatagaactgcgattccgtcagctgattgcgtcagtcgtcgtcgactggcttccacaagtgccagcaatcacagatcttggccacatctccaactcatcatgccaagccgagagtccggaaacagtgagcagctctcctccacacattaaggccaaaaacagcgagccaatgagttgcgcttctttggctcctgtctcatttgaccgcttaaattagaggccaatcgatcatcactgggcggatggatggagcttggcgcaataaacatgcctgacaactggccgcacatttggccatatttaagagatgagatgcaaaacgctcctcctccgacttcttgttgccaacttgttgcttctaaccgatttgcgggaacggtaaatatattcagctaccaacgcgactttgccttgcacttggcgtgaacattatgcgcagctggctaattaaattacacaacagtttggacatgagtgccgaagcagccagcggatgaacagtaagcaaacctggccatgactttgagtttgtttgtgcccaaggtggggatggtggatggtggatggtggataagcttaatgctcaggcggcgtcaacagatgtaaatgtaaatgttgcatgcaaaaagctgcgccatgctgccacctcatgtggcattgtgcagacacacggaacatgaggcatgactggactgctaggccggatggctgggccagcttgccggatctcagctggcttttggccatcatcatcatcgtccggctcatccacatccttcgcctttttggttttcgctaaaacttattaattgccaaggtgagaggcagtcagaaaatcaagttggctgcatctgcatcatcttgttacgcgatgtggcttcatggcttggctcgaattaatttggccttgttagcccggcttgatgacaaatgcgtgacgtaactgtaaacacggttgggccttggctacggctcccttttttatgctaagctcccttgacaatttgtcgctgtttccacgtcacgttcgctgttcacctgtgcctgggtgcaacagacccagcacagtggagcctcctttaacggatggaaacttaagcacgctagcaagtatttgttgcagaaaggaatgttgtttgcatagcttgcattttacaagatattattactttaaaaacaatataagtgttctcaaaagttgtatcacaatatgtttacattccaatcctaatagtttaattatgaaaacactatccattgacttcgatcacaggtagcagtattaccatgatctactgtacttcaatctccagcccattcagtcattctttcgcttatttacacatttttcagttggcggcgcttcagcacttgctaaattgttggtttccgccttggccggcactgtgggctaacaatagtggagctcccgctcccccagctgtggtttaagccaaattgctgctgccaacaacaagatcaaaatcagctagaaacgcgggaagaacaagctgcatttaccgctaagaagttttgaatgaaagcgagtggcattgtttctaccctattgagtcattttgctcataaatgcagaatgcgtttaagatgggggggggaattaaatggcggggaaatactgagaaaattctggttaatgggcctttacgtgcaaccgcttgtaactatggtaactgtatagcgaagacaaattaataagaaaatacttagaagagactctaatcatacgaattaattcaattggcagcacgagaaagtgttgttcttgttgccgttgctgtgtcttagccatattaatcgcatgagatggccgagagcaacgagccgagagaagttttccttctttcattgcccgatgcggcatataattgccttttcttttttacgtaatcgcccgatgcccgatgccttttttacgcttaattgaccataaaagttgttgccgctgccgcaaacgagagtttcattgcaaatctaatttatcaaatgaaattccaagcgattccaatctgacacatttctgtgggcgatgacacacaaaaatatttgttagttttattccactcgattggtcattaatcaaacgaatcagggcccagaccgactggatccaattgaggatcgaacggactatcgcacacctattgaactctcaatcccaaacccaccaattgctaattgtggacgcggcgaacagctctcacaattatcgatggggtcaaaacataaatctcctcgggggttaggctaatcaacccgtgcggccaaggtgtccgtggcagaaacgaaatagaaatattttgtagttacactgcgagaaattccatagccttatgttggcttaccaagtaaatggaaaattctaaagtagtttctttataaaattaaagaggcactgaagattcctatgtgttgcttgtgaaagttttccgatataaagttacattttctttttagcacctacatttttattatctatcgtaaagccgctttattggtaacctatttttacaagtgttccggcaaactcacagattctcgcccatacatttgtatatatgtacatatatgggacaaccgactgaccaagtgaccgccagccaaaataacaacaacatggaaatttattgctgctgctcgaaagactagaaaagctggtggatagggagtacacacacgagaattgtggcgatgcaggatgggccatttgaaagcggtaatattttacttagcttggcggagccttaatgcccaaaatcgttacccgtgggcgttgtcttggtcacatttgggcattggccatttaccatttaccaaatgctccaactggctgctggagaggatcgtcgggcgacacggtgtcgtgtttgggcccacacctgcaattgacattattatttggttgcgtgtgccgacgacaactggatgcatccaaggagcacacaaaaaaacacagaatgccgcaaagggaagagtgggccagcttgatttataattgtccaactgggtttttgggtagacattccattctacgcatcttgataagtgcgtactttatggccggacttgcgggttaacttgcatctggccacggtcatcgcttgtccgccggtcgctacaaacttgttgaaaggcacttggccatggagcatggagcgtggtgcatggagcatggtgcatggagcatggagcatggagtactccttaccggcggagatcgcatgcctggccatctggccacgttaataaccgtttttgacatgccaagcggcattattaacagcattttcttctccttttatttatatctctcggcctattcgcctcttcttcacttattttgtttggatttcagtttgtgtgtgttttgtgtgtctgtggcgcttttttttttaattgcgggaacgaaagggaggagcggtctgggcgacattttaattgaaattctacggaaataccatgaatgagtgctgtggcagcagccaatggtataggtatagaaaatctacgaagaaatctctgaagctcgttatctgtcttctgttttggaaagcctgctgttcgaggcaaagccgcagatgttattatgcgtcatctatcggcaatctaagtacaatttgcccttgaaaaaaagcgaaaccgtttcgagattggaatgcaaaatcgcctgcttcctggatgctcgaccatttggcagtttggggggctgggcaaattgcttgatttgaccgccggctaactgtcttcgcccgctgtagcttcctggtggttttgcatctaatatacggggtactttcattcgcaaagggtatattgcaatcgtgcaaataaatgcacatagtatttttgcatgtctaatggatttacggcacattaagctaacattttcatggcgtgcaactttcccacatcggcacattaagtaggagtttaatggcacactaataactttaacaaccattgattagtatttgaatttgaatgctgcagcataaaaatacatttttgctatttactagaaaatgtgtaattcactcaagatagaatcgtgtgcaaacaccgggtatcaacaagtccaaaaatgccgtccttgacgacctaacttgttcatttttgggatatgcatcttgggcatttcttttcaattaccaaaccaccagcccatgcggtaaccgcccctccccgctctctccataccccccaccccgctctcctttgtggttgcggttatctccccgctttgccatgtaatttggacttcaaacgcattcacgtgttgcagttgatgctgctgttgatctttcctcctttttttttttgtgagcagctgcaggcgcatatcaaaagactcagaacacgaactggcttctcgttagctgagtggccgagaagcttggaagctgggaagcgcagttcctcatcgctggcactcttcgctgaatttgatccagttcatttggcagtgcgcatttttacagttgcccgccgcattcgtaaattgtgttttggctcggattcgacggaatggagttcaataaattaattaacaacattttttgctgattttatcacaccgacactgctttccatgcactgatgagcgcagccattaaaagcagaaatgtggataattaaatggcaacttttaatcaggttagccgaaagaatctcaaaggcgggcaagataagaaaatagaaactacataatgacattaaaaagtcgcccccttgtagtcttcgctttttaatgcttttgttattgttgtcattaaaagacaggcataacaacaaatacagcgctaactctcgctcagttaaattttttcattttatttccttgcaatgtcattgactttggtgcgtgcgtgtgcaaattgtgttgtgaattctggcggagccacatgcgatgaaaaacgcacaggtacagtggatacacgtgaaagcggatatttcaagaatgtcaaaatatgcatgtaagtcacatagatatatgtacattctcaaatatacatataaatacgtttttattcaatttataaaaacttcacttttatttgatcaatgtaatttggtcatattattattccccattaaatttaatttttattagactaataacttttaataagcaggaaatatttactaagaattctattcagatgtctcagatctcaacttcattcagcattatagaccaatttttataataaaacatatttggcttggggctcttagccttttcgcagcaataatgccgcttttgaatgagcctgctttgcatttaaaaagacagacagtcggtcagtgactccctcacaaagagcgacagccaaagcaccaggagaagaattcgattaaaaatagctaacaaagaaatatatgtaattccttgtggccaacgttttgattgcgcaacggaattgattgtattataatgcgaatataacccaagaactttgggtgatcaatcttaaagtgaccggactgcagccagggtattaacaaagaaatgctgcagtgcagagttggagagaacaaataaatatgataaatttgccacatgcagttagacacatgcaatttatcatgcgagcgagaggggagaacgctccccgttgttgcgggtcagagcgtctaatagattaaataaatttcgcataaattatgcaattgtggcaagccataactctttgcgagcgcccgaggggctagccagcttagcttacgttacgcacttggcctcggtttcgtctattccttcattctagccatgttttctcctttcagccatattaatttccatgtggagctgatcctgttctggcgcttctcaagatgcggctccgttagaccggcctgtcggctgcgtttgaaacgctctctacgcagttttgcagtttgcattttgcatttcgcattcggtaattaaaaacccaacgagccgcttggtgactccaacttggctctaacggtaagcgggctgcccaccaggattagctacaggtttgctttctttgcagtcccccaatcgcctatcactactactacaactactatcaccaccagcaccagtactgctccggattttgccccccgggcagctaaaaatttacataatatttgctctagattccatcttgtccccccgggcggctttcacacgcataaaccacaagtgaggccgagatcggaggcatctgctccatctgctggcggcttatcaggcctcataaatatgtttggccatgcctttgggcctgagacgcttgacaatttctgcaaaagcgtctctgtctccgtttttttttcaacttttttgcgcactttttggtgagaaatgggagcggaaattaatgaccggagtgctggaatctttggcatgccactgttggctgtggcatcaggtgcttttgctctggagcgttttgcgaaagtggttggcagattgaagagcggccaaaagataagtagttgatcggagatctcatgtcgaaagtggctatttttatattggccgagacctgtttcgcaaaagttataacgcacggcatacccagtgtcaatgaattaaaactttattacctagacgcgaaaatatcaatttgatgagcggataaacagataaaaaacttgttgctaatacaaacgatagtcgttcgttcattaaaaataataattattcagacacggacataaatgcgtcagtacattaggtaatcaactttgatggcaaagctggctcccaactttgtattgtagtaatggtaagtaaccattaaaatttaaatgcttgattggattgaaataaaaaaaaaacgaatgtgtatataaatatgcatgagaaaagaccattggaaatgagtttaaggcaagtcaaattaaatgagctcaacacaatttaattttaattttagatatacagaaccttacgctttataggttcgtaaaattcccgagttaaactgtctatttgttggcgctttatttaattttagtatgcgaagcagacgttaaaatgccagaaagtgtgtttggcactgtgaatcgtcgatacagttctcgtatatatatgtatgtagtattgaacctcgctttggagtgccttgatttcagtcacatgccgcaggcctttgtctagagttcccataaaattattcagtttcgccttcttagcagtcatgtccacatgcaaaacatgcaaatttgcagcagttgcagttgtttcgctcggttttatgtggccatagccactgctgctgcagttgctgcatcttggcctaatacaattagtcttgtgtaatacgcatgccttatgtgctgcgagcggttagccggaggagtgccgaacccgttagtggtcgagtacatatacagttatcggttgcaccataccaataccataccgccgccgcctccccttctccactttacgcaattcgcgccacacgccacacacatgtgttgcggagtcgccaccgattggatatattgcctttggggagcgttgcgcgaattgattgtggccaaaacggtggccgaaacggcagcaaaagttgaaagccttttaggccgactccctccagcagttggattttgtcagattttgcgttactgctgttgccacatgttgccaaaatggtcagtgcataacggtgcactgcaacaaccaactaagctaattaatgccaaaaacaacagaaactacaaaaacaaacaaaaaacagaaaagcctcaatcctgaaacaatcccaagcccaatcccaatcccccagccaatgcaagtgaagttgtctttgtctcatcgccccgacaatccgattattattcaataaaatgcgccggcgaacaaagagatggccagcacttgatgacaaatgcctgggcggcctggtctgctatccaaaaacaaaaacagaaacaagaacagcaacaaagtaaagaataaagggcgctccgcgtacttgttggccaggccaactaaccaacttcaatgggctgctcccagtttgatcctggactcttggcggagcccttaaagcgagccgcctctattcgatttgctcgttttgttatcgccagcttttaatctgcccattgccgcgaaggtcttacccagatcctctgcttcatcttggccacgtttgccccacagtttaggccgggttcgggttttttcttttctttcttttccaactaagccgaaacaggcaatgcatggaggcattgtttcaaagccgacgaccttaacccctcgtaaccttgctggaatttgctattaagtaagcgaattgctcacaagtgttgtaattgagttggtcaaaagtgcaacataagtttagaagtgtagtagatgtagtgatgataaatgtggtaatagtgaagaagattaataatctcttgaagtttcattattgattttgtttggatccaagacttgcctcctaaaaactgctgacctctttggtcaacttcactatttgatcgccatagatcattaatctttatatagagcttcccatttaaagccagccggattagataaacttgtggtcgaaatttcactgggtcaacaggcacactgggtgccattaatgggttaaagagtgttcggtgtggctgagggacaggacaggttggtgggactcagactcagacttagattcagattgcggttcaggttcaggagcatcaatgtagcagacacgagtctacagccgaagcatcgaggctcgattttattagcttagcaaaaggctttgattgttcttgttcttgccaatgcactgctgctgttatggcctgttgcgcttgtctagacgggcaatttttcacacacacacagttgttgttggccgggccaagacacacagcacaccgcactcaagacacaagacgctggagcacaagacacagacattggggagctggacttgctctaaaattggcatttttcgcacacataaggcaaaaatgtaaagcgaagtcaagtcaggagaccgggccaaagccacatcttcggccaaagtcgaagaccaagtcgaagcggtttatttgccttgtgtggcatcagcttcatcatcatcatcagcaacgtggtcgtcgtggtcatccaatggactccagccttaactctccgtgcccgtgcgcccgctggcataatgtggcgcagcctggacatggtcatccatagacatggagtcccgactcttagctctttggcaatttctttattattacgagcgtttctgtggttgtccttttaggccggctgtcacagatccgctgatcattattgttcctccgcacagtacacatactggactcctccgcctgcccacaatgcaatgtcaatgttttgtcttaatgcgacaatgctcgatcgaatggctggctgtctgtcctgtctcgcatgttatttaaatggcaaaggcgggtttgggggacctgcagcctgccgggtaaacaatttattatatttatatggccagttcatatgttcgttctggccataaattaagcgatcttcgacttaatgtgtcggctgcacaaggtcgcgtgtgcttttttattgtatatacccctaatccagtcaggcagtcagcaattaagcgagttaatcgcagttcgatgatttgtcagctaccccatagagggtggtatatgatgattggaggatgactgcccggttggctaatcgccgggaaggtcagtacctcggtttcatcagtatgtgcactcgagtgcgaagttctccactccagtgatgacatcattcggtggcagttgctcgaaactatagaggtcaagaaaatcatgtgagatcaagcaaatatctgtaatcacttctgactgaatccatctatcttttttgtgaagcccagactgcatcacaccaagtatcttagatattttaaatatgaatataaattaatattcttttagtatttatatattaaataaaccactttcaatgaataccactaattgcttactattgttgctaacaattcaaatctcagctcaaaaaagacaatggaacacactatgtatttttttttttgggtctgagtcagacttttactttccctagtgcagacaaacaaaagtttcgctttagttaagacagccacgcccactcagcagcgcccactaaaaccgcttaccccttatcatccagcgccactgctgtgcaagttggcaagttataatttagctttcagctttggctgccgaagaacgctgaggagctgaaactcggactctcggtctcgcttggtttgtccgtaaattacagcctcgtctgcaccgtttctatatatgtacatatatatatatttatttgtttgtttgtagcccgcgagagagatgttttcgtatcggccttatgtatttttaggctgcatcttaattcccgggaccagttcgcctacacaagtcgtcgattgtcgcccgttttggctgtatttcgcctttaattcttcattttttctcgcgtaatatttttttgcagttaattctcctttctgattgccttttaataagacaaccccagccgattcttgaccagttgagtgtgggctttattatgagtactgcccctttttttcgctttgtttaagtatttttctcgtcgatattatcttgttggctggactgtgctttgttttttatttctttgtaatatcttatttttttttgttttggcgtgtcatgttgccttcccagcacttgtgtttgtgtaggtgtcttgtttggtcttttgttttttcgccgcgctcgcttgatagtttgtttagtcgtttgttgtcttggctgttaaaggcaacttgcaggggcaggcaagttaatgactaatgtgttagggctttcgagggatatatgccttatacaatttagcattaatatatggcaggaagcgtaagaacgagtgagtgaatcatgacagggccgcgctgccaaacttcattaagtcgccgcaagttcgttgcctcagtcattcgtttttttaccaaaaaaaaagctccagcacgcccccgacaaaaccgaagatcgttttattcgaccatcactccaaatggccacaaattgtgtgtgtatgtgcacttcacgaccaaaaacgaggtcactttgtcggtttttcaacaaaatcgaaaagaaaaaataaatacttattgtgtttcattacgcgaatgacatcatggcagcgctatgggagcttctcaagctttttagccttgcactccccgatcttaactctgatatttatatttaaatttttgcgtatagtatatagatagaaaaagtgcttacctttggcctgggctaatccgcagaatagggccgccagccacagagagcgccacatttgcattgagagcagcattttccaaaatttccggatctaattggtcggggtagaaacggaaagacaaacggcatattattacaagcatttcgaacgaaccgaagccgaagcaacggcacatgctccacaagcgggccaacattttatttgttatttgtattcttggcctggcctttttgacgttttcacagacacaattcatatatgtaggtaccataacatatatatgtaccgcatcgcaaacacacacagcgagttattatgaaacaaagccagaagagaatgcccgtcaagtggcttgcggcgaccgctcaacaaatcaaaaaccaatgacaacggcaaataaaaaacgaaacgagccgcgaaccacacacatatcacacaaattcacacaaaactcggagcgggtcttacttgacggctgcaatatggggaaaactcggaactcgagactcgaaaccacaccgaagagcacaccacacgtccaagctgttcgctagtcgccaggcaactgaggctcagctcggctgcaacttcattacctcgggaatcgagagccggcgtatagagatgctgactcagtttcagagcagaagtcgttcttatatggcagagagtgcaaaactatagtgaaagcactcaatgttaaccaattggttaattacccaaaagaaatgtaataagtacgtatgtatataagaagataagtgtgccgttttatccgaattattgcaacataaatctatatgcatttttattatattatgctttcattggtaaaaaaaaaaatccttagaaaatattttaagaattttgaataagatagtgttgaataattatttaacaaacggagttttcaaaagttagctataaactagctagtgaaccaacgctcttaggcattagagcgtggacagtggggaaaaatgctaaggcgccatctagcccctggctgttcacagtgcataaataaagccggcaattacgaaagtgctacattacaatttatggatatacttgaatacatttagataagcagagcacaattaaaatgacccactgtaagtcgctctctcgcacggagcatctctgtcgcacggcgaaaaagagagcgactttagcaagttagcttaaccgagaggctgtaaaatacggtaaaaggatcgctctcactaccgctcttttccgctctctgccggagataacaatcagccggtaagtttgtataatttttttttttgtcccatgacaaaaactgagaaattgtgggagcaaaatcttacaagcaattatgcaatctcgtctccggcttttttgttgcgtttgctgttgttgtttttgttgcactcgctattgttgtcaaaacaaacatttatgtaattgcgctcgctgtcagcacgaactgccggttcgttctcaacggccacagatgagaacagggaagtaatagtttaaaatgagctaaatgcagcagctgttatggatattttccct

SEQ ID NO: 31283 - DNA, 1355 bp, DROSOPHILA
aacagcttggacgtgtggtgtgctcttcggtgtggtttcgagtctcgagttccgagttttccccatattgcagccgtcaaatccggaaattttggaaaatgctgctctcaatgcaaatgtggcgctctctgtggctggcggccctattctgcggattagcccaggccaaaggtaagcacccaggttcccacaaggtgcactgttcggaggatcagatgagggttgacatcggactgccggatgcggagtcaaaggatcagagtgctcctcagatctatttggagggattgaagggatatccggatgaacgatgccagccgcaaatcgatggatccctggccgtttttcggctttcactcagcgatttttacgagtgcggagtaactcgaatggtcaaccagctaacgggcaagaaggtgtattaccataaaatcatcatcgagtcaaccagcggcaaggagatcgtcagcgttaagtgcatcaccaccgccagtcccgcctataatgtgatgatgaatgccaccaccgggtccagttccacgtccacttccagcggcggcatccacggcctggtcaagcgggatgtgctgccggcgggattccaggaacccgaggatctggagatcaccacatcgctgaccaagcgggccccggagccacgactctcaattggcgttagccaggatggtcagaagttcaccagggatttgactgtcaagtcgggcacacctttgacaatggaaatcaatctggatgaggactctgcacctgtttatggtctgggtgtcaactatttggatgtgacggatacgcatacgtcatcggaaacgttgatcttcaagggctgcacagtggatccctatctcttcgagaacttcaacaccattgatggcgacattttgagtgccaagttcaaggccttcaagttccccgactcgtcgtacgtgcaattccgtgccacggtcaacgtgtgtttggacaagtgcctcggcacccagtgctccaacaaccaggtgggcttcggtcgacgcaagcgagagatcagctcagcgaacaaggtctacgagatctcgctggccatgttcctgcaggttcaggatatcgagggtgtcaacaagaatgaggtcctgcagctggaggagaagcttagggagctgaagctggccaaccagcgcttggccaggaatagtcgcggcaactttgccatggagcagacgcccgccagtgctcagcccgcctttgtcgtggacgagcgggagctgggacatctcagtgccggatcgggagccgcatcgaacggcctgtcgctggctctctggacgattctgggggcatggagttggcggctgatgtag

SEQ ID NO: 31284 - protein, 418 aa, DROSOPHILA
MLLSMQMWRSLWLAALFCGLAQAKGKHPGSHKVHCSEDQMRVDIGLPDAESKDQSAPQIYLEGLKGYPDERCQPQIDGSLAVFRLSLSDFYECGVTRMVNQLTGKKVYYHKIIIESTSGKEIVSVKCITTASPAYNVMMNATTGSSSTSTSSGGIHGLVKRDVLPAGFQEPEDLEITTSLTKRAPEPRLSIGVSQDGQKFTRDLTVKSGTPLTMEINLDEDSAPVYGLGVNYLDVTDTHTSSETLIFKGCTVDPYLFENFNTIDGDILSAKFKAFKFPDSSYVQFRATVNVCLDKCLGTQCSNNQVGFGRRKREISSANKVYEISLAMFLQVQDIEGVNKNEVLQLEEKLRELKLANQRLARNSRGNFAMEQTPASAQPAFVVDERELGHLSAGSGAASNGLSLALWTILGAWSWRLM

SEQ ID NO: 31285 - DNA, 2123 bp, DROSOPHILA
gactcttagctctttggcaatttctttattattacgagcgtttctgtggttgtccttttaggccggctgtcacagatccgctgatcattattgttcctccgcacagtacacatactggactcctccgcctgcccacaatgcaatgtcaatgttttgtcttaatgcgacaatgctcgatcgaatggctggctgtctgtcctgtctcgcatgttatttaaatggcaaaggcgggtttgggggacctgcagcctgccgggtaaacaatttattatatttatatggccagttcatatgttcgttctggccataaattaagcgatcttcgacttaatgtgtcggctgcacaaggtcgcgtgtgcttttttattgtatatacccctaatccagtcaggcagtcagcaattaagcgagttaatcgcagttcgatgatttgtcagctaccccatagagggtggtatatgatgattggaggatgactgcccggttggctaatcgccgggaaggtcagtacctcggtttcatcagtatgtgcactcgagtgcgaagttctccactccagtgatgacatcattcggtggcagttgctcgaaactatagaggtcaagaaaatcatgtgagatcaagcaaatatctgtaatcacttctgactgaatccatctatcttttttgtgaagcccagactgcatcacaccaagtatcttagatattttaaatatgaatataaattaatattcttttagtatttatatattaaataaaccactttcaatgaataccactaattgcttactattgttgctaacaattcaaatctcagctcaaaaaagacaatggaacacactatgtatttttttttttgggtctgagtcagacttttactttccctagtgcagacaaacaaaagtttcgctttagttaagacagccacgcccactcagcagcgcccactaaaaccgcttaccccttatcatccagcgccactgctgtgcaagttggcaagttataatttagctttcagctttggctgccgaagaacgctgaggagctgaaactcggactctcggtctcgcttggtttgtccgtaaattacagcctcgtctgcaccgtttctatatatgtacatatatatatatttatttgtttgtttgtagcccgcgagagagatgttttcgtatcggccttatgtatttttaggctgcatcttaattcccgggaccagttcgcctacacaagtcgtcgattgtcgcccgttttggctgtatttcgcctttaattcttcattttttctcgcgtaatatttttttgcagttaattctcctttctgattgccttttaataagacaaccccagccgattcttgaccagttgagtgtgggctttattatgagtactgcccctttttttcgctttgtttaagtatttttctcgtcgatattatcttgttggctggactgtgctttgttttttatttctttgtaatatcttatttttttttgttttggcgtgtcatgttgccttcccagcacttgtgtttgtgtaggtgtcttgtttggtcttttgttttttcgccgcgctcgcttgatagtttgtttagtcgtttgttgtcttggctgttaaaggcaacttgcaggggcaggcaagttaatgactaatgtgttagggctttcgagggatatatgccttatacaatttagcattaatatatggcaggaagcgtaagaacgagtgagtgaatcatgacagggccgcgctgccaaacttcattaagtcgccgcaagttcgttgcctcagtcattcgtttttttaccaaaaaaaaagctccagcacgcccccgacaaaaccgaagatcgttttattcgaccatcactccaaatggccacaaattgtgtgtgtatgtgcacttcacgaccaaaaacgaggtcactttgtcggtttttcaacaaaatcgaaaagaaaaaataaatacttattgtgtttcattacgcgaatgacatcatggcagcgctatgggagcttctcaagctttttagccttgcactccccgatcttaactctgatatttatatttaaatttttgcgtatagtatatagatagaaaaagtgcttacctttggcctgggcta

SEQ ID NO: 31286 - DNA, 123 bp, DROSOPHILA
atgtacatatatagaaacggtgcagacgaggctgtaatttacggacaaaccaagcgagaccgagagtccgagtttcagctcctcagcgttcttcggcagccaaagctgaaagctaaattataa

SEQ ID NO: 31287 - protein, 40 aa, DROSOPHILA
MYIYRNGADEAVIYGQTKRDRESEFQLLSVLRQPKLKAKL

SEQ ID NO: 31288 - DNA, 2920 bp, DROSOPHILA
attaataggtgtagttgggaaaagcctgaaactgcagtgatagttttgatatcctacgcaggtaactttctcgaagtacttagtaccagaaacgtgtactttacataaacataaaaaataacactttgctgataccaggcacttgggaaaatcatgtctagatttgtcaacattttaaatggcttaccaagagatgtaagctccttctccgtcgacggtcaaatcgaaaagaacggactgctgaattccattgaactcgaaatctttgtgacagtgctagaagatgacctttgaaatcaagtgggaatgggccgcactcaaactcacatatgcaataagtgtgtttctttgtgtgtgcgaaagcgctcaatttcaataatacacacatcacataacctcactttaaagagtcaatgtccttattgccttaaaatataactgaaaatctgtataatgagtgcagtctcacaagggaaattaaaacgaatcttttaaaaaacatctttaaatgtatattattagttactttttgaggaagatctagcaaaaattcggttcttttttacactaataccattcctttgatttatactacgcaatcaagtatgtatgtatgggagtgtgtaagcacacagcgattctaagaaatcactcaaaaaacacatgcatacatacataagtttacacatgtttagctaaaaacttcgtactatttatcgtattctttatagagataacttgaaatgtatgtatatacattcaattttaaaagattttttgtcgccaatacaaacaattgctcgttaatattatgagcttattgcaatgatacgaatttaaataaattgtgaatgtcaatgacaaatgcatgtgtacatacatatgtatgtacattaatgaatatgcagattagtttgtatgaatttccattttaagaccccccactcaaatcattaagctcatagcgtagtattttatttatttattgcatttaagtttgtcagaagtcgttcaatgcttcgcctagtttaataagttctgtcttaactttctcgtactgcgacaattgctgctccatttggacagtcaatttcaggcgcttgtcatggacatgttggagtcgctcgcgattggcattgctcttggccatagcaatctgtaattgaaatataaacaaatgttagttatactgatagaataacaaacctagatatgtacatatgtatatgcaaatgataaactatagaaatgaaattattaaactaaaaatcttctcgaaggttctttaactttagggatcttttggtacactcaaaacagtgcagtaatagtacaaagattaactaatatccaaatcgcacctcaagttcttttgcctgagaggccagttgctgctccatgaattccacgctgaagtccaaaaatcgcatgcgcagcggccgagtgagtttatcgggtgctgcagtgttcacgttcctatagattacaatagagtagagtagagttagcaatgcaatcgaatcgtattatgttttatgctgcacatgtaccatttcttgccctcgtaggcagcgaaatgttccttgagcatttccaaagtttgcaacttatttggcacatcgttgctggcgaaaaagcatcggttcatttcgagcacaaccttggtcatcagactgcgagtgcgatctacgatgctttcggtgtccagagcggattgctcgtgctcctggtaaatggcatcccacgcttgcagatctgcgcagctagatattaacgatttttaatattcgttatcatgttaactatgcctgctgcttacctcaagtcggcaaagatttgtttaatggcttcctcgtaggcctgtttcacctttggtcccacaccctcgtggcgtttaaatgcggcttccgaatcctccattgaaataatttgttagtaaattcaaattgtaaacaaaacaaaacaatgccacattggtgtgaccagttgcaagtttctgcaaaacaccaggccgatagaaattatagagtatggtgacaaccctgttattggtttttttttgaggtatttccactagctcttattactcataagtcccttgtaacataagtgatgttgaaaatataaatatatttcattcagcggtatggtgagaatatgtgccttttacattacaatgtcaaacaaaatgaataaataccaccgaacagtatttttaagaataagtgttaaaccaccgttttcaaccatcatatatcgatagtccaggtatcgatgacagggtgatacgccattttccaattcctctctaacttttgtgcattttaactcagctctagtgtgtttgtgctatacatattttgaataatattttaccagccagtgtttagtggcggacaaaatcgtgttgaataccaattgaaagttaagtgattaagttcggtggcatcaaagtcttcgtagctgaaggaaaacaaaggcatcccgataggtgagtttttcttctacagtttttttttatcttttgcctggggaaacgcgaatgaaaagcgaatttgcgaggcaaataaaccaggctaaaagcaatgtgtgtgtgtgttgtgtggtcttgtgttttcctgaatacatttctaagaaaaagattcgccaatacatgccgattttttatagcaatatagtgtgatttttaactacacccccaaaatcgttcttttggcttcggcgcttgagttttacagtttttcttcctttcattttattacaaccaccagggcacacagaaatattcctagctctctctcgctctgccgccctgttctctctgcctctctcgcttgctcgcacgcatgccggcttttacttaaagtacagagtcgcatagttgttgtttttataattggcccatcgctttagtcgcttg

SEQ ID NO: 31289 - DNA, 585 bp, DROSOPHILA
atggaggattcggaagccgcatttaaacgccacgagggtgtgggaccaaaggtgaaacaggcctacgaggaagccattaaacaaatctttgccgacttgagctgcgcagatctgcaagcgtgggatgccatttaccaggagcacgagcaatccgctctggacaccgaaagcatcgtagatcgcactcgcagtctgatgaccaaggttgtgctcgaaatgaaccgatgctttttcgccagcaacgatgtgccaaataagttgcaaactttggaaatgctcaaggaacatttcgctgcctacgagggcaagaaatggaacgtgaacactgcagcacccgataaactcactcggccgctgcgcatgcgatttttggacttcagcgtggaattcatggagcagcaactggcctctcaggcaaaagaacttgagattgctatggccaagagcaatgccaatcgcgagcgactccaacatgtccatgacaagcgcctgaaattgactgtccaaatggagcagcaattgtcgcagtacgagaaagttaagacagaacttattaaactaggcgaagcattgaacgacttctga

SEQ ID NO: 31290 - protein, 194 aa, DROSOPHILA
MEDSEAAFKRHEGVGPKVKQAYEEAIKQIFADLSCADLQAWDAIYQEHEQSALDTESIVDRTRSLMTKVVLEMNRCFFASNDVPNKLQTLEMLKEHFAAYEGKKWNVNTAAPDKLTRPLRMRFLDFSVEFMEQQLASQAKELEIAMAKSNANRERLQHVHDKRLKLTVQMEQQLSQYEKVKTELIKLGEALNDF

SEQ ID NO: 31291 - DNA, 4336 bp, DROSOPHILA
tcctgccgccaactctttccattgcagcgtacacgagaatggcaggcgaaacatttaagtgggcaaggacttgaacagctacaacagcaatagcaacaccattcgacaaaacaacaaattcaacaactacaataaccatcgagaattgctgcgtttcacgtttaaatttaaatgtactaaaaggaagaactggcgaacgcccagggcaagagagcatcctccaaatacgaaagaaatttatgtatttcttcactaaatttaagtgaatattatacgccccaaatggataagaaactggaaccgagttgccccaaccatcagcgcctgcatccccccattcatcctcgtcgtcaccagtttgcaatttgggggaaagtcaacattaaaactctgtatgataagaagaatgaacaaataaagtaaacataaacttgatatacccagtcgatgtttgcattgggtatatgtttgtataatagggttttattcacattgtaaacgcttaaacaaaaacattaaacattttaaatcaaagtcatatgtataagataaagttcatgcataaggggcaacgttgcgtttatgtaataaattattaagcattattcggtagatgtacaaattaattaagagctgatttcagggttggtattactaggcatctcttaggtctaatgattagagtctagagtatttacaagttcagcgtgctgccgcctttgaatcaaatgattgagcaaaattatagttcatcatcagtgctcgtcgccatgatcagattatgttgtgattggcattggccattggccagattgctggatcgccgggttttccattagcacctgtattatggattttgtgatgtggtaaacgtttgttaggtttccacttaagtgtagactataattaatattgcatttcgtttgtgtttgcgtagagtgcctcctgtcccacatgtccagaaaaccatgccatccatgccagcgttcggtctagcgacttaattccgcttggacgagttgattaaatatttacaacagtgcgtcaacaaatgcttctcgccggacgaggatgaggagttgttattgttgtggtgatgatggtgctgtggtccgcccaattcacgcgtgtatatatccagaccgtactgaccctcctcggggaaactgcgggtatggtagtagaagaagggaaacatggcgggttgattggaatgaggagctattaaattttccatttccctgtgcactcacttaatgatgaacgtgacaatgtcgtccagcgtgctgtgagtcacatacttggccagcttcttctcctcgatgccattcttatgcagcgtggccataaaatctgtcagcggacgcgacatgcgaaattgcaggtccaggctgcgtccggcgaagataagaggatcctgcaagcaaacaaggcactcgaatcaaatcacccggcgcaataaccaatcaaaacccacctgatgcgtgatgggtatgagtccaaataggcgggtggccttcgtcggaccccactcgccactggcgcaatccggcagtggcaccattaccgtctgcagctcctcgcagcaaatctgaaagtaatggagcacgttgataaccaatcggaagtgtactatacatttatttttaggtgattccattccaattttatagtttaaagaagacttaagattctgctggacaggttactagtacgcaccttaaacttgcacaccgacttgaacttcatgggctcgccggttaggtactcctgcggcgtgacagcattggcaaaaatgtccagcaggaaggcaccggagcatggggcatgcacccggaaggcaacgatgtttccaatcaccgactgcatcacgaatcgcttcagagagacgccatcataggagagctcctcgtcgctatcatagaacttcagattgtagtggaagatcaagcagctctgcatgtccgtgggcatggcaatgcgcacggtggctgctcctgtgtcatcagtgaacaccacagcaccgtagccttcgtccgcaaaatgtaggccgtaccggaagaatagcgaacggacgaagggcaggttctcgaactcgcgcagggttatgggacgctttagcagctgccattcctcctgcagcggatagaactcgtatatgaactcccgaggatccgtgagaaagtagtgatcgtcgtattcgtaactgcaaagaaattgacatttaatattcgatttaaccacaaaatgatacagtttatctaccgcagactgtcgtttttgccgcgaccctgtttgggcgcctccttagcgttgaccaggtgacgtgcaccccagttgcactgaacgaagcgccaggcgccggccacatagaccgcattccacgagttgcggaatcgagagtcctggaacttgacaccgggctggtagccggcgcttttcgaatatcccttgatgacgacacagtggagaccagcgtagctgcacagtcgcttgaacaggacgtggtagctctcggtgccgtacttgatgccacgcaacaaacccatgggcgtgtcgccacgcaaatcgtcatcgaagtgcatggcgttgaggttcttcaccgtgatccagcggaaaatcgtgcgggctttttcaatatccgttgtgcagcgtccaaccagctggcgtaccaggtctgtgaaagtcttttggtcctcctgggccaccgagatggcgatgcgatcgacgtcctcgaactcaatgggatcggtgtagatctgaaatttgctaaccgctggcggagctggaatcggagcattcagcggatactcgacgggcacggcgccctcgctgaactcatcgtccaggaagatgctctcgctttgcatgtactccgatcggcgggcgctgattagctccagcatctcgctggactggcgatccaccagggcggcggtctcgtagcgctcgtgctccagcatcttgcgggtgatgctctccttcttcttgctgcgtcgcagggtcatgttcttctcgaggtcctccttctgttgctcgtggcgcatcgtcaggatgttggcctcgtcccggctgcgacgtgaggtggccagctccttttcgaacttgtgggttagacgctgcaactcgcgctcccactcatcttggaactcgtcctggatcttgcgatcctcctcggcgcgcttgctggcgaactttcggtataggtcatcctcctccttgcgatgcttcatctccagatgagcctgctcctcgcgagcctgttagatcgtagaaaacattgagagttaaaagatgcttttccagagaaagctgcagtttcgttgattgcattgctagcgattcgttgtttttgcaatgcttggcttgttaacttggctaattataatgccacgcctgagctgccacaggcccggctcaatgtccgacattaggcccccaactccgactgcagttgcatcttttgcggcccagccacctccccatttaccctcccacccactcgatgcactacgcattgcgtgcatctattgataattgcagctctgtgcatcgataattgcatagtggttcgaccaacgcgcagtttacccaagcatcaagtccctgatatgtacatcttcgctgggttccttgaccagtgcaaaaaataggtcatgatgtctagcatttccgggatattccgcaaatagattttagttgattgaatttacttgagaaaatacttcacaactcctttaataaatgttcttaaaagttacaagcgtagctgcaaatcttaaatgatttttacgagctgaaaattgaaaacattctaatgatttactaccgtaactaaagttatctaattaacaacttactgtgctgctgctattttcttagccagtcctactactgttttaaataattgcactaatagaaggtttggtctacccaccaatggtctactataatctaagtcatatatgtacatacattccattcccaatgctagcacttttaatcaccgatctgcaagctgcactcgtattaattttcccttgcttttgaccaaatctttttgttgttttgttgtttcagagttatgacttccgcataggaatatgtatcactcgcaaagcatttagcgccatgcaacccaacaacagtgtgtaattaaatccgaaatttcaatgtcaagttcaaacaataactataaaacaaaggcttaaataaaagtaataataaagtaaaacaaaaaaaataattgaaacacctgagactaaacggttcaaaggcccagtgacaatggtcaaatgcgatgtagcccggaattgcgtgagccggtttgagccga

SEQ ID NO: 31292 - DNA, 1983 bp, DROSOPHILA
atgtcggacattgagccgggcctgtggcagctcaggcgtggcattataattagccaagctcgcgaggagcaggctcatctggagatgaagcatcgcaaggaggaggatgacctataccgaaagttcgccagcaagcgcgccgaggaggatcgcaagatccaggacgagttccaagatgagtgggagcgcgagttgcagcgtctaacccacaagttcgaaaaggagctggccacctcacgtcgcagccgggacgaggccaacatcctgacgatgcgccacgagcaacagaaggaggacctcgagaagaacatgaccctgcgacgcagcaagaagaaggagagcatcacccgcaagatgctggagcacgagcgctacgagaccgccgccctggtggatcgccagtccagcgagatgctggagctaatcagcgcccgccgatcggagtacatgcaaagcgagagcatcttcctggacgatgagttcagcgagggcgccgtgcccgtcgagtatccgctgaatgctccgattccagctccgccagcggttagcaaatttcagatctacaccgatcccattgagttcgaggacgtcgatcgcatcgccatctcggtggcccaggaggaccaaaagactttcacagacctggtacgccagctggttggacgctgcacaacggatattgaaaaagcccgcacgattttccgctggatcacggtgaagaacctcaacgccatgcacttcgatgacgatttgcgtggcgacacgcccatgggtttgttgcgtggcatcaagtacggcaccgagagctaccacgtcctgttcaagcgactgtgcagctacgctggtctccactgtgtcgtcatcaagggatattcgaaaagcgccggctaccagcccggtgtcaagttccaggactctcgattccgcaactcgtggaatgcggtctatgtggccggcgcctggcgcttcgttcagtgcaactggggtgcacgtcacctggtcaacgctaaggaggcgcccaaacagggtcgcggcaaaaacgacagtctgcgttacgaatacgacgatcactactttctcacggatcctcgggagttcatatacgagttctatccgctgcaggaggaatggcagctgctaaagcgtcccataaccctgcgcgagttcgagaacctgcccttcgtccgttcgctattcttccggtacggcctacattttgcggacgaaggctacggtgctgtggtgttcactgatgacacaggagcagccaccgtgcgcattgccatgcccacggacatgcagagctgcttgatcttccactacaatctgaagttctatgatagcgacgaggagctctcctatgatggcgtctctctgaagcgattcgtgatgcagtcggtgattggaaacatcgttgccttccgggtgcatgccccatgctccggtgccttcctgctggacatttttgccaatgctgtcacgccgcaggagtacctaaccggcgagcccatgaagttcaagtcggtgtgcaagtttaagatttgctgcgaggagctgcagacggtaatggtgccactgccggattgcgccagtggcgagtggggtccgacgaaggccacccgcctatttggactcatacccatcacgcatcaggatcctcttatcttcgccggacgcagcctggacctgcaatttcgcatgtcgcgtccgctgacagattttatggccacgctgcataagaatggcatcgaggagaagaagctggccaagtatgtgactcacagcacgctggacgacattgtcacgttcatcattaatttccccgaggagggtcagtacggtctggatatatacacgcgtgaattgggcggaccacagcaccatcatcaccacaacaataacaactcctcatcctcgtccggcgagaagcatttgttgacgcactgttgtaaatatttaatcaactcgtccaagcggaattaa

SEQ ID NO: 31293 - protein, 660 aa, DROSOPHILA
MSDIEPGLWQLRRGIIISQAREEQAHLEMKHRKEEDDLYRKFASKRAEEDRKIQDEFQDEWERELQRLTHKFEKELATSRRSRDEANILTMRHEQQKEDLEKNMTLRRSKKKESITRKMLEHERYETAALVDRQSSEMLELISARRSEYMQSESIFLDDEFSEGAVPVEYPLNAPIPAPPAVSKFQIYTDPIEFEDVDRIAISVAQEDQKTFTDLVRQLVGRCTTDIEKARTIFRWITVKNLNAMHFDDDLRGDTPMGLLRGIKYGTESYHVLFKRLCSYAGLHCVVIKGYSKSAGYQPGVKFQDSRFRNSWNAVYVAGAWRFVQCNWGARHLVNAKEAPKQGRGKNDSLRYEYDDHYFLTDPREFIYEFYPLQEEWQLLKRPITLREFENLPFVRSLFFRYGLHFADEGYGAVVFTDDTGAATVRIAMPTDMQSCLIFHYNLKFYDSDEELSYDGVSLKRFVMQSVIGNIVAFRVHAPCSGAFLLDIFANAVTPQEYLTGEPMKFKSVCKFKICCEELQTVMVPLPDCASGEWGPTKATRLFGLIPITHQDPLIFAGRSLDLQFRMSRPLTDFMATLHKNGIEEKKLAKYVTHSTLDDIVTFIINFPEEGQYGLDIYTRELGGPQHHHHHNNNNSSSSSGEKHLLTHCCKYLINSSKRN

SEQ ID NO: 31294 - DNA, 6577 bp, DROSOPHILA
gtggtcgacaggcccgtgacaattgtctgcacgccagcgaagttggggtttggctcctcgggttggacagccagcacgggttctggatatctctcgacgtcctcagttgccttcttgccgaatatattggctagatccttttcgctgtacagagccaagtccttgccgcgtgtgaacttcttatagtggacgcgtgccctgctctgcttcgaccgctcctccagcgacattccactggtgttctccttgagtttcttcttagacggctcctccggttcaatggctttgaagccaaagcccataggtctggcctcctcttcggactccggctctttgtctatgccgccgctatcttccccatttagcgacttaagcagcccattgaagccatcctcgtgtacagtccactgatcatcgcgctgctcgaaacccaatccttctgcgtcatttttaaagcgaatgcgcacaaaatccttttcgccattcagattggcgcccaggccactgcctttcgtccagcccattttctccagcattttggtaccgaagcgattttcatctgttaaagtttaagaatttacgatttaccagtcacatttggagtttaatgctcaccttcatagagagccttgccgcgcggacacaagttgtactttttgcgccgacgtggttcagccagcatagccattttagtctataattatttataatctacttcgttttaaatgtaaattgcggataactaacaaagatacaattcgtaaattgcgaacaacccaacacgtgctatcaaatatcgatagcaagtttaaacaagatatatcgatagcgattgtcgaaacagctgctcagcaggcttagggatgagcgttggctgtgcgctgataacaggtgattaactatcgctcatctctatttgggtgtcattactaagtttgttgttgttgctcttaattagttgttattattttctgacttgcgagcttgcagtcgactgataatggatataagcgcggatgtggatcagataatagcccaggctccggactggaccttcgcgggcgactgtgctctgctggcgctgatgaagcgcatttcccaggttaaattcacatacgtgcatagataacaagccaatttgataaaatttttgcaacagaatctggaagaaaggggcgaaaggaccagccgcaatctgcgagactttgagacgagcgtgaagcaagtggatatagcgctgaacaatgccactaccagcctgcgatccctgcagtttggaaatcagttcgtggagtatcgggtggaggaagtggatgacgcagatttggccatgcccgaagagaagaaaaagaaggtgcaataagcgatggaattttgcaggctgctgtgtttacagatcttaatatgcttgcagccagagctgccgctcaagagttccgaggaattggcaaaggagtttctggaaaacaaccttcgtatgttccgcaaaaactacgagccggtgaccatagaagtgcccgattcggatgatgaggatggccccgtccactcaacgtaagtgactacactacgattccgatccatactaactccactttccacagaaccgtattccgtgctaagaatccctatgatgcgatacctttgccctatattattggtaccaaagagtggcaggaacacaagtatgccgggttgtatgacagtaaggagaatagtgaagatgacagatccgaggaattctcctcaagctcatcggacgaaaaggaacccgagaccaaaaaaatagcaacgccagcgaacaaattagaagaacagcatctgtctgactcctcttccctagcctcgtttgccagggaaccggcaatcgtgtcgccagtcattaaccctgctgttcaggtagcagagcctgtcatcagaacacaaccgcgtccaattataaacagtcaaaggaatccacatgagagggacatgtttgctgccctccggcaatcgccgcctagcgacgacccgccatccacatcgtcatcgcctacatcttcaccagcctttaggaatccatcaagtcgccttccaatcgtatctactgcatcgcttagttccagtagcagtagtcctgcccaacaacctcctcgactcttcgacgaagctgtttcaacccaaactccgaaggaggctgagatcaagccaagccaaacaaagcgcatgccagttaatctttttaacgaagatgagtttaaatccttcatgtccgaaatcgtggacaaagtccagtcaaaaacacccagcagctccgtctccccagcaacgacaatttcaacaaaagaaccacccaaaactaaaaaacccgtggaagaatatccaaagccagggccgccaaagcagattgttgagcagacagttccaaaacgtgtaaacctcttcgacgacagtcctccattgagtccaactccgaggtcagagcctgtttttaataatactaaagcaacgggtgcaataccaaaacggagtccagttgtagtggccaataatgatgaagataactcgctttttggtagttctcctgccatgccaaaggaaaatccttccaaaaagccacctaaaccggtaaccaaatctctattcgatgatgacttggaggacgacgacttcttgagctcctttacgcccaaagcaaagccaccagaacaaaaactgctctcaaaaccaaagccctccttatttgatgatgatgatttggatatcgatgatatatttacgaaaccatctgctcaaccgaaaaagctatctgaaagagtagctggaaagacaagtttgtttgaagacgatgatcaagatgatgtcactgatttgtttggttcgaaaaaggcaaaggtaattccaaaggagacgtcttcgggagtttcgcccaacaaaaatgttgaaacacctgtagcttcaaagaaaagtctctttgatgatattgaagatgaggatttgtttggaaccccaaaggctaagaacttaattagaagtgaaccagataatgatcctgaagcagttggagaagataagaaacaaagtgagattgcagaacagaaatccaagaatatagaaactggagaaaagcagcatcaagtaatagcagaaaatgcatctgtgcctattctcagagattcacctcctcccatggaagttacggaacaaaagtctgatgataaagaatgggaggcggttaaggatgatacatcagcagcaaatattaccaaatctaaagatttgttcagtgaagacttaaccgacgatgagctattctctagtacttcaaataatatggctgagccaaaaagtgctaatgaaactaatgaatttaacaaaccaattgaaaaatatacttcgcaaactgaggaaaatgtatccccagtgaatcctcctacaaaactatctatcaaaccaactgatttgtttaacgaagattttagcgatgatgatacatttttgagtgcatctatgtccaagaatgagccattagttggtacagaaaacgaagatattaaaaaaccatctgaggtgcagctggtgaaagagattaaagcagaagaattgccacagcaactgccagagaacaaaatatatgaaataacagctgtcgttgaaaaggatgaactggtgcccgaaatgttaagtaagcctcaaatagatgaacccgtttcggaaactccaccaccagacgattatcaaagcaacgtagatcccattatatcaatggtggctgatgtcaccaataaaacatcagtggatacacttaccccgcgaaagccggcggatttggctgctgcgcagcaaatcatgcaaaattactcgaatctcttttccgacgaaccgccggatgacagtgaattctttcaaacgcttggcagcagcggtctcagcagcctaagtgcctccaaaatctttgacaacgagcacgacttcttcgaacccgctctgccaaacattcccagtgcgacaaagccatctccagtgacgccgggggatcaaccttctgtgtcgtctgactacggtgccatgtgcttgtttagtgatgtgccacccgaagataacgatcatgcaggcgaagaagtgcagaaggaagctgaacctcagaaggacgaactagcgtcaaccacccgaatacacacaatcttctacgatgatttcagtgagactgcaagggcaggagcagtgcagccagcgcccaaacgcttccctttcgatgacgagccaccgccagctgatgaaactgatcgtagtgaagttaaggagacgcctgaattgcagaaacccacttcgcccgttaagaagctgaaaatgcctaatattaacatcaatgtacatgcccttcttccgggttctggtagcgtgccaaagctgatcaggaaacaagaatcatcgagttccgagagagatgaacctcaagcgacagttcagactgaggctgaggcaccaagttctggacaaaacactgtttcttctgcagacggtgtcctgcagcatgtgaacaaatctcgcgctcgtggacctgccaaaaggcgaccatctaccagaagaggaagaaaggaaaactatgccaaaagcttattggatgctgggcaaaatgaaggcccaacagcttcgactagagatagcccagaagttgaacactctgagcgaagttccattaaggcaccctctcctcagtatgttaaacctgaaaagctgttttcaaccccagcccagcaaattcagccgcagctccaaagaccgccgccatctaacactggtggctcatttctggacagccccgatgaggatgattccttttttaattccgtcccgacaaaaacagttgagggaaagcagggtactgatccgccgaagtcatatcgctcgtttttggacagccctgatgcagatgataagcttttcagtgatcttgaaaataacaaggcgggtatcaatgtagttccagtagaaaagaagccgccaaagatggcaaactcatttttggccagcccagatgaagatgatttcctatttgattctgtaaaaacaaatgcaactactaccgcgcaaaaagcatttgcagcagaaatcatgaatgcttttcaaaaagtcacaactgctcctccgaaaccatcgaatgccaaggaggctgctaaacccaagtcacaggctgcgccgaaactgtttgatgatagcgacgacgatgatgatgatctgtttgccagagctcctagtatccaaaccgccagcaagcccgtccaagctaaacagccccccaaaccagcggcgacttctcttttcagcagcgatgatgaggaagccgaagtgcctgtaaagagtgctcctgctaagaagttgccagtgaaaccaagcaaaagtctctttagcgacgacgacgacgatgatgacctgttcggaggaagctccacgtccaaagcagctgctgccaaaaagaccaaacccgcggccaggacagcaagtaaaccacctgccagtaaaaccaccacgcccactgctaccattccatcaaactccggtgataatccattggccgatcttcttgatttcaagtgagaaaacagttacgccttttattacaagtatgtacactttttgatctgtggatggttagactgtcgatcagagtattgttattcgtattcctattaactataataaacaatgaatgtcaatgttcatttgtgttcgattcttagaactagacttgggcaattttcatacagtgcctctcttattgggggggtatgctttttgatatttgtttgttttagaaatatctatttatatttttgagtacgtctgatatttcgtgatatttactattacgattacttttatttgcatataaaattatatccccatggagtctcatatttagtacacttttatttgcaaataggtcgtgttattcagtaaagcaaataaaactgaatgcagacccatttaagctacaaattgactggcgcataaacgcgctatacgattctcgcagtgtaacgttagtctacgaactgaaactgagttagtttgtggctctttggtcgttattccgaggaatctcattctagatcgagcatatcctacaactagtgagcttaacctaaacgctgactgatgatcgattgggatccggtttccagaaccaaaaaaacggactcaaagagccacatcgcggtacttccggtaatcgtcggactcgttgcccagcgacaacttgctgttggccgtgatgtacggattggtgtagttggcatagccaaagcccccgtaatactgcatctgctggctgtgcgtggagccgcgtcgctgcatcggctgggccagcacggtgccggcgaatccgccagtggagctgcaattggatggcctgcggtaaatgccgccagcctgctggtggtgcagctgttgctgctgctgctggtgaagcagcatggccaggtaatactgctgctgctgcgtgtagttctggagtagattgttcccgtaggcggtcagatcattctgcaccttgctgatcccgtcaaggttctccagggatacgcaattccgggac

SEQ ID NO: 31295 - DNA, 4410 bp, DROSOPHILA
atggatataagcgcggatgtggatcagataatagcccaggctccggactggaccttcgcgggcgactgtgctctgctggcgctgatgaagcgcatttcccagaatctggaagaaaggggcgaaaggaccagccgcaatctgcgagactttgagacgagcgtgaagcaagtggatatagcgctgaacaatgccactaccagcctgcgatccctgcagtttggaaatcagttcgtggagtatcgggtggaggaagtggatgacgcagatttggccatgcccgaagagaagaaaaagaagccagagctgccgctcaagagttccgaggaattggcaaaggagtttctggaaaacaaccttcgtatgttccgcaaaaactacgagccggtgaccatagaagtgcccgattcggatgatgaggatggccccgtccactcaacaaccgtattccgtgctaagaatccctatgatgcgatacctttgccctatattattggtaccaaagagtggcaggaacacaagtatgccgggttgtatgacagtaaggagaatagtgaagatgacagatccgaggaattctcctcaagctcatcggacgaaaaggaacccgagaccaaaaaaatagcaacgccagcgaacaaattagaagaacagcatctgtctgactcctcttccctagcctcgtttgccagggaaccggcaatcgtgtcgccagtcattaaccctgctgttcaggtagcagagcctgtcatcagaacacaaccgcgtccaattataaacagtcaaaggaatccacatgagagggacatgtttgctgccctccggcaatcgccgcctagcgacgacccgccatccacatcgtcatcgcctacatcttcaccagcctttaggaatccatcaagtcgccttccaatcgtatctactgcatcgcttagttccagtagcagtagtcctgcccaacaacctcctcgactcttcgacgaagctgtttcaacccaaactccgaaggaggctgagatcaagccaagccaaacaaagcgcatgccagttaatctttttaacgaagatgagtttaaatccttcatgtccgaaatcgtggacaaagtccagtcaaaaacacccagcagctccgtctccccagcaacgacaatttcaacaaaagaaccacccaaaactaaaaaacccgtggaagaatatccaaagccagggccgccaaagcagattgttgagcagacagttccaaaacgtgtaaacctcttcgacgacagtcctccattgagtccaactccgaggtcagagcctgtttttaataatactaaagcaacgggtgcaataccaaaacggagtccagttgtagtggccaataatgatgaagataactcgctttttggtagttctcctgccatgccaaaggaaaatccttccaaaaagccacctaaaccggtaaccaaatctctattcgatgatgacttggaggacgacgacttcttgagctcctttacgcccaaagcaaagccaccagaacaaaaactgctctcaaaaccaaagccctccttatttgatgatgatgatttggatatcgatgatatatttacgaaaccatctgctcaaccgaaaaagctatctgaaagagtagctggaaagacaagtttgtttgaagacgatgatcaagatgatgtcactgatttgtttggttcgaaaaaggcaaaggtaattccaaaggagacgtcttcgggagtttcgcccaacaaaaatgttgaaacacctgtagcttcaaagaaaagtctctttgatgatattgaagatgaggatttgtttggaaccccaaaggctaagaacttaattagaagtgaaccagataatgatcctgaagcagttggagaagataagaaacaaagtgagattgcagaacagaaatccaagaatatagaaactggagaaaagcagcatcaagtaatagcagaaaatgcatctgtgcctattctcagagattcacctcctcccatggaagttacggaacaaaagtctgatgataaagaatgggaggcggttaaggatgatacatcagcagcaaatattaccaaatctaaagatttgttcagtgaagacttaaccgacgatgagctattctctagtacttcaaataatatggctgagccaaaaagtgctaatgaaactaatgaatttaacaaaccaattgaaaaatatacttcgcaaactgaggaaaatgtatccccagtgaatcctcctacaaaactatctatcaaaccaactgatttgtttaacgaagattttagcgatgatgatacatttttgagtgcatctatgtccaagaatgagccattagttggtacagaaaacgaagatattaaaaaaccatctgaggtgcagctggtgaaagagattaaagcagaagaattgccacagcaactgccagagaacaaaatatatgaaataacagctgtcgttgaaaaggatgaactggtgcccgaaatgttaagtaagcctcaaatagatgaacccgtttcggaaactccaccaccagacgattatcaaagcaacgtagatcccattatatcaatggtggctgatgtcaccaataaaacatcagtggatacacttaccccgcgaaagccggcggatttggctgctgcgcagcaaatcatgcaaaattactcgaatctcttttccgacgaaccgccggatgacagtgaattctttcaaacgcttggcagcagcggtctcagcagcctaagtgcctccaaaatctttgacaacgagcacgacttcttcgaacccgctctgccaaacattcccagtgcgacaaagccatctccagtgacgccgggggatcaaccttctgtgtcgtctgactacggtgccatgtgcttgtttagtgatgtgccacccgaagataacgatcatgcaggcgaagaagtgcagaaggaagctgaacctcagaaggacgaactagcgtcaaccacccgaatacacacaatcttctacgatgatttcagtgagactgcaagggcaggagcagtgcagccagcgcccaaacgcttccctttcgatgacgagccaccgccagctgatgaaactgatcgtagtgaagttaaggagacgcctgaattgcagaaacccacttcgcccgttaagaagctgaaaatgcctaatattaacatcaatgtacatgcccttcttccgggttctggtagcgtgccaaagctgatcaggaaacaagaatcatcgagttccgagagagatgaacctcaagcgacagttcagactgaggctgaggcaccaagttctggacaaaacactgtttcttctgcagacggtgtcctgcagcatgtgaacaaatctcgcgctcgtggacctgccaaaaggcgaccatctaccagaagaggaagaaaggaaaactatgccaaaagcttattggatgctgggcaaaatgaaggcccaacagcttcgactagagatagcccagaagttgaacactctgagcgaagttccattaaggcaccctctcctcagtatgttaaacctgaaaagctgttttcaaccccagcccagcaaattcagccgcagctccaaagaccgccgccatctaacactggtggctcatttctggacagccccgatgaggatgattccttttttaattccgtcccgacaaaaacagttgagggaaagcagggtactgatccgccgaagtcatatcgctcgtttttggacagccctgatgcagatgataagcttttcagtgatcttgaaaataacaaggcgggtatcaatgtagttccagtagaaaagaagccgccaaagatggcaaactcatttttggccagcccagatgaagatgatttcctatttgattctgtaaaaacaaatgcaactactaccgcgcaaaaagcatttgcagcagaaatcatgaatgcttttcaaaaagtcacaactgctcctccgaaaccatcgaatgccaaggaggctgctaaacccaagtcacaggctgcgccgaaactgtttgatgatagcgacgacgatgatgatgatctgtttgccagagctcctagtatccaaaccgccagcaagcccgtccaagctaaacagccccccaaaccagcggcgacttctcttttcagcagcgatgatgaggaagccgaagtgcctgtaaagagtgctcctgctaagaagttgccagtgaaaccaagcaaaagtctctttagcgacgacgacgacgatgatgacctgttcggaggaagctccacgtccaaagcagctgctgccaaaaagaccaaacccgcggccaggacagcaagtaaaccacctgccagtaaaaccaccacgcccactgctaccattccatcaaactccggtgataatccattggccgatcttcttgatttcaagtga

SEQ ID NO: 31296 - protein, 1469 aa, DROSOPHILA
MDISADVDQIIAQAPDWTFAGDCALLALMKRISQNLEERGERTSRNLRDFETSVKQVDIALNNATTSLRSLQFGNQFVEYRVEEVDDADLAMPEEKKKKPELPLKSSEELAKEFLENNLRMFRKNYEPVTIEVPDSDDEDGPVHSTTVFRAKNPYDAIPLPYIIGTKEWQEHKYAGLYDSKENSEDDRSEEFSSSSSDEKEPETKKIATPANKLEEQHLSDSSSLASFAREPAIVSPVINPAVQVAEPVIRTQPRPIINSQRNPHERDMFAALRQSPPSDDPPSTSSSPTSSPAFRNPSSRLPIVSTASLSSSSSSPAQQPPRLFDEAVSTQTPKEAEIKPSQTKRMPVNLFNEDEFKSFMSEIVDKVQSKTPSSSVSPATTISTKEPPKTKKPVEEYPKPGPPKQIVEQTVPKRVNLFDDSPPLSPTPRSEPVFNNTKATGAIPKRSPVVVANNDEDNSLFGSSPAMPKENPSKKPPKPVTKSLFDDDLEDDDFLSSFTPKAKPPEQKLLSKPKPSLFDDDDLDIDDIFTKPSAQPKKLSERVAGKTSLFEDDDQDDVTDLFGSKKAKVIPKETSSGVSPNKNVETPVASKKSLFDDIEDEDLFGTPKAKNLIRSEPDNDPEAVGEDKKQSEIAEQKSKNIETGEKQHQVIAENASVPILRDSPPPMEVTEQKSDDKEWEAVKDDTSAANITKSKDLFSEDLTDDELFSSTSNNMAEPKSANETNEFNKPIEKYTSQTEENVSPVNPPTKLSIKPTDLFNEDFSDDDTFLSASMSKNEPLVGTENEDIKKPSEVQLVKEIKAEELPQQLPENKIYEITAVVEKDELVPEMLSKPQIDEPVSETPPPDDYQSNVDPIISMVADVTNKTSVDTLTPRKPADLAAAQQIMQNYSNLFSDEPPDDSEFFQTLGSSGLSSLSASKIFDNEHDFFEPALPNIPSATKPSPVTPGDQPSVSSDYGAMCLFSDVPPEDNDHAGEEVQKEAEPQKDELASTTRIHTIFYDDFSETARAGAVQPAPKRFPFDDEPPPADETDRSEVKETPELQKPTSPVKKLKMPNININVHALLPGSGSVPKLIRKQESSSSERDEPQATVQTEAEAPSSGQNTVSSADGVLQHVNKSRARGPAKRRPSTRRGRKENYAKSLLDAGQNEGPTASTRDSPEVEHSERSSIKAPSPQYVKPEKLFSTPAQQIQPQLQRPPPSNTGGSFLDSPDEDDSFFNSVPTKTVEGKQGTDPPKSYRSFLDSPDADDKLFSDLENNKAGINVVPVEKKPPKMANSFLASPDEDDFLFDSVKTNATTTAQKAFAAEIMNAFQKVTTAPPKPSNAKEAAKPKSQAAPKLFDDSDDDDDDLFARAPSIQTASKPVQAKQPPKPAATSLFSSDDEEAEVPVKSAPAKKLPVKPSKSLFSDDDDDDDLFGGSSTSKAAAAKKTKPAARTASKPPASKTTTPTATIPSNSGDNPLADLLDFK

SEQ ID NO: 31297 - DNA, 3846 bp, DROSOPHILA
ctagcccacttaacatttaacagagcatccaccttgggacagatgcttttctcatcgccttccagcgcgtccttaatgtcaattagctccacggagagagcttttcccgagcacataatgatgttctcgttggtgggcaaaaacattccacaccacatggggcagtggtaggtgatggttagcggtggcttctctggcgcattgcagttccacaggcacacctttccctcgatatgaaaggtgagcagcaagtgcttctgggtatgactccatctcatcgaggtaatcgacgccttctctgtgtttgccgtaaatgtgtgaagcgttttccaattgcgctccgtgggctgaaactccatcacgtacacggacctatcgttgcccgacactgcaaacttattgctgtccagcgggcaccaggcgatatcggtcacataacgagcaaacaaagcggattggcggataaatggagaccacgacttctccattcccgaatcgcgctcatggatctgcagcagtccatcatcggtgccaacaaaaaggaaagaatcgcggatgctgaggtaactgggtcgagaaatgcagttcacaattgtgggctctgtaagaaaataataatggcatattttaaattaactttatatgtatctttgactagctttacctttaagtaatacatacatccattaacttaaaacacaattaaatctagtcagaatgacgaaaaactctttgttttaagtccattgttgtcttttaggtccgcacctaattgtgcgatcattttaatgatttgtgggaaacaattaattaaaacaagcctaaaagtctcgaataacaaaagctcgatggcatgagtaatttgtgctacttgaagaaaatgaaatcgattaaactgtagccaagggcaacaaatatcacacgtatcaaaaacttagcaagcaaaccacattacacatttcctttcatcgaaataggttaaattgttctgtttaccaaaatgccgcgacacaaaactctagtgagcattggtcatcgtattatgaagcgcttcaaacagttggatctcagggtcgacaaggagtttgtcatctacatggttcatttgctggcaagagatcggcgcaaaggtctcctgaagtacgacctcaataagccaaccgcctgtgccattgagggtttcgtgaatacaattgtggatagctatgtcaattcgaaagattgcactatggccaacatgaagatggcttgggtaatgaaaaagggagtaaccatagaccttgaatacgtcaagaagaagtacgaggaaaagttccaaaccgaactgcagctgctaatcaaggatatccttcagtatcccgagacttgcagtaaagtgcagttggaccagctcttcgcaaagatgcaggtcttcatagtggcctgctacagtctgggctcgcccaagaatcatgttctgcttaagctgactgcccaggctctcaacagcgtcatcggtcgaagtgacctacagaattatgtcctgaagaagaagtaccatcggctagagtatcttcaacgcttgtcggcgaccgtgggcggcattgtgatctataacaacgatggccccgatggagatcgggagaatgttagaagcggtatgtgcatatagggcaaaccatttcatatttcatatctgctgtatacttcttagtggtcgatgatctggaaatggcccagaagaacacggaagccgcatttgcagccagtatgggaagggcggtcaagatgcagtccacttgccaggcggcactggatgacctcataaacatagatcataaggacgagaccttgacctaccgcgtgcccctcgaacatttggatcggcttaaccagtttgcggcgacctactttatgctccatcgctgtctgacgactctgaacgaacattaccagaagacagtgtacctaattgaagtggagcataagcgatatcaatgcgtgatctgcaagattgatgataccctatccatgcgcacggctattgattcggagcttatatttgtaagtgatgtattcatttaaaagatgagaatttctccaatttcgtttcccgctttcagccgcactttgtgtacctctctcaggtgtggggcaatctgaacaactacctgaaccacattgttgagttaaacaagctgagggagcaggtggaggcattggtcgtcgacgacttgatgaccctgacaaaggctacgattgccgagctgcaggcgcttcataagcggataaagaagcccaaggtctgcagctttgaggaacgcatggatgccgtgaaggagttgcagaccgatggcaacttttgcaagctcaacaaggcagatataaaggagttttgctctctagccatgaccattaccaacggcctgcttatgccggcccaggtgaccagaaagctgtgctccaatgtggacattacatttggtttccgggacccaagatacgctcgattcgcggagctgcgatttgagcctttcatagccgcctttagaaaagtggttttcaacaatgcgaacctggctctgctgttcaaattggacgatgcgctaatagagcaggaactgcagaatctggtagttgagccaccaaagcagacagattttgagtgtcaaaccgaaatggtcgtcaccaacgacctaacgccagcaaactggataaacgtaacatggaatgcgtgggattatcatcgggagacaatccacttggccaatatacgtaagaagcagaccaacgacgcgcagaccaacattagttacggaaggcgcaacgcacagaatcaaacctacaactgtcggcaacataagtagagaacggctaagaacatatactcaccgattttcgattttcttaaatcaaagaaacctagaacacgattcacaataaagtatataaagtggtcctgccacacaagcgagtagacttcttttttgtgcggcgtccgtaagtgtgtctttactttcatgcgctccacatccaggatgcccacctgttgttgagttgtatatttaggttcaatatccaataaaatagacgaaatcaaagccataccgttccgtcgaaggtgccaaaggccagttccaagcagtttggactccaagccaggcagtagacgttgctggacacataaacgctgtcgatgggcaggcagctggtggtgagcttcgatatatcgaagaaggccacacggcgatccgaacaacccaaagcgattctaaacgaaaaacagtttagcaacgtttgcgaatggcatattatcttattagcttacttgttcatatcatctggacactcggccatcgctcgcactccaaacgccactgttccgtaaaagtcagccatccggccagttttaggattcatcattccaatctggcgattgtttctgcacaaccatatcatctctttgctggagtcacaggcaaaggacacgatgtcttgcaaatggcagctgtgtgatttatccttgctgatcttgtagcgtagcatcttgcgctcgaactccacggaccaaaagaataactgatggcgactcagggaaacaatgacatggttgttcagccagtagacgttgttaagcttgcctgaagaaaagatcccagttgaatgcttgctttcaatggtttgattctttccacttacccgccgtcttgcttttgctgtagttcttgccagcatgcgctcccgtattggtattccagatcatcatcacctcatcgccgtcaatggacacgagcagagtttccaagtgggtgctgttcacggatgtcaagctgatggtctccgcgctgatggccggcacaacttgga

SEQ ID NO: 31298 - DNA, 1731 bp, DROSOPHILA
atgccgcgacacaaaactctagtgagcattggtcatcgtattatgaagcgcttcaaacagttggatctcagggtcgacaaggagtttgtcatctacatggttcatttgctggcaagagatcggcgcaaaggtctcctgaagtacgacctcaataagccaaccgcctgtgccattgagggtttcgtgaatacaattgtggatagctatgtcaattcgaaagattgcactatggccaacatgaagatggcttgggtaatgaaaaagggagtaaccatagaccttgaatacgtcaagaagaagtacgaggaaaagttccaaaccgaactgcagctgctaatcaaggatatccttcagtatcccgagacttgcagtaaagtgcagttggaccagctcttcgcaaagatgcaggtcttcatagtggcctgctacagtctgggctcgcccaagaatcatgttctgcttaagctgactgcccaggctctcaacagcgtcatcggtcgaagtgacctacagaattatgtcctgaagaagaagtaccatcggctagagtatcttcaacgcttgtcggcgaccgtgggcggcattgtgatctataacaacgatggccccgatggagatcgggagaatgttagaagcgtggtcgatgatctggaaatggcccagaagaacacggaagccgcatttgcagccagtatgggaagggcggtcaagatgcagtccacttgccaggcggcactggatgacctcataaacatagatcataaggacgagaccttgacctaccgcgtgcccctcgaacatttggatcggcttaaccagtttgcggcgacctactttatgctccatcgctgtctgacgactctgaacgaacattaccagaagacagtgtacctaattgaagtggagcataagcgatatcaatgcgtgatctgcaagattgatgataccctatccatgcgcacggctattgattcggagcttatatttccgcactttgtgtacctctctcaggtgtggggcaatctgaacaactacctgaaccacattgttgagttaaacaagctgagggagcaggtggaggcattggtcgtcgacgacttgatgaccctgacaaaggctacgattgccgagctgcaggcgcttcataagcggataaagaagcccaaggtctgcagctttgaggaacgcatggatgccgtgaaggagttgcagaccgatggcaacttttgcaagctcaacaaggcagatataaaggagttttgctctctagccatgaccattaccaacggcctgcttatgccggcccaggtgaccagaaagctgtgctccaatgtggacattacatttggtttccgggacccaagatacgctcgattcgcggagctgcgatttgagcctttcatagccgcctttagaaaagtggttttcaacaatgcgaacctggctctgctgttcaaattggacgatgcgctaatagagcaggaactgcagaatctggtagttgagccaccaaagcagacagattttgagtgtcaaaccgaaatggtcgtcaccaacgacctaacgccagcaaactggataaacgtaacatggaatgcgtgggattatcatcgggagacaatccacttggccaatatacgtaagaagcagaccaacgacgcgcagaccaacattagttacggaaggcgcaacgcacagaatcaaacctacaactgtcggcaacataagtag

SEQ ID NO: 31299 - protein, 576 aa, DROSOPHILA
MPRHKTLVSIGHRIMKRFKQLDLRVDKEFVIYMVHLLARDRRKGLLKYDLNKPTACAIEGFVNTIVDSYVNSKDCTMANMKMAWVMKKGVTIDLEYVKKKYEEKFQTELQLLIKDILQYPETCSKVQLDQLFAKMQVFIVACYSLGSPKNHVLLKLTAQALNSVIGRSDLQNYVLKKKYHRLEYLQRLSATVGGIVIYNNDGPDGDRENVRSVVDDLEMAQKNTEAAFAASMGRAVKMQSTCQAALDDLINIDHKDETLTYRVPLEHLDRLNQFAATYFMLHRCLTTLNEHYQKTVYLIEVEHKRYQCVICKIDDTLSMRTAIDSELIFPHFVYLSQVWGNLNNYLNHIVELNKLREQVEALVVDDLMTLTKATIAELQALHKRIKKPKVCSFEERMDAVKELQTDGNFCKLNKADIKEFCSLAMTITNGLLMPAQVTRKLCSNVDITFGFRDPRYARFAELRFEPFIAAFRKVVFNNANLALLFKLDDALIEQELQNLVVEPPKQTDFECQTEMVVTNDLTPANWINVTWNAWDYHRETIHLANIRKKQTNDAQTNISYGRRNAQNQTYNCRQHK

SEQ ID NO: 31300 - DNA, 2679 bp, DROSOPHILA
ggccaaaggaaaatccctaaaataataaactagaatttgtataaaaatattgatttgtattgtgaatcgtatttgaactggttagtgtatgctattgacctctactgtaactaattccccaatcgaaaaccccttgcgtctcatccagagaactagtgttaacttagtgttacgcctcctttatgttagcaatgaaactcgtaagtcatggatggccctttagaattacggctttaataatttattaacaaattcaaagcacacaataggaaagaaaaacataacatcaagtaaataaaagtgaaatgagcaatgagaaaccaactgccaattggaattggattggggtttcctaaggtcagttgggcaatttttcaggtttctatttttgggcaggcctacgacggccaaaaggccgcataatgctaagtgggctattaaccccacaaccatgacgtcatgtatggcacgaatatccatatgcgcggtggagagaataagttaatttcccattcaaatgagctcatagctggccacatcccacgccatcccacgtcatggtcaatggggtcccgggggagcacaactccacgggcgtatgcatatggggtactctgcgtggctccttatcaatcattgctgaatttatcgacatgtacggaatttttaatgcttatccagaaatcaaagttgacagggaaaaaagctggacggcgaaagcccccatcctccattgctccgttgctgtttcgttttctgttgtggccatccgctgatatggcgacggtccctcggcagcgtcgctccgactttcaagctggctggctagttcggtcagttgttccgcgccagccgtcgggcgacaacaatgaccactcgacgccgccaacgcgacagcatttatcgattttcgccagccccagtggaggagcgctaggagtagcagtcaagccaaaatccagtttagcagacccactgggtcggattaaacggccttcacatgagcatgctaggatttgtttacctggttctcatcctgggctggatactgatcgttctgttcctgaagtgcaaaaagtccttggccgctccgtttcggtttggcgagaactacaccgatgccatcgccgatacgggtagggtgcttcatttacctgatgctaaatactatatagcatgcaaatcatattagtggtatcggattaaacgaaataattgagattcataactcattacgctatcagtcagctaagattcttatcaaatagctcaaatgactaatatgttgtttgtttgtttgtttgttagaacgtcgcccatcggttcacgttatccagttgcagcacgatgatgtggagcgcgaggatcactatatgaaccactttcaccaaaacacggagaatctgcagcgctactcgcatcgctcgcaacgttccacgttggaggagcgtacgatcgagcggacatatcccacggatgcggtgataaatcctgcctatatgcacgacgaggactacgtgatcaatggtgagtatcaatccttctccgctttttcagccagtaaggaaatatttgtatttaaagcacctcctccgtcctacgaggaagtgatgcggcagccgcaggtgtatccacaggtgcgccacaacaaccacaagatcagcgatgctgacatctagtcaacttaggccgattatcaaattgtaaatatgcgtactttgtcttggtcagctgtgatttacatattggtttggttttttatttcgtttgcacctaaaaaaacataatcaattcgattgattcaacttaggtggcctgcgccctcttgcactgcgaataatagtagttttacataaaaaatgtacaaaatgattttacataggtatgattaatagttatgattatgattaatgattacaaacaaacagtcagtccacgtgtgcagttgttacagattgtaattgtaaataaattaagagtgaagtatactaaataaaatgtgtaaaaaactaaaaaaaaacattccctttgcattcttttggctaagttaagtcgctaaattcgaaacatatcgcacatacagacaccaaagcttctacatatggatatataaatgtgttccaacgtggcttattgtattcacagttctaattacttcagttgcggctcaagccattgactatctacggcagcaccttgcgcacgctgtgcatctgtatgaaggcctccagttgcgtgggtatcagacccttgaagtttagcctgttggtggcaattgagcgtgcggccaggcacttgaggctggtgtgggcattctgatgggcgtgcagccgattggccaagatagctgcaagtcaagtcaagcacttttagtaacggggtcaagtgtggaattcaatggttatgcttacgcagcttgcaggccgtggccgctgtctgccctgccgcgttcactgcatccaaatgggctcctgcctcgacgaacagctccagaatgcgagccatttcggcctggcgatcctgagtggtgttcaccttggtcactaggatgtgtagaggggtgttccgatccgagtccactgcaaccacggaggcgccacagtgtaccagaaccaaagcagtggcatagcagggaaatctgtggtgcgaacgaatgctatagttctatattctgaaaaa

SEQ ID NO: 31301 - DNA, 450 bp, DROSOPHILA
atgagcatgctaggatttgtttacctggttctcatcctgggctggatactgatcgttctgttcctgaagtgcaaaaagtccttggccgctccgtttcggtttggcgagaactacaccgatgccatcgccgatacggaacgtcgcccatcggttcacgttatccagttgcagcacgatgatgtggagcgcgaggatcactatatgaaccactttcaccaaaacacggagaatctgcagcgctactcgcatcgctcgcaacgttccacgttggaggagcgtacgatcgagcggacatatcccacggatgcggtgataaatcctgcctatatgcacgacgaggactacgtgatcaatgcacctcctccgtcctacgaggaagtgatgcggcagccgcaggtgtatccacaggtgcgccacaacaaccacaagatcagcgatgctgacatctag

SEQ ID NO: 31302 - protein, 149 aa, DROSOPHILA
MSMLGFVYLVLILGWILIVLFLKCKKSLAAPFRFGENYTDAIADTERRPSVHVIQLQHDDVEREDHYMNHFHQNTENLQRYSHRSQRSTLEERTIERTYPTDAVINPAYMHDEDYVINAPPPSYEEVMRQPQVYPQVRHNNHKISDADI

SEQ ID NO: 31303 - DNA, 2740 bp, DROSOPHILA
aagtgcttgattagcagagaaaaataaagaaatcagccagctgatgggtgaatcgaggcatgtgggtacatctggaatgactgattgccatgcctcttgtcagtgattagtgtttatgcaaatgagttctaaagacatggccgaggcataaatataaatcaatgatgaggtcgtagcagctcaagttacctggagcaagatgagcagcaagcacaagtggacgaggttgctcctaatatgtctgattgtacttttgaatcacacagcaagtcccttgggtatttaagataaactaaacaaaaacactcaattacctaattagtttttctttagctaaacatgtgacactgagacctttggagttagcagagattcgatcactgcagaactcgatttccaagggacgatcggtatcaagtggcttggctgccattactggtttcgccctgggtttgggaaaagcactcactggagtcttcatctacgatgtcatcactgccaatatcaccgaatcagaggatactgttcaacctgtataatcaaacactggttccttaagggaagtctgtttcaacactggaagctctaattcggatataacctgcctagtttactatacaaataactgaaactaaagaaattaaaatgatttgggataatctatattggtacgaactttatctaacttcggttggcaaacacttttagtttcattgtgccatattacttcttaaaattcattttcgatctgcgttattaaatcgaattggacacgagcccattccaaactgattctgtttagtggatcttttaaaacctgtttggggtcgccgatctgtcaagggtcaaatggttttattttctgcggaattttgggaaatttgcatatgcaaagtccaagaaactttctacggttgcttgtcacagataaaagtgaagcagaacccgtcggctgtttcagttggatttctacgcgattacgcgaaagatcgtcgaaaagatgaagtcgttcgggaacttgacctttggcctactcgtcatccttatagcaagctttactgtcggcctagagggtgagttgttataatataattcatagaagctatttattgaacttgtacttatcaattaacttgtatctgattttcagctcgtcgcctggctttgcgtccattgacaggaagggaactgagaagagctcttagggaatccggattcgatgaggattctgcagctggaagatcagtggcgtcggcgctgtccggactcagtggattcgccctgggcatcacaaagggcattggtggctcactgctgttcgatgtggtcacctcgaatgtgaccattgattacattaccagtctgctgaactccactgcctcatcgtcgacttcaagcagcagtggaactgcacaggagatctgtttcaacagtcgcagtgccgacggtgaggtgattaacggcaggagtaatggcttcaatgacatggatgatggagcagatctcgacggcgagtggagacagactaccagtggcacgggcacgggctctgttactggcactggcactgagacaggaactaccacctcctcgtcttccaacggcctcacctgcattgtcctgagcaaggagggttcccgtcgcaggcgccagttgcgaatccaaccaggaacgttgagatctgtttatcctaaaagccatcggcagaccctgaaaaagtaccgccggcatagggtttaggttttagcccagctccttactttaagctaacttatttattgacttcgattagtttattaaattttaattgttccgcattccatgggcctgccatgggtgggctgccttcattaatggccgaatgacttgggaaaatcttgtattgacacatttatgatttgctgacatgcactctgggtttcgcccgaagaaaaaaaaatattttacagggaaagtggactcgccgacgagaagaaagcattcatatgtgacacacacgcagtcactgaaagaaaatggggcttacttgtttgtatctacaaattggaaatgagtatatcttatatctttagcttagcatcttaaagtgactacttttgttgtatattctcaagtatattttcatttccctcttcttttatgattaaaaatatattttttttctcggtgcaaccatttgcagcgtcacgcatatcgcggtggcagaatggttattaatacaaacagaaagccacgcatccagccgccacacccactccgcgtgcgcctcgtccttttagcccctttccatcgcctttggtccttatgtaaacattgaaatgtcattgacgtcgagggcagccgcctggccacataaatccttcttggccacaatttattaactttaacactggccaatgtcaacggtcctcccctgcccctcccccttcaacgtttgatttggatgcgaaatttatgtggataaaggacctcaaccacggacttccttcagcgaactattaactttgaatcttcttttacggcgagtaaattgtagtgtttatgttattgtctgatccttggtcctggggatgtgtctgtcattgggtaggcaggaattgcattagggtccatttattatttatgtaaatgcgtggcagttcagctctgtcagtggctgaaaaagtgactcagtgattaaagtgtggcgagtgcctggcagcaaactatttctcgaagaaaatcaaactcaaattaccat

SEQ ID NO: 31304 - DNA, 663 bp, DROSOPHILA
atgaagtcgttcgggaacttgacctttggcctactcgtcatccttatagcaagctttactgtcggcctagaggctcgtcgcctggctttgcgtccattgacaggaagggaactgagaagagctcttagggaatccggattcgatgaggattctgcagctggaagatcagtggcgtcggcgctgtccggactcagtggattcgccctgggcatcacaaagggcattggtggctcactgctgttcgatgtggtcacctcgaatgtgaccattgattacattaccagtctgctgaactccactgcctcatcgtcgacttcaagcagcagtggaactgcacaggagatctgtttcaacagtcgcagtgccgacggtgaggtgattaacggcaggagtaatggcttcaatgacatggatgatggagcagatctcgacggcgagtggagacagactaccagtggcacgggcacgggctctgttactggcactggcactgagacaggaactaccacctcctcgtcttccaacggcctcacctgcattgtcctgagcaaggagggttcccgtcgcaggcgccagttgcgaatccaaccaggaacgttgagatctgtttatcctaaaagccatcggcagaccctgaaaaagtaccgccggcatagggtttag

SEQ ID NO: 31305 - protein, 220 aa, DROSOPHILA
MKSFGNLTFGLLVILIASFTVGLEARRLALRPLTGRELRRALRESGFDEDSAAGRSVASALSGLSGFALGITKGIGGSLLFDVVTSNVTIDYITSLLNSTASSSTSSSSGTAQEICFNSRSADGEVINGRSNGFNDMDDGADLDGEWRQTTSGTGTGSVTGTGTETGTTTSSSSNGLTCIVLSKEGSRRRRQLRIQPGTLRSVYPKSHRQTLKKYRRHRV

SEQ ID NO: 31306 - DNA, 2684 bp, DROSOPHILA
ttggagttcgataaactggcgccagcaggagttcgcctcgtatcgcctcattcaattattcgtattccagttggctgcatgcgatctgtgccgatttgtaccgggctttgatgtgcgaaaagtttgtgccagctttttcttctttgattcctttaagacccatctgcctgcgcgttgcgtattgatgaactaagttgaagcgttcccggtctccacaatgacgttatctaacttggctcttaccgcctgctggacacaacttttgcccagctttgacatatttagtgggccaacttttctctggccatcaacttggcgaagtgtgctgatgaccggaaaacattttttgccatcataattagcatcttttcgcttggcggaaaacaaatgggcacataattgctcatatacagcctacgattgatattttgtacagagattatcaaaataaaggaaaaagttgtccttcggttagcttggagttaattggatttttccatctctaaccccatagaactgggaatttctttttttagaaatttctttaagctatgacattgattaaatttaaaagctgatcaatgctcttagcttcagtgggaattcccaaaggacttttctcgccccacgacttactacattttccatccaatacagtctcaaacactcgtgccaccagcaaacaaatgccgaaagaaataaaaagtgaatgtataattgtttgttgaggattttttttgatgccacacatatacgtttgtatgtatgtgtatgcctctcaggcagcgttcatttatttgtttttccgcttcgtttttgagcagaatttttatgcgaattttattacttttcagtttcagttagggcctttgcgtgcccacgaaaagttgcggcattgctggcagctcggggcatttgaatgccccgctaaaaccaacaatacgtcgctacgtatgtgcaaatgaaaatgaaaataaatttccatttggcacaagtttttatgccgccgccgccgccgccgcgttgtttgcaccattccactgacctttatcccctttgtttctccccttttttttcacccgtctttttccaggctacaacgctgcgttggcacccacgccgcccacaacgtcaactacaaccatctcgccctccaatctgctgccctacttcgactttgatgtgccgcgcaacttgaccgtaaccgttggccagaccggctttctccattgccgcgtggaacgactcggcgataaggacgtaagtagaaagtgaaaacttggccataatcggagataccgatgcctattttgaatgctctttttggtaattgggccacttttcatttaaaacacatgtacattttggctaaatcaacaagccaaaccaaacaagtcaaccaagtaatcatacaaagaaaataaagtgacaattatatgttattaaaatattaccaaaaattgtaattatttcagcgtgtttctttttaatttccttcatcggtttaatatttataataataataggagctatataaataagtgctgtcttaaacaaatatttccggcaatgatataattgcaatggttaattaaaaagtttgtggataaatgcgtgcgaatttttcgataatccttaggcattttaaatgtttatgtgtaaaaaattgcagcaagcagcctagtaaataaagctgcatatttagcatgcctaaatatacaattggtaattaaacaaaaaccggcgcaattagataaaaaatatttatcgaaaaaacagaaacacaaattaattagcttttagtgcaaatttgagggccactggcatttggcatatctgataaaaaaggagccgaaaggcagggtagcaaagtcaatggcttaacatatggaaattgtgaaaaataaatgaaaattccgttggggatttgcaggcactcaatcattccgctccgtgattgccaaaccattggggtccggttcctttgctttcgttccgtttcgtattgtttcgttctggtccatagccaaaataaatgattgaaggtcgcagtgtgttgttaaccccttgccaaatagccaaatatggcccatacgcaagcgaggcgggtaggcggagtgcctggcctaatatgtcaacatcagtggcacattaggtgggcggccagtttgcatctcttaggcaggattagccctttttttggccagacgcagaacccggctacatacagtggaccggagtggtgacagatagtccaatcactcaaaattcaggcactatgccggatccttgaaccagtgtgcattagcaaccaggactcggcctgttattaaatgctatgccatggcaaaagggaagggttttggcgtgtggattcagtggggggcctacaccaaattaccgggtgatttcgaggctgcactcgagactgggagaaaaatggccaaacaagacaggcgacaagcgagcaacgtcctgtgggagttgccttccttccttaacgagtggtgcaattccccctgcttcaccatgcaaaatacacgcccacacgcttccaaataggctggcgttgctcgctctagcaaaatgactaatttatgagccatcaatcacgtgactggctcagccatcatccttgtgcgtccgtgttatcagctttaatatacccgctttaaggtggacga

SEQ ID NO: 31307 - DNA, 204 bp, DROSOPHILA
atgccgccgccgccgccgccgcgttgctacaacgctgcgttggcacccacgccgcccacaacgtcaactacaaccatctcgccctccaatctgctgccctacttcgactttgatgtgccgcgcaacttgaccgtaaccgttggccagaccggctttctccattgccgcgtggaacgactcggcgataaggaccaagcagcctag

SEQ ID NO: 31308 - protein, 67 aa, DROSOPHILA
MPPPPPPRCYNAALAPTPPTTSTTTISPSNLLPYFDFDVPRNLTVTVGQTGFLHCRVERLGDKDQAA

SEQ ID NO: 31309 - DNA, 4380 bp, DROSOPHILA
ccaaaaactaaatgaacaataagcgcggctcgtagaaattatcagtcaagcaagaaatgttttctcagcgacgcactcacacacgcgttccaccaaattgtttagcgttgagtcactcagcgtagtacaaattgttgaaaagattcgaagctgtcgctcatgcaaattgcgtcgcccgaccgacgacgactttaatggggcacgtaaagccacacacaacaaaaatcagcgccaccaccaccagcagcacctagtggttcttggcacttttactgcgcgcacaaattaaataaagagcggagaactcgtttgcctgcgtgttttttgtctcatcgcaaaagcgaaatgtgcttgcatgcaattataatttgattgttatttaattgtacaacggtttggccaccagcaccaggtcaagtcagagtcagagttgacggacgtgagaatggtcgatatatgtgtgtggatcactcacttcgtaacgtgccgcgctaacggtacgcgtacgcttcaacttggcgcgcttgcaaacggttaaaagtgaaattcgaaagactgaggaaacgaacttggttcgccgaacgactctgcgaccactgcgtcggctacggcggctgtttggcaactgaagagcacaacagcccgaagttttgtttgccagctctagcgctctagagttttgctctggcctgtgtcgttttgttgatttacatttttctgttggtttcgtttgttttcgctgctgctgctgttgtgcagcaagttcagtcgccctgactcttgttccaacaattaaaacttaattcccaactggcggcagtgatgctgtcggcgggctggggaacccggtcatttgcataatgtgatgccaaagcccagacgaaaatggggcctaacggtcatacttttgtttgggccagcttttacgcctgataactgatggtttctggccgccggaacagctgcttgttctaattaaagcccactggagctgcggtttctttttctcgctttttcgtttattcgaaattcaatttgtgtgtgtttgttttactagctattgtgccattgatatatgtatcttgtattcatcttttcttaagggtaaattaaattaaaataaaagtatagcaaaggcgactcaaatcggtttcaattccacacagtttctggctattcaaattaatggaaaacatttgtaaatgcctaactaatagataatagctttatgattgtatcgggggatttcaaatgagttacactagtacagccagtttcagctaaaagtacgcttacaaaaatgttgatttaaggcttaatgctcggcagtagatccattgtggatcggctcattgggagcacaaccatctagaacgccgcccagctggccaatccgtttgatttggtccataagatcggcaatttccggagtgcagttgcggtattttcttagataggagtatccacgcagcatctcattgtccagaacgcagctgttaagtgattcagaaaggatgcttaaacatttgtctatagtttagttttagtcacttacatcagagctgctgctgcaaagttacccgtcccctccagatgctcgagccaattgttaattacggtcttgatcaggggatccgttgctggcaagcaaatacgcgcatgtacaagggcctccttatagtattcattggccaggaacagtttgatggcttccgattgcattccttgactaaaaagatacgtagctgcgtgcatgatgtagcctttttcctccatctgcttggcataagcgcgacagcagtcctgccaaagtctgcaagaaatatagactaaagacaaaaccgatttacaacaaaaacgtagaaacttacgtaaaagaaacggagggagccagcgaaacatggcgttcggtaagcgtcttgttggctatatgctgctccagctcctcgcgtaatttgaacgtggacatggccaggcaaagtggagctatgtctttggtgtttgagtgcttcagattggtcactgaaatattacatttatcgttagcattttaaatactataagtcagttagtgaaattacactcggttgcaatgagctccttggccatcacttttgagctgaacagcttcgatatgagcaccgacttgtcgatcttggcagagtcttctgtaagaacaatggccagcttctcaagggcacttttgttgagctccttctgggtaaggtaaagacaggtgcggctatgctgttggtaaatatgttattgggtttcagtcgaatcaagagcacatggataacttactgtgaaactgtcaggtgactgctctttacactttgggcattctttggcacttctattattttgctccttgtccaagctaagcgcttccaacatctcttcaacaggagtttcttgcgtacatttatcgttggttggattatcaataactgcagtaactgactcctgaattttcttttgatccttgttagctacgtcaacttcgagcttagccgctgctttgcgttgatcccggcgctgccgtttcttttcagccgctgtgagaactggagcgtatggctgggtcagggatttgctagcccacttaacatttaacagagcatccaccttgggacagatgcttttctcatcgccttccagcgcgtccttaatgtcaattagctccacggagagagcttttcccgagcacataatgatgttctcgttggtgggcaaaaacattccacaccacatggggcagtggtaggtgatggttagcggtggcttctctggcgcattgcagttccacaggcacacctttccctcgatatgaaaggtgagcagcaagtgcttctgggtatgactccatctcatcgaggtaatcgacgccttctctgtgtttgccgtaaatgtgtgaagcgttttccaattgcgctccgtgggctgaaactccatcacgtacacggacctatcgttgcccgacactgcaaacttattgctgtccagcgggcaccaggcgatatcggtcacataacgagcaaacaaagcggattggcggataaatggagaccacgacttctccattcccgaatcgcgctcatggatctgcagcagtccatcatcggtgccaacaaaaaggaaagaatcgcggatgctgaggtaactgggtcgagaaatgcagttcacaattgtgggctctgtaagaaaataataatggcatattttaaattaactttatatgtatctttgactagctttacctttaagtaatacatacatccattaacttaaaacacaattaaatctagtcagaatgacgaaaaactctttgttttaagtccattgttgtcttttaggtccgcacctaattgtgcgatcattttaatgatttgtgggaaacaattaattaaaacaagcctaaaagtctcgaataacaaaagctcgatggcatgagtaatttgtgctacttgaagaaaatgaaatcgattaaactgtagccaagggcaacaaatatcacacgtatcaaaaacttagcaagcaaaccacattacacatttcctttcatcgaaataggttaaattgttctgtttaccaaaatgccgcgacacaaaactctagtgagcattggtcatcgtattatgaagcgcttcaaacagttggatctcagggtcgacaaggagtttgtcatctacatggttcatttgctggcaagagatcggcgcaaaggtctcctgaagtacgacctcaataagccaaccgcctgtgccattgagggtttcgtgaatacaattgtggatagctatgtcaattcgaaagattgcactatggccaacatgaagatggcttgggtaatgaaaaagggagtaaccatagaccttgaatacgtcaagaagaagtacgaggaaaagttccaaaccgaactgcagctgctaatcaaggatatccttcagtatcccgagacttgcagtaaagtgcagttggaccagctcttcgcaaagatgcaggtcttcatagtggcctgctacagtctgggctcgcccaagaatcatgttctgcttaagctgactgcccaggctctcaacagcgtcatcggtcgaagtgacctacagaattatgtcctgaagaagaagtaccatcggctagagtatcttcaacgcttgtcggcgaccgtgggcggcattgtgatctataacaacgatggccccgatggagatcgggagaatgttagaagcggtatgtgcatatagggcaaaccatttcatatttcatatctgctgtatacttcttagtggtcgatgatctggaaatggcccagaagaacacggaagccgcatttgcagccagtatgggaagggcggtcaagatgcagtccacttgcca

SEQ ID NO: 31310 - DNA, 1977 bp, DROSOPHILA
atgatcgcacaattagagcccacaattgtgaactgcatttctcgacccagttacctcagcatccgcgattctttcctttttgttggcaccgatgatggactgctgcagatccatgagcgcgattcgggaatggagaagtcgtggtctccatttatccgccaatccgctttgtttgctcgttatgtgaccgatatcgcctggtgcccgctggacagcaataagtttgcagtgtcgggcaacgataggtccgtgtacgtgatggagtttcagcccacggagcgcaattggaaaacgcttcacacatttacggcaaacacagagaaggcgtcgattacctcgatgagatggagtcatacccagaagcacttgctgctcacctttcatatcgagggaaaggtgtgcctgtggaactgcaatgcgccagagaagccaccgctaaccatcacctaccactgccccatgtggtgtggaatgtttttgcccaccaacgagaacatcattatgtgctcgggaaaagctctctccgtggagctaattgacattaaggacgcgctggaaggcgatgagaaaagcatctgtcccaaggtggatgctctgttaaatgttaagtgggctagcaaatccctgacccagccatacgctccagttctcacagcggctgaaaagaaacggcagcgccgggatcaacgcaaagcagcggctaagctcgaagttgacgtagctaacaaggatcaaaagaaaattcaggagtcagttactgcagttattgataatccaaccaacgataaatgtacgcaagaaactcctgttgaagagatgttggaagcgcttagcttggacaaggagcaaaataatagaagtgccaaagaatgcccaaagtgtaaagagcagtcacctgacagtttcacacatagccgcacctgtctttaccttacccagaaggagctcaacaaaagtgcccttgagaagctggccattgttcttacagaagactctgccaagatcgacaagtcggtgctcatatcgaagctgttcagctcaaaagtgatggccaaggagctcattgcaaccgagttgaccaatctgaagcactcaaacaccaaagacatagctccactttgcctggccatgtccacgttcaaattacgcgaggagctggagcagcatatagccaacaagacgcttaccgaacgccatgtttcgctggctccctccgtttcttttacactttggcaggactgctgtcgcgcttatgccaagcagatggaggaaaaaggctacatcatgcacgcagctacgtatctttttagtcaaggaatgcaatcggaagccatcaaactgttcctggccaatgaatactataaggaggcccttgtacatgcgcgtatttgcttgccagcaacggatcccctgatcaagaccgtaattaacaattggctcgagcatctggaggggacgggtaactttgcagcagcagctctgatctgcgttctggacaatgagatgctgcgtggatactcctatctaagaaaataccgcaactgcactccggaaattgccgatcttatggaccaaatcaaacggattggccagctgggcggcgttctagatggttgtgctcccaatgagccgatccacaatggatctactgccgagcattaagccttaaatcaacatttttgtaagcgtacttttagctgaaactggctgtactagtgtaactcatttgaaatcccccgatacaatcataaagctattatctattagttaggcatttacaaatgttttccattaatttgaatagccagaaactgtgtggaattgaaaccgatttgagtcgcctttgctatacttttattttaatttaatttacccttaagaaaagatgaatacaagatacatatatcaatggcacaatagctagtaaaacaaacacacacaaattgaatttcgaataaacgaaaaagcgagaaaaag

SEQ ID NO: 31311 - protein, 553 aa, DROSOPHILA
MIAQLEPTIVNCISRPSYLSIRDSFLFVGTDDGLLQIHERDSGMEKSWSPFIRQSALFARYVTDIAWCPLDSNKFAVSGNDRSVYVMEFQPTERNWKTLHTFTANTEKASITSMRWSHTQKHLLLTFHIEGKVCLWNCNAPEKPPLTITYHCPMWCGMFLPTNENIIMCSGKALSVELIDIKDALEGDEKSICPKVDALLNVKWASKSLTQPYAPVLTAAEKKRQRRDQRKAAAKLEVDVANKDQKKIQESVTAVIDNPTNDKCTQETPVEEMLEALSLDKEQNNRSAKECPKCKEQSPDSFTHSRTCLYLTQKELNKSALEKLAIVLTEDSAKIDKSVLISKLFSSKVMAKELIATELTNLKHSNTKDIAPLCLAMSTFKLREELEQHIANKTLTERHVSLAPSVSFTLWQDCCRAYAKQMEEKGYIMHAATYLFSQGMQSEAIKLFLANEYYKEALVHARICLPATDPLIKTVINNWLEHLEGTGNFAAAALICVLDNEMLRGYSYLRKYRNCTPEIADLMDQIKRIGQLGGVLDGCAPNEPIHNGSTAEH

SEQ ID NO: 31312 - DNA, 2684 bp, DROSOPHILA
actgaggacgggtaggaaaccaacagaatggactggctgggggacagcggaaattaaaggcactcaaacgtttcgaatcgttgaccagttagcgtgacagaggtggagttgtgctgagctgcattttaaaatatttttattgttgaggatgttgccggtgtgtacgcaatggtcaaaacaacacttgactcgctgtcgctgcacagaaagaaataatggtcaagtataagccactaacaactggttaatatatatatcaaattatgtagccaagtctatctttatcacgtattaaaacagaagttgagataaacatgaaatccatttgtgaacaaatatttcccatttattttcacatatcctgattatttcttttcggtgtgcgatttaagcggcaaagctcggatttatgttgaccacgtacatatgcaaaacgcattctaatggaaccggcgatccagtgtttcctctgcttatgttttggccattgtagtacaaagttacgctctgatttttgagcctccacctgttattgtttgccccggggctttgcacggttccctgaatgatccgatggtgatgccctgcggtgcgtttggccattgttggccagaaacggaaacgccgccttttgtcgagcggaaatgcaaaatgatattgttcgtcgtggtggcggtggcaagaacccagcttgctatgattgactttgaatgggtctcggtttgcagtctgttgcgctgcagctctgtggactatcaattaccacccagttgcagttgcagatgtcattggaaagtggcatcaagatcgcaacgcccaaacaaagtgccaggtcgcccacttggcagccctcagtctccgattcgcgatccctgtgtgggcatcagccaagaaatgcaactccgaccaagcaattatgcaaaagcatttatgtacacgtacacatatgtagtatgtatctttaagatagatgttcaagtagcatatagcacatagctgttcagcccgttaagaatccacgaggtgatcgcactggagacaggctacgcaggttgcaggccacgcggagattgggcagattctgtggattgcggcagaagcgatcccagcccttccagtatttgaagccctcgcgttcctggatcattctggcgcaggcgatgtcgtcactgatgtcgtcattggagaagtctgccaaagatgcgtgattagtgaactttttatgcaaaacaagcacctcaatagagtaattgaattgaaattgattgattgaacagttgaaattgtttcctgctgataatataactagtataatgcaatcttaccttcacatttcatattgcactgccctccttttcgtccttcgctgcaataatccttgctgttgatctgaaagaggccatagttcttgctttcgtttccctttttcgttactttggtggtgtccaagtaactttcgtgctccaccaaacagatccctaacaaaactagctttaattcaatggatttaattttgtagtaatgacttacagttggaaatgaaggtcttgtcgaagttgtagttctccaccaaaactcttgtgagttcgcagcgctgatattttttggactccacttgctcgattcccagctgcagcaggatcagcactggaactatccataaacaaaaagttttcatgttcatcagatctaaaaggagatcagaaggagaaggcaacatcgattgcattagagggtattttgcttagttttacgtgtgatcctcattatttatggacatacttaactcctcacccaaacggttcaaagagctctgttgtgcgtataaattcactttcccatttcgaagctacatataacacctggttttggttcgaatatttaacaatctttgaaagtgtggaattaccaatggacagttggcatttttagtggagatgctttcacagttctgtagcttttcgcagtttcccatggcatgtcttctatttaacaccaaacaatattattcctaataataagcactacaaaattatcattatatacacctttgtttactcccacgcgttcacgaagccttgaatgttttggcatctttatacttctttattgttacttacatatctatatttcatccattctatctagagaaatgtccatcacgtttgtttacgtaaaacatatttataaagttaatagatattgagttatcatgatgagattaacatcactggttgtgttcattttattatttactgttttttattttattttattacctgtttcgtttttaattatcaataatttttctataaattagtgtcgtttttttgttggacttttttgtttctgtagaattgccttacatgttgattacgtgtcattaaaacgtgaaaaattcgtatgtaaataataaagaatatgatttattcgcaacagtttaactagtcacggttatctaataccaaaaacacaaattaacttcaacgcagttttaaagtctccttcataaaggaaacccactgtgcacgtttcacttttcattcagttttccatgcaggcaaatgtagtagtagtaatgagtttaagatatttcctctagcagaacacttttacttcggcaaacagtttgtttactttgtttacctaattaacgcagaacaacagagttctcggcagcagga

SEQ ID NO: 31313 - DNA, 498 bp, DROSOPHILA
atgaacatgaaaactttttgtttatggatagttccagtgctgatcctgctgcagctgggaatcgagcaagtggagtccaaaaaatatcagcgctgcgaactcacaagagttttggtggagaactacaacttcgacaagaccttcatttccaactggatctgtttggtggagcacgaaagttacttggacaccaccaaagtaacgaaaaagggaaacgaaagcaagaactatggcctctttcagatcaacagcaaggattattgcagcgaaggacgaaaaggagggcagtgcaatatgaaatgtgaagacttctccaatgacgacatcagtgacgacatcgcctgcgccagaatgatccaggaacgcgagggcttcaaatactggaagggctgggatcgcttctgccgcaatccacagaatctgcccaatctccgcgtggcctgcaacctgcgtagcctgtctccagtgcgatcacctcgtggattcttaacgggctga

SEQ ID NO: 31314 - protein, 165 aa, DROSOPHILA
MNMKTFCLWIVPVLILLQLGIEQVESKKYQRCELTRVLVENYNFDKTFISNWICLVEHESYLDTTKVTKKGNESKNYGLFQINSKDYCSEGRKGGQCNMKCEDFSNDDISDDIACARMIQEREGFKYWKGWDRFCRNPQNLPNLRVACNLRSLSPVRSPRGFLTG

SEQ ID NO: 31315 - DNA, 3306 bp, DROSOPHILA
gtgcaatcaattttcaattagtcgcatgcaataattccgccaacatttcttgaaaggcaaaaacgctccggattgccgttggtaattattggaaattatatggtgctccgagcatttgtgtataaatgcgcatgtatttatgcggcaaggatcgccgttatgccaatcgaaaatacttgaatacggcaaaggaatgcgccggatggagggcgaaaaaaaatattattcaattacacaccatatccaggacaatggttacgacgagcataaaagcagccgcctgctcataaatacacaaagtctcccttttcagccagccgccaatgtgctggccataaatcgaggtaataacattcgagaatactcataatagtttcgttccccaagcgtttgtgtttcaactatgattctcgaaatgaaatcaatgtataatcccgtcgaaccaaatgaaacacatacagatagcagctcggaaatggccagaatacttcgatgaattgagaagcataatcgatacgacgagccgtatgcctcacccaattagtttggctgactccccaaagagactttcacctggacttggaacggcagtgataaaacagccgacgcccactgaaggaaatttacataaaattcaaataaaataaaacgacaaacgtaataatcattagtcggctctcctgggtgcagtcagtccacacaggaggactctgggcattggacagtggacaccagatgcctgcatctgggtgttttgaagaaggagaagatgctgacttatttatggagtttccatgttaacgagccactcgcaataaattaatttgggctctgataaatattacctatgggtcggccataaattcgagacactttaagatatctaatggtcgccaacagttgtaccagaattatatgtttttcggtttattataaataaatataaataatcatatatataatgtataaatagatatatgagatatatccaaagttccagttagaatccaatccattcctgcagtgcaatcttctgctgctcgatttgctcgcccatcttctgggtcatggcgaactggatgagtatgagcaggtaattgaccagaatcgatgtaaactgttgaaatacaagtaattaagtttttgattaacatattctacatgttacccaccaaaccgataactttgcggctaagcacaacatctaggccactggtgaactgaatcttggcctgaatgcgccacgacattagggattcgaccaggggtcgcagagaagacttttgggggaaccaatcgtccaacttttcgacgaggcgaaggcatctccttgcctcgtatatggtgcgatcgcaatagaatggagctatcagaagcttgtagagcggtgggatcatgactagggccaaatagccgagcattcgatagcaactgccgttctcctcctcattctgttggccaatgcccacggactggccaaacaggatgtacaactcactcgtgctcatggccagatcatgggccatggctgcccacagactgagggcgtaaactcggttaatctcctggatgagatagtgcagctcctggatcatggaaaccacctggcgtatgcgtaactcctgtacgtgcagctgaggaaatcgccagttaagaaattccggctgtagcagttgctgcagcaaacggaaacgtatgcccaacatctcggccagggtcatgtgcacatagcccgtaaagtggggtcctccggtgacaattgtatagcacagagcgaatagaaggaacagagctcgatgaccgctggccacttggacggcggcactgttgatggccatcaggtaaatagtggtcactattcccagcactgctatgttctttctcagcatttttctatagttcagattagctccgaagtcgctcatcagcctggcatccaaggcagccaatctttgatagattcccaagtgccggcgtgcaaatacttgcaaggatatcacagtcaccccaaagaccaatgtggacatcagcagttccaaggctgatatgctcagcactagattatcggcctttgccaggcgttctcttatatcttcctctgccaaaaggacactcagggaaccaaagagacagcaaaatgccgcaatggccaccgacatggaatagattctgcttgcccaactgatcctaaaggtcgatcgacgaatgccgaacccattgcagcccataaggaactgcaggatgcaaatgaatgcggcacaatcgaaaaccgtttccggttcgcggaagaagtacaacacggccatcgcattcagtttttgaagtcgaactaatgactattccatgcgggagagctccagatactatccacaagataaagtacttacaaaaatccaagcagcacaaagtacacttaaaataaagttggcaactattaaaattattcctaataaatgttttcgaagtgcataaaaataagcccttaccaacaaagataataataataataataataataataattttatagggcattaataatttttaataaccaaatttaaaacattttaggtcggatttcctaactttctataccctacatacaaacacttagtatttgttattttcataaatgaattgcagccattaaagcactatagtaattaacttgattacttttgtgattgcttcgaacaagtgcttttccaatttataaataaatttgagctggaaactgaacatttttgttttagccattttgaatattagtagtccgtcgtgtttctaactattaagttctctcaattagttaccacattagttaacacttaacagggaaatacatttctaacatttcaattgagcaataaatgtttcaattgatttgagcttgtggccagttggtagttttatttataaatatgttaaaatgatgcgaactgctggaacacgagtaatttaatttctgcaacatgcgagaaaggagtggaaaagctgtcagattaaatgccataatccatgggattatggccaagctggcaaaagttgttaatgcccggtgacagagctcaacccttcgaactgggccagttcgttgatgtacaggtatactatgtatgtatgtatgtatgtatggcatgatttacagctttcgcaggaaggtgaaattaaccgagatgcgggccagaagatggagctggacattttgttgcctttaattaataaaacttgattaacgaaaattttacgattgtccaaacgatagcaggtggcaatcaatcatcgccttcgccccgcttgcttact

SEQ ID NO: 31316 - DNA, 1251 bp, DROSOPHILA
atggccgtgttgtacttcttccgcgaaccggaaacggttttcgattgtgccgcattcatttgcatcctgcagttccttatgggctgcaatgggttcggcattcgtcgatcgacctttaggatcagttgggcaagcagaatctattccatgtcggtggccattgcggcattttgctgtctctttggttccctgagtgtccttttggcagaggaagatataagagaacgcctggcaaaggccgataatctagtgctgagcatatcagccttggaactgctgatgtccacattggtctttggggtgactgtgatatccttgcaagtatttgcacgccggcacttgggaatctatcaaagattggctgccttggatgccaggctgatgagcgacttcggagctaatctgaactatagaaaaatgctgagaaagaacatagcagtgctgggaatagtgaccactatttacctgatggccatcaacagtgccgccgtccaagtggccagcggtcatcgagctctgttccttctattcgctctgtgctatacaattgtcaccggaggaccccactttacgggctatgtgcacatgaccctggccgagatgttgggcatacgtttccgtttgctgcagcaactgctacagccggaatttcttaactggcgatttcctcagctgcacgtacaggagttacgcatacgccaggtggtttccatgatccaggagctgcactatctcatccaggagattaaccgagtttacgccctcagtctgtgggcagccatggcccatgatctggccatgagcacgagtgagttgtacatcctgtttggccagtccgtgggcattggccaacagaatgaggaggagaacggcagttgctatcgaatgctcggctatttggccctagtcatgatcccaccgctctacaagcttctgatagctccattctattgcgatcgcaccatatacgaggcaaggagatgccttcgcctcgtcgaaaagttggacgattggttcccccaaaagtcttctctgcgacccctggtcgaatccctaatgtcgtggcgcattcaggccaagattcagttcaccagtggcctagatgttgtgcttagccgcaaagttatcggtttgtttacatcgattctggtcaattacctgctcatactcatccagttcgccatgacccagaagatgggcgagcaaatcgagcagcagaagattgcactgcaggaatggattggattctaa

SEQ ID NO: 31317 - protein, 416 aa, DROSOPHILA
MAVLYFFREPETVFDCAAFICILQFLMGCNGFGIRRSTFRISWASRIYSMSVAIAAFCCLFGSLSVLLAEEDIRERLAKADNLVLSISALELLMSTLVFGVTVISLQVFARRHLGIYQRLAALDARLMSDFGANLNYRKMLRKNIAVLGIVTTIYLMAINSAAVQVASGHRALFLLFALCYTIVTGGPHFTGYVHMTLAEMLGIRFRLLQQLLQPEFLNWRFPQLHVQELRIRQVVSMIQELHYLIQEINRVYALSLWAAMAHDLAMSTSELYILFGQSVGIGQQNEEENGSCYRMLGYLALVMIPPLYKLLIAPFYCDRTIYEARRCLRLVEKLDDWFPQKSSLRPLVESLMSWRIQAKIQFTSGLDVVLSRKVIGLFTSILVNYLLILIQFAMTQKMGEQIEQQKIALQEWIGF

SEQ ID NO: 31318 - DNA, 4942 bp, DROSOPHILA
ggcctaatatgtcaacatcagtggcacattaggtgggcggccagtttgcatctcttaggcaggattagccctttttttggccagacgcagaacccggctacatacagtggaccggagtggtgacagatagtccaatcactcaaaattcaggcactatgccggatccttgaaccagtgtgcattagcaaccaggactcggcctgttattaaatgctatgccatggcaaaagggaagggttttggcgtgtggattcagtggggggcctacaccaaattaccgggtgatttcgaggctgcactcgagactgggagaaaaatggccaaacaagacaggcgacaagcgagcaacgtcctgtgggagttgccttccttccttaacgagtggtgcaattccccctgcttcaccatgcaaaatacacgcccacacgcttccaaataggctggcgttgctcgctctagcaaaatgactaatttatgagccatcaatcacgtgactggctcagccatcatccttgtgcgtccgtgttatcagctttaatatacccgctttaaggtggacgaggtgggagcggagtaagcgaaggccggaaaccggaagttgtgcgccttgaaggaagcagccaaagtgctggcacgaaccggagaacaggaaaacaagaacaggagttcctccaacgttccacctagggagaacaacatcatcatcatcatcatcatcatcgtcgtcgtcatcatcatcatggggccactcgctcaattttacccatttatttcgagctctcatcgcgagagagagtaagttaatttaagtcattgaaactacattaaacaaatgacactcaaacaacgaaagcccagcaaaatccttgcccttgagtcttaattacttgcccagacctttgctatcatgctatccgtcctgatcccctcgagacccagtccagtactttagttgctgccatccggttgtcgttgttgctgttgcaactgaatgctgctgctagtcctcgtcctgtttgtcgctctcgcgggcacttgcgtcagcaatcgattccacggtggctgccactactgcggccaggacttcactgtccagccgcgttccccatttgtgggccaacttatcctccgtctcctcctcgctggaggtgatcacgatgaccggcgaggagctgggcactggtgcttcctgctgatcgtggtgggtgtacatggaggctgtcgtcgataccgtctccaattgaaatgaccgcaaaaagcggcttgggttcggaaacggtcgtcggttctccaggataagtttaatgtcacgcgcagattgccaccagctaaacatgttaaatgtagttaacacatgggaacatattgatgaaaataaaagtggtaacttaccgataccatggcgtcagctgggacttgatcagcatgtaaatgttagcaaagtaaacggtgatctgagggcggtaacattagatgcgaataagcagagtaagtggcagtaccgtcatgaacaggaagaacagcatccaggacttggtccacagcttactcagtccccaagagtgggtgtgcagggcgtagtactggatgcctaccagcagggtaccgataattccgaatgccaccaaggtgagcagcgagaacatctggcagtcctcctgcagtgccctgcgactcatggcccttgagtaccacaggcgcagcgactgcaggcaggtgtacctgcaacgaaatctggaaagatgcacggtccgaccaacaacacaaagccgctaacaaagctgtgctggtaattaggaggagttgctgccacagcaagtggagcacgggcacaaagcgaactcagctgattaaaaagatgagagccgcaggcgtctttcatctgctgccgcttcgagtggcagctaccgactactgccatctgctaagtacactcgaaaaaaaaatacacataaaacatggaacatgattatttcgactgtaatgttatgttattttgatctttcttttgatcaattatttaagcagatttggaatggattttccttgaaatttcagacaccatatggtctcttttttcgagtgtacttcttgacttaccgcagagtctgttccgtattgtactggaactggcacagctcgcaggtggtgcagcgcgaggtgctaatccaacactccaggcagtgaacatggacatatgtcagcgagcccttgcacaaacacggcgacacgagtctgcaaacaaatcggaggcggaaaagtcggaagtttcagtggacgggcgtggcagagtgggtggtaaacagcggcaacaatgaaaaatcaggggattaaacagacagccaaccagataatcagggataaagtgctcgatggggaaacttggggtgggtaaatgcggaaaaactggggcggactgctggcgctgtctgcagtgttaattttaattattaaaataaataaatgcattcgctcgcgggctctctactaaatgcattaaatgccgtgcaattaatttcttgcacaatttgcggctgcacgtgcgtaattaaatggaagttacagcagcaccctgaaaaacaatattcaaatgcggggatatattcattgccgattggggattttgttaattatttcaatactttataatttatgaaaaaccccactggtgatggagatctttaaaaaaaaagtttaaaatccaaaaagggcaaaccaaaaattgatttttataaaaattaatatagttaattagctagtaggataggaatatcgttctacagggtaaactaagttctttatcccctcacttatcctgccaactgaaatgctactcactgttcgggattatcggcattgtgacaaatgcgacagacgagcgatcccaccgagggcatcgattcgttggatgcggactcgtaattcaggttattgcactgggtggcaccatcgacgcagtgccgcaacgtggcaatggagtctgtggccgcggctttgggtgggccagcggaataggaggagctggtggcggcggccaggacggcctcggtgctgaccagaggatgacttgggtgcggtagcttctggaactgaacatttggctttaggcccagggagcaggccggtatctgtggatcctccgcatctgctgtcgtaccatccttgtcatagcacttcaccttctgccaggaactgatgcgggtctccacaacgatcatgcccggcggagtgtcatcggcactactggaggacagagcctcatcaatctccatctccagagtggtttccggtttaaggtccgacagactccgtgtcaaattaagcctatggtcaccggcattgctggtgatatctaatggagataatggatggacatgacatcttgacttatatatcctccatacgtaccacatttttcgcactccattctttgatcggttcgacggtttttgaataatggggtaccgaaattaaccaaaaattttaatacatcttttgtataatattgaagtagcttttgctattcttttgttttggatggaataggtaatgtggcgattcagtttgtcaatcgtgtcaaagggtactgcttgtattgcttgttatgttaaataagtaaaagttagagattacttaaattattgaagtcaatattagtccgtttttgttgccattaaattcaatcgattttctgttcgatgaaaattcgtagactggtttttttttttaatgaaagatgcatgccgtaatggaggcagttaagcatgcggtggctggaaaacaaacttgtcccgcagccaagttgcccacattaattgtaattgacagactggaaccgcgctgtcagtgcccacgcaaaaactgccttccacgggcagcccgcaccaagtggtgcttttcctccggcgccttctgttcttcctccgcctccagtgcacccataaactcaaaattgaaagtgtaacagttacggcaaataactttgccggcgcttggcttccattatgcgccactctacgcggaggagcaggattcctcgggtaatttatgcccctgccgttagttcgttagccgtgagttttccgggcgggatgggtgccatttccatatcagctgacactgccgtcgcctctcgcatttcgctctcttcggataccatgtttcgccagagttgaggatacactttttggatcctatgaaatgtattaagcacttaacagcgaaaaatagtttatatctaaaagttggagcttgcataaagataaattctggagtaacaagcatttcggagattccttccgtcgaaacgtaatcaatgttgaattagctggctcaataaacttaagtacaaacttttgtaattgaatcatgatagaaagtgttattatggatctgttctgttcagcattaattgagcaataaatgccagggtattcaagtcttcggtccgcagtggcagccatctgtacttgtttttcgaccatccttgccggaagctggcgtggaatccgcttgttcaacttgacttcacagcattgtccgttcactgttgatttattacgcgccgagtgccgccaacgttttcataaacgcttctccgcggctacatcagcgaacatgagcacaagcaatttactcgtgtaataccagcggcatcgagctggctggaaatgaaaaaagtatattaaacaaagttttaggctttgtgaaaaggcagcgaaccctttttaatggcggcgaccttcgttcgccgaatttggaggccggcgaaaaaagaggaatcaaaatctgtttacaactttgtttacaaaaatgctgccattgaagtcttcatttgtttattgtcatggtggcaagaaaaacaatttaatttggctcaagttcattaagtgcagacccagtaatttgcgaatttagaaattggataccgctttccgcaggg

SEQ ID NO: 31319 - DNA, 1347 bp, DROSOPHILA
atgggtgcactggaggcggaggaagaacagaaggcgccggaggaaaagcaccacttggtgcgggctgcccgtggaaggcagtttttgcatatcaccagcaatgccggtgaccataggcttaatttgacacggagtctgtcggaccttaaaccggaaaccactctggagatggagattgatgaggctctgtcctccagtagtgccgatgacactccgccgggcatgatcgttgtggagacccgcatcagttcctggcagaaggtgaagtgctatgacaaggatggtacgacagcagatgcggaggatccacagataccggcctgctccctgggcctaaagccaaatgttcagttccagaagctaccgcacccaagtcatcctctggtcagcaccgaggccgtcctggccgccgccaccagctcctcctattccgctggcccacccaaagccgcggccacagactccattgccacgttgcggcactgcgtcgatggtgccacccagtgcaataacctgaattacgagtccgcatccaacgaatcgatgccctcggtgggatcgctcgtctgtcgcatttgtcacaatgccgataatcccgaacaactcgtgtcgccgtgtttgtgcaagggctcgctgacatatgtccatgttcactgcctggagtgttggattagcacctcgcgctgcaccacctgcgagctgtgccagttccagtacaatacggaacagactctgcggtacacctgcctgcagtcgctgcgcctgtggtactcaagggccatgagtcgcagggcactgcaggaggactgccagatgttctcgctgctcaccttggtggcattcggaattatcggtaccctgctggtaggcatccagtactacgccctgcacacccactcttggggactgagtaagctgtggaccaagtcctggatgctgttcttcctgttcatgacgatcaccgtttactttgctaacatttacatgctgatcaagtcccagctgacgccatggtatcgctggtggcaatctgcgcgtgacattaaacttatcctggagaaccgacgaccgtttccgaacccaagccgctttttgcggtcatttcaattggagacggtatcgacgacagcctccatgtacacccaccacgatcagcaggaagcaccagtgcccagctcctcgccggtcatcgtgatcacctccagcgaggaggagacggaggataagttggcccacaaatggggaacgcggctggacagtgaagtcctggccgcagtagtggcagccaccgtggaatcgattgctgacgcaagtgcccgcgagagcgacaaacaggacgaggactag

SEQ ID NO: 31320 - protein, 448 aa, DROSOPHILA
MGALEAEEEQKAPEEKHHLVRAARGRQFLHITSNAGDHRLNLTRSLSDLKPETTLEMEIDEALSSSSADDTPPGMIVVETRISSWQKVKCYDKDGTTADAEDPQIPACSLGLKPNVQFQKLPHPSHPLVSTEAVLAAATSSSYSAGPPKAAATDSIATLRHCVDGATQCNNLNYESASNESMPSVGSLVCRICHNADNPEQLVSPCLCKGSLTYVHVHCLECWISTSRCTTCELCQFQYNTEQTLRYTCLQSLRLWYSRAMSRRALQEDCQMFSLLTLVAFGIIGTLLVGIQYYALHTHSWGLSKLWTKSWMLFFLFMTITVYFANIYMLIKSQLTPWYRWWQSARDIKLILENRRPFPNPSRFLRSFQLETVSTTASMYTHHDQQEAPVPSSSPVIVITSSEEETEDKLAHKWGTRLDSEVLAAVVAATVESIADASARESDKQDED

SEQ ID NO: 31321 - DNA, 4444 bp, DROSOPHILA
gtgcagctaacaaatatacatacatatataaaccaggtactctcaaaatcatttatatgtgtgcgtatccataggtaccctacttatgcatatacagataggattgtttaaacgccacatcaaaaacacggacactgcaggcgagagttttgtgaaatgaaaccgaatcgattcaataaaattataatttagaaaatttaacaaacgtcgtagttctttgtgggtggggttagtcatgcaaaatcattatcatcatttaaacacattcattataatatttcgaatttcaaatctaagaaaacatttgaattatatttatttcatttgaattcccatgcgcccttttgtaacccacatacatattcagaaacttgaaccaaatcgcttttgacagctgatttcgccagaaaaaccagtttatcatagtttcaaagggaatgccagtaatgcgttcattgactctccgtataatgtattcaaatgaaatcattggttagattagatgtcgtccaaaatgatgttgatgctgatgtgatggctgccgtccaatatttattttttaattgcaattcgcctccaaatgtggcgggactgatgaaccgttcgtttcttattcgctgtgatatttattctagccaaaagtataaataaaaccagaactaggtagacgcattttagtccgttgttgtccagatataagaacatgctgcagctgtcactggccctgctgttttttctggctctttttgccagcttagaaacaggtgggttctattgttgcttaaacaaaagcttaagtcatatattgtacataaaacatatataacacagcaccatccccatcatctggagctaagcaagagaaatatgtgcgcgtatacgaaatcaatgaggagcaataccagcgggttttgcagctgaccaaaggcaagaatgtcatatcagaaggtcggttgatcaacggtggctttgccaccgtaagtgataccttgagttccggatggaactctcttctacggatcgtgggcctcaccacgctcagcaaggccgatgagacggagaaggtggacttcgatggtcagcccttgtgtgtgatcaaatctcgtgagggcgagggcagggaggaggatgtgccctccgctagaagctcggctagagatatcgaagacgaagaagaggattccgccatccactgcatagtggtgctcaagaaggatgtcgaatttgagctcccaaccctggaacctcttccaaattacgtccaatattggaacaaacctgaaacgtctaaccctgtggtggaagcccaaattcgctcgcagtcttcagaagttcttaaggatgaagaggaagtgcagaccaggataccagctccattgaaaaagaaaaaggttaacaaaagcacttatccgagggcaagcactttggcggacgactccgacggttcccggcaatatggctatcctccactgccgccccaatatggaacaccctatccaccacctccctcctatggtggctatccgtacagtccctatcccaaccctctgccttatccaagccctcagccatatggacctcaactgccgtatggaccatcgccatatggacaatctccttatggattgtacccccaacagccctatggtcctcagccccccattgcaccttacagtccgcagccctatgaaccctatggatatccctacttcgatcagaaccagttggctcaagtaaatgcccataaggaagtggagaaactcgaggctgacgatgacgaagatgaagatgaagactcctacgagactgaagaagaaaatgactatcgctataagaactcctacaatcctgtataccttcaacaatcttataataactaataaacaagagaaaataaatacacattctggttttattatcttagtaaagaatagcagatttaggaattttaggaatttcttgggatatgtcttcttctgactatactaatccaacatgtggattatgagtaatttctcttgagtatcggtctcctttgtaagctcgaccaaaaggaattatgttatcattcaatcgacaaaactagtatatctagatgtgttttgctataaaactcattaagtaaacgagttttgggcagggcgagatcatgattaagaactgggtcaacgcgtaaattatggagatggaagtcgattagtgcaaagctataactgtatatgagcagtttgggttgatccatttgaatgacaatgcctaaagagaatttcgtctcgtcaagtcatcaacttgccggcagagaaagacttttgaaatatataagcaagggagcagaggaaaataagcttattcgcaatcgccatgaagttcttaacagttcttgcggtgatcgttctctgcgcagctgcggcccaagctggtgaggttttcttatatatttgattctagcaaaaaggatgctaatgatctctccacatgacaggctcgagtcgtccgcaactggtgcgtctgcatcaggtgactcgacaggagtacaaggagctgctccggctagctcagggcaaggaggaagtatcggaggcacgtttgctcagtagctccattgttggcatcaagggattggcatccggctttgccgctggcaacttcattccagctatcttcagttccggatccaaggatacgcccaagaagggacgcccactctgcgtgatctccaccaatgatctggaccaggatcaggagcggcgcttgggtcgtgtggtgagcattgagtatgaggccaatagcgactccagctccggatcgggatcgagcagtggcagtggaagtggtcatggaagcggacacggcagtggaagcggtagtggtcatggcagtggaaatggaagtggcagcgatgatgacgacgatgatgtgaccactgtcaactgcatcctggtggtcaatggcaccgacaccactactaccaccacaacgacggcaaaaccaagtcacggtcacggacatggacatggcagcggacatggtagcggacatggaagcggacccacgccaggtgcttattacccaccacctcctccgttctatcccccctactacggctacccaccgtactatcctccctacccatacccaccaccacctccaccaccgccaacacacaagccatcacattccggcagtggcaagcgatcggctgatgaggaagaggaagcgggtcgtctgatcgatgcgtacaatggactctattaccagccagatggcttcactccgcggagtggaaagtactcgagggtcagtcaggatacctcggcctatcagccagccagctatccgcagcaggagtatgccaatacctatccgaaagtggtgcgcaactacggactgacccatcctgctcctgtctacgtgcgatcgccacaattcgaacaggaacactagaacaatttgtctttagagaaatgcatccttgaataaaattaactaaattattaattgggaagaggtttttttttgatagatagggtttatgttcttgtaaacccttttatatcagctatagtgatacttgatccttatttatacatttatataaagagtggtcctcagctatagtgatacttgatggcttgaataataccttaattgaatttagtaagcctgcgtatcgaagcagacgtacacatgtgtatcttttgaacacaatgctgatggggccacgattcagagagccatcaatcgcagacgcatgtgccttcataattggactccgaattgagtggcagaatcgctcatttgctgcatgtttgtgccagagatggcccacctagagtacagtacgtagctgtgtgtctgtgcccgcgtgcgtgtttgatcaaaagtgttacaaggtcctgccactaacaatgccagaaagaaacgttgatctaggcaacacaacagagccaccgtgtaaacaagaagcattacactttcctctgccaaacaaacacacgcgcagaggagtattgaggcacaacgacaattgaaagtgtaacacatcgttgccttttgtagaactgctgctgctgcctctttactgcaggtgcacggtaaagaatttaaaaaatatggtcttgggaaatagtaataagaatttttccttcctttcccgttcccaagacaaaacagatcagttttgctctaagcactacacactatctatatgaccttttaagacagtcaaattctagttgcaactgttttttttcagtgcataaactgatagtcgcgcagtgacatacagtcatacgctggcgaaggacaactaacgcacaggcataaaagagaataaattaaagaacaactcaaaataaccgcggggcaattggcagtggtgcatcgcatgtggggggcgttgcagccggcatgggcggtatgggcgtggcgatttgaacgcctg

SEQ ID NO: 31322 - DNA, 1864 bp, DROSOPHILA
atggaactctcttctacggatcgtgggcctcaccacgctcagcaaggccgatgagacggagaaggtggacttcgatggtcagcccttgtgtgtgatcaaatctcgtgagggcgagggcagggaggaggatgtgccctccgctagaagctcggctagagatatcgaagacgaagaagaggattccgccatccactgcatagtggtgctcaagaaggatgtcgaatttgagctcccaaccctggaacctcttccaaattacgtccaatattggaacaaacctgaaacgtctaaccctgtggtggaagcccaaattcgctcgcagtcttcagaagttcttaaggatgaagaggaagtgcagaccaggataccagctccattgaaaaagaaaaaggttaacaaaagcacttatccgagggcaagcactttggcggacgactccgacggttcccggcaatatggctatcctccactgccgccccaatatggaacaccctatccaccacctccctcctatggtggctatccgtacagtccctatcccaaccctctgccttatccaagccctcagccatatggacctcaactgccgtatggaccatcgccatatggacaatctccttatggattgtacccccaacagccctatggtcctcagccccccattgcaccttacagtccgcagccctatgaaccctatggatatccctacttcgatcagaaccagttggctcaagtaaatgcccataaggaagtggagaaactcgaggctgacgatgacgaagatgaagatgaagactcctacgagactgaagaagaaaatgactatcgctataagaactcctacaatcctttcttaacagttcttgcggtgatcgttctctgcgcagctgcggcccaagctggctcgagtcgtccgcaactggtgcgtctgcatcaggtgactcgacaggagtacaaggagctgctccggctagctcagggcaaggaggaagtatcggaggcacgtttgctcagtagctccattgttggcatcaagggattggcatccggctttgccgctggcaacttcattccagctatcttcagttccggatccaaggatacgcccaagaagggacgcccactctgcgtgatctccaccaatgatctggaccaggatcaggagcggcgcttgggtcgtgtggtgagcattgagtatgaggccaatagcgactccagctccggatcgggatcgagcagtggcagtggaagtggtcatggaagcggacacggcagtggaagcggtagtggtcatggcagtggaaatggaagtggcagcgatgatgacgacgatgatgtgaccactgtcaactgcatcctggtggtcaatggcaccgacaccactactaccaccacaacgacggcaaaaccaagtcacggtcacggacatggacatggcagcggacatggtagcggacatggaagcggacccacgccaggtgcttattacccaccacctcctccgttctatcccccctactacggctacccaccgtactatcctccctacccatacccaccaccacctccaccaccgccaacacacaagccatcacattccggcagtggcaagcgatcggctgatgaggaagaggaagcgggtcgtctgatcgatgcgtacaatggactctattaccagccagatggcttcactccgcggagtggaaagtactcgagggtcagtcaggatacctcggcctatcagccagccagctatccgcagcaggagtatgccaatacctatccgaaagtggtgcgcaactacggactgacccatcctgctcctgtctacgtgcgatcgccacaattcgaacaggaacactag

SEQ ID NO: 31323 - protein, 17 aa, DROSOPHILA
MELSSTDRGPHHAQQGR

SEQ ID NO: 31324 - DNA, 3385 bp, DROSOPHILA
gtccgtacaccggacttggtctactcaaagttatcttaagtgctccgagtggaaactgtcagccgttctgttctgtccttggttgctcgctgtttgtttgctgcttgctgactcttggtcaactgtttttgacaagctctttaatataaatcactttcccaaatggtttttcgaattaaattttcaattttccccagagcttttccaatgttttctctaagcagatgagtgcattagccgtgcagaaatctcactgtcttggtgcttaatatcctttgccagcaagtcttgcttatgtacttgcctccttaattgtttattattaaggagttactaaggttgaatgagccaaaagatattctttgtgcaaactttttttttaccatcagtgtaaaattgagctcttggaatttttaaagaaaattaccatttttaatcaagtgttttagtcaaaacttaatttgaacttaagaatatttaaaaatcaatgagggcttgttttgcatgccgcggaatttcttggcaattactttccattagcagggcattgtaatgctaaccacgactttcaactttcgctacttttggcccggccaccgaaaacacaaattggccaaggctcgaccgagaggtggcactacaataatattttatggcacagcattaacttggctattgacaggtctaaatcgacaccattgtgtcttggccaaagccaaaagtgccgttgctcggaattcgattcggggaaaccagttctcagcgacagtgaacaatcagctcgccgggtttccatgtccataagatggctgattttaatcgcgttgagcatcgttggtgttcactgtgttttcacattcctagaacattgccaaacatgaatcgtcaatgcaaattagttgcggactgacccaaatcggatggccataaaattggtcgaatggtccaaaatcggtttagtcgtagccggggccaacgcctaaaatatgtattagccagaatgaagctgccactgctgctgttgctaatccagtcttgtgcccttgtggccagaggtaagccccagaatttgtagtgtttaagtgaaagtacagtgcacactcacccctgatggccccttgttcgacagccactcctgccaggcactggcgtcgtgcacccgcccatggagttttcaatgtcgatgtctatgcctacaataagccccggatgaacttggtgcgtcgccaggccatcggaagtcgatccactcagaatgctcctccaatggatcacgtgctgcagcagatctcccaacacagccggcgatccaccgagcagaggtcccactacaggaaccttgacgagaacttggaggtcctgccaatgccaattgctgtgcagaaacaagccagcgagctgaacaaaacaattgagagcccggccataaacatgcaattaatgcctctggaaatgaactcgactatgcacgcacgggagaatttatactcgaacgagttccatgtgcaaagtattggcaccaagaagatagtgcaattgaataccctgaccagcgaccatgagcgtaaaccagtcgtcgaagaagttatggcccagaagcaccaggaccaggagcagcaggagccgcttaaggtgaagctgacactgccagagctgaccgagaacaatgcagaagaaacagaagtccctcctgcaaagaacaaagttggcgaggtaaacgcagcggcgacagctcctgcgggggaatccctgacaagtgtgaagaaaaccatggccccgagtgagacaattatcgataagccatcgacaggaatgcagcagcttgtcagcccgacgacagcggagaatgccggtgacaccggcacaaaggctcagtccggccagagaaggaaggacgaacagaaggccggaccgtcacgtccccgtccgaagaccaagcgaaagcaaaggccaacaggagcaccaacgtctaatgaaactgatataaagatgacagcgaaccgagttgtcactgcaccagttcctggtcctgttcgtcctgaaactaaccccatcgtgggaccaggttctggcccattaaatgcgaagcagccggcaaaggaattggaaacacaatcactatcgccggaaatcagtacgcatcgtcctttgacaacgaagagcatgagcaaaggcaagggtaagggtaagggtaagggcaaggataaacgtcgccagggctcccagagacgtcccgcaatcgctggcgtaatggaggaggaaattgaaactacgacaaattggtggcagattctcccatatgcggaaattagaaaatttttgaatacaatttacgataccatcgccgatgatggcgacgacgaacgtgccacggttgatgtgtgaaaccagagtattcgttgcgacggttggatttgcgggtttctgaggttccggttttggtatttatagagggtccgaccaagtgacgaattgaatttccgctaagactaaactttaggtactgaccaaatagcaagtaagtcgtaactattgacgctttatgttaaaatcaactagaaagtaaagagaaaatatagatttgtgaatcgactagaaatgttgtacaaaaactatgaagccacttcattgatttccccaccttttacccactttccctttctatgcaaatctctgctcccattaatcatcataaccatcatttctcagtcatcaaagcctccatttaatgcgggatgctgggtcaacaaagatgacttaattaaaagtcccccgatcagaaacaataactcggctgggcacttaaaaacccatccattcatatctgaataaacaaatagagaactcccgagcccggtcgctatacttctagccaaacaacgtgcagtctaatgggcattagaccccagacctgtggcgttgcgggttaaagttgaaagtggtcgaacggcttccaatcccagtccgaaaagttcacggtattcaggtaaagcgtgaatcgactcgacattaatgagctgagaattttttttatggctgcggaatgaaatttaccgtctggctgcctgcgtccactagtgagtcagcctcaataaatcttggccgctgattgattgagcctaatgagagatgataatataaatgattaaagcacatttattcattgcggatatttattgaacgaccagcaagataaatttctgtttactcaagtgattaaaagtggctcgacgccaaagttttctttttcttcttaattcccgtctcgacttgggctcaatctcggccagaataaacagctgtggtccgctaacgttgtggttcaattcaaagattttctgaccagccattggaagtgctggcgatcgggtggttgtactttcca

SEQ ID NO: 31325 - DNA, 1311 bp, DROSOPHILA
atgaagctgccactgctgctgttgctaatccagtcttgtgcccttgtggccagagccactcctgccaggcactggcgtcgtgcacccgcccatggagttttcaatgtcgatgtctatgcctacaataagccccggatgaacttggtgcgtcgccaggccatcggaagtcgatccactcagaatgctcctccaatggatcacgtgctgcagcagatctcccaacacagccggcgatccaccgagcagaggtcccactacaggaaccttgacgagaacttggaggtcctgccaatgccaattgctgtgcagaaacaagccagcgagctgaacaaaacaattgagagcccggccataaacatgcaattaatgcctctggaaatgaactcgactatgcacgcacgggagaatttatactcgaacgagttccatgtgcaaagtattggcaccaagaagatagtgcaattgaataccctgaccagcgaccatgagcgtaaaccagtcgtcgaagaagttatggcccagaagcaccaggaccaggagcagcaggagccgcttaaggtgaagctgacactgccagagctgaccgagaacaatgcagaagaaacagaagtccctcctgcaaagaacaaagttggcgaggtaaacgcagcggcgacagctcctgcgggggaatccctgacaagtgtgaagaaaaccatggccccgagtgagacaattatcgataagccatcgacaggaatgcagcagcttgtcagcccgacgacagcggagaatgccggtgacaccggcacaaaggctcagtccggccagagaaggaaggacgaacagaaggccggaccgtcacgtccccgtccgaagaccaagcgaaagcaaaggccaacaggagcaccaacgtctaatgaaactgatataaagatgacagcgaaccgagttgtcactgcaccagttcctggtcctgttcgtcctgaaactaaccccatcgtgggaccaggttctggcccattaaatgcgaagcagccggcaaaggaattggaaacacaatcactatcgccggaaatcagtacgcatcgtcctttgacaacgaagagcatgagcaaaggcaagggtaagggtaagggtaagggcaaggataaacgtcgccagggctcccagagacgtcccgcaatcgctggcgtaatggaggaggaaattgaaactacgacaaattggtggcagattctcccatatgcggaaattagaaaatttttgaatacaatttacgataccatcgccgatgatggcgacgacgaacgtgccacggttgatgtgtga

SEQ ID NO: 31326 - protein, 436 aa, DROSOPHILA
MKLPLLLLLIQSCALVARATPARHWRRAPAHGVFNVDVYAYNKPRMNLVRRQAIGSRSTQNAPPMDHVLQQISQHSRRSTEQRSHYRNLDENLEVLPMPIAVQKQASELNKTIESPAINMQLMPLEMNSTMHARENLYSNEFHVQSIGTKKIVQLNTLTSDHERKPVVEEVMAQKHQDQEQQEPLKVKLTLPELTENNAEETEVPPAKNKVGEVNAAATAPAGESLTSVKKTMAPSETIIDKPSTGMQQLVSPTTAENAGDTGTKAQSGQRRKDEQKAGPSRPRPKTKRKQRPTGAPTSNETDIKMTANRVVTAPVPGPVRPETNPIVGPGSGPLNAKQPAKELETQSLSPEISTHRPLTTKSMSKGKGKGKGKGKDKRRQGSQRRPAIAGVMEEEIETTTNWWQILPYAEIRKFLNTIYDTIADDGDDERATVDV

SEQ ID NO: 31327 - DNA, 2972 bp, DROSOPHILA
tggcaacatttttcagttgaattagggataacagcttgagacttagaaagtacataccttgtacctttaataaatgtgaaatattactactaaaattagtttgagcttgactaggatttatgtatatattatatattatatactatatattatgtatctttatggtaataaagatatatctcataagagtggatatacaccttattatattcatgctttagcctatcacgagtcctcaacaaggagacttgtccatgtaatttgtgaaaacgctgcagtcaactaatatcatggaattgtacgaagtgccagcttttgcttgaaattacctggaaaattaaagttttcctgtggcagtcgtaaatccgttacagaactccatgttattttggcaactgacatttacggctgggtgtgcacgcaggtgggcgtggtcgttgggccgaagcaatccaatattgccacatcaatcaaatcctatatgtaccgccgcgagtgttgatgcagccaagtcattggaacgacaatcaagtgggtgacgatagatttttatttcagattgtgacgcgcgaattgctttcgccgaggttaattagtttggcgggggtgcagttaaattgaaaccgcgacaaaacagctttctcatagtatttctcaaaaatatttgtgaacggcattttgacagtcgtttacttgtacgaatttctgattataaatattgcaccttacctaattgttctgacttttaattattttattataaagtattttcaatattttaaaattctttcaatacgtttgaatgttttaaattaaaaaagtacattttgatggcaataaatgtccacattatttgtttaatcttaaataagagtcaggaaacgtaatattaccaaagttatattttctttagcaatatttcttaaagtaaagtgtataagataggaaagtgattgacatatcgtaaaaataatacccctttctttgcagttttcgtaacatgggctgcgtctttgaagcggccaaagagcagccccacaaaccgagaagcaggcaactgaggcgcaaccaatgccgtggaaaagcggaaaaagcagcagcggggaccagaggcaaggtcgctgtcagaggaaacaacgacaagccagctgaggacatcaaaatcaaggataactatcaacaaaaccataaaacgcaaaccgaaacacaaacagaagtagcagcagtagtagcaatagcaacagacgcaggagcagaaacagaaactgaaacagaggctgaggcccaaaaagagccagcaaccgggcccgaacatctgaaggcggcggctcaagtgcttttaacgatacggcaggcacgtcaggagaacaacaagcacagtagtagtcaagtggctgaaacgcacaaggacgaaggcgaggacgcgttggcgcggcaaggatccattgtcgatacggcggcgggcagaatcggaatcgatattgcggcaacaacgattcaagtcgccgagcggcatgaggatgggcagcattggcagcaacacaatgtccgccggcggaggcgccagccagatcctgcagcgcatcctgcaagcatcaccaaactttcggcaatatccctgcattttcacgccctcgccgccctagcgaaaacgctccaaaagcacgaggacctgagtcctgtccaggatcgccagcccctagcgtaccgggcgtggcaagaacatccgtatgccgagacccaaatgcccgccaccatgtcagcggccatcattgcgaatgtcggcgctactgcagcggccacctcggcagccgccttccagtatctcggccagcactacaagcactacagccagtcgatcagcttctacgccgcctccagtgtgctcctgatgctttgttatctgaccaccgcgtccacggcagctgccacgcagtcggagacgggtgccctcgacaagcatcccatgtgagtgcaggataaatcgcataatatcagtacagagtcacgcaaagccaaaagttcgccttgaattcttttaattgaaatatggacatagaaggaatctagattcggcaatccgagcttatttagcatatatatttttgatcagtatcaacagcctgatatagtttgtacagggtatccgtttctccgcctgtcatgtgcgtccgtttctagcctcttagtcctaacgctatctgctttaaactttagtatctaagtcgaaacgagcaggatcagactactatattatataggtgccctatgaacttatcaacaattttgaatcggtactacaagtcctagattcggggcgaactcggtgaattcattagaacaccccaattcatttcggaatactgccatttgattttgttaccttcaactcgcccacacagcctctctattttcccaactatccatctatctcttcatatttctttcattctgtatcgcctggcaatccttttcacaacacgtacaaaaattgttctatttattttttcctttttgaaattctttcagtcatggcatcgattggtcgaagtaagttaatgcacacctccttccatctctaaaaaaaaagaaataccaaaagctgagaattattcggaaaaagagaaaactcgagtttttcgttatctctctttctggaattattaagtttcgttttctgcacacactatagtttttttagtttatttgatttccagttgaggtaattggtttttctcagcttcgttctgctgatgttatgcatgcaatttgaaataaactttatgagttgcataaaataaaatgctttgccaactacttcatagcaagtcaactattttactctctctggattaagagataatttttagaatttctaaaacctaaaggagttcttagactctcattaaagaatttaaaaaattgtattattttaactgcttacctacttatgagttctttgatattatact

SEQ ID NO: 31328 - DNA, 972 bp, DROSOPHILA
atgggctgcgtctttgaagcggccaaagagcagccccacaaaccgagaagcaggcaactgaggcgcaaccaatgccgtggaaaagcggaaaaagcagcagcggggaccagaggcaaggtcgctgtcagaggaaacaacgacaagccagctgaggacatcaaaatcaaggataactatcaacaaaaccataaaacgcaaaccgaaacacaaacagaagtagcagcagtagtagcaatagcaacagacgcaggagcagaaacagaaactgaaacagaggctgaggcccaaaaagagccagcaaccgggcccgaacatctgaaggcggcggctcaagtgcttttaacgatacggcaggcacgtcaggagaacaacaagcacagtagtagtcaagtggctgaaacgcacaaggacgaaggcgaggacgcgttggcgcggcaaggatccattgtcgatacggcggcgggcagaatcggaatcgatattgcggcaacaacgattcaagtcgccgagcggcatgaggatgggcagcattggcagcaacacaatgtccgccggcggaggcgccagccagatcctgcagcgcatcctgcaagcatcaccaaactttcggcaatatccctgcattttcacgccctcgccgccctagcgaaaacgctccaaaagcacgaggacctgagtcctgtccaggatcgccagcccctagcgtaccgggcgtggcaagaacatccgtatgccgagacccaaatgcccgccaccatgtcagcggccatcattgcgaatgtcggcgctactgcagcggccacctcggcagccgccttccagtatctcggccagcactacaagcactacagccagtcgatcagcttctacgccgcctccagtgtgctcctgatgctttgttatctgaccaccgcgtccacggcagctgccacgcagtcggagacgggtgccctcgacaagcatcccatgtga

SEQ ID NO: 31329 - protein, 323 aa, DROSOPHILA
MGCVFEAAKEQPHKPRSRQLRRNQCRGKAEKAAAGTRGKVAVRGNNDKPAEDIKIKDNYQQNHKTQTETQTEVAAVVAIATDAGAETETETEAEAQKEPATGPEHLKAAAQVLLTIRQARQENNKHSSSQVAETHKDEGEDALARQGSIVDTAAGRIGIDIAATTIQVAERHEDGQHWQQHNVRRRRRQPDPAAHPASITKLSAISLHFHALAALAKTLQKHEDLSPVQDRQPLAYRAWQEHPYAETQMPATMSAAIIANVGATAAATSAAAFQYLGQHYKHYSQSISFYAASSVLLMLCYLTTASTAAATQSETGALDKHPM

SEQ ID NO: 31330 - DNA, 2696 bp, DROSOPHILA
atgaaaattgtaacaaaaaagcgaaaaaaaattattaccaattatggaaaaaaattctttctccttttgcatatatgacaaaattatatcgaaagagttataaatcaattcagttatttgcccctgatttacattttaatttttgtatatgaaattcgccttgaaaaaatatacatttaaattaagttctttattgattttctgacacgccctctaccactaaaaaaataaacaaatatttcgttggcttacttaaataaaaatatggcgatatatcgtgccggaaatgttggccactattatttatggtactaaaaagtagtagctgaagcatttttgttctttggctattttctgttgtcagtgtttgcttgaaagctttttgtttaggcgcttagtttactgcattttgtgcatttgaatgtttttcaataaatataaaaaaaaaacactaatgcaatctacatacgagacaccaaaaacatcgaatgtgtatagcttggaacgaagaagctaaaaacaatataaatatggattatatctgtttttctcataggcgggtaatatttatacatttaggtataataaaaatttaatgactggaaatcatattgaaaattaacgaggtcgctttaaaaaactttaaggaccttctgcttgaatctaacagcaacatgaagtgaaacaagagtccattatctactggaacgatttaaccaacttaacttaccatttcactacaactgcttaattccaagtaacctctcctgttaatgcccatcaattaacacaattacttttgtggccttcgattatcctgactaaaaccacctatgtgtctctctccgaaaattgtctttctctttcccgcgttcaaaaaccaaacactataatgaaaccaatgctagaaccaatccagaacaaataaaaaacaaaccaagacaaaaactatccccattcaaccaacctgctctgtaggtaataatcgaacgcgaatttcatgccgcttttgtcctccgaaaaggcaagcgccgctgccacgccggccatgtcgatgatgggcggggccacgcccatgtccagtggtaccccggccgcctcatcctcggtggccacgcccggtaccccaaggatcaccgatccggaggagttcttcggcggcggcatgcgttggcaggaggcccatggcggaatcattggagctgctgtccagaatttacgggcacgttcgataaaacgtaaggcggccagaagtccatccacttccatatcgccccatcccagtgggcgacccactgagcatatctacgaagagcccggtggatccacatccggtgtcacaagtacgaaagtaaagttcaaggacgagctgaaggaggagcaaccggaggaggcggagtccagcaccaaactacgacgatcggtggccaccagtacaccggctttggttgtaaggatcgaggctgagatcgatccggaggcggaagacaagcccatccaggatatggaaatgacagaacgtcagttgtccttgccgttgaaaccgccgcgtcgcaaggcatcgcgctccaattcaccagcctcggtttacagcgatgcattcgagaatgtggaagctacagtgagtaaaggacacaccagaataccacaatcgctcccgagactaaccgaaaaatatccacataaaaaatcttaacaaacattcgttcttgttgttgcttgcacaaccgactaataactaaccagaatgtaaaaaaaaaaaaccgagccaaagcaaaacgtcagcaagaggaaagtttggccaaacttgattgcctgcggttattttgattgccatttgcccaaaaaaaaaaaaaaaaacacccactaaatgcacccaaacacccccaaacacgcacactcaaagttggaattttccccgaacttgcgattgaactttaaatgaaaaactaacaatgactaacaagagtaaactgcattagacatgaggtactggcagccaaaggaaacagaaaggttaagcaattagggctaaaagccaggcagggttgtcttttaccaaatcaaatgcaagcagtgaagatgttttctcaactaattacccttcacctaagcgatttagtcattaggaatttgagtgctttcagcggctcagagacttagtgacttgatttagattaaaacatattcgaataagtattaatatctcacctttattttattaaggaaatttcgaataagtagaatatatatatttaaatattcctagaatatatatatctcaattcaaactttgatagcacgcaagaggtagatatatttttttgataccatggtggcttaaacacttgaatcagtcattttgtcctttagattttcaaccgatttccagggcataaatcactaaaacttcccccaaaagtccccaagtaaatcaaacttatcggaatggaagcgaagaaaccgccatcaagatagaaatgcaaaggcaaataaaaccaactaaagtgggcgtgatgaaatacccgtctgccgaaaagcaaaactattttatgggaaattgtgaaacgctgacgacaacttccgacagaagcagaacaccaggatacgcagcccaggcaggagttgcagcctggccagtgaaaagccaggcggaaaaggtggaaaacccgtcgacaacaacaaggtggctggga

SEQ ID NO: 31331 - DNA, 696 bp, DROSOPHILA
atgccgcttttgtcctccgaaaaggcaagcgccgctgccacgccggccatgtcgatgatgggcggggccacgcccatgtccagtggtaccccggccgcctcatcctcggtggccacgcccggtaccccaaggatcaccgatccggaggagttcttcggcggcggcatgcgttggcaggaggcccatggcggaatcattggagctgctgtccagaatttacgggcacgttcgataaaacgtaaggcggccagaagtccatccacttccatatcgccccatcccagtgggcgacccactgagcatatctacgaagagcccggtggatccacatccggtgtcacaagtacgaaagtaaagttcaaggacgagctgaaggaggagcaaccggaggaggcggagtccagcaccaaactacgacgatcggtggccaccagtacaccggctttggttgtaaggatcgaggctgagatcgatccggaggcggaagacaagcccatccaggatatggaaatgacagaacgtcagttgtccttgccgttgaaaccgccgcgtcgcaaggcatcgcgctccaattcaccagcctcggtttacagcgatgcattcgagaatgtggaagctacagtgagtaaaggacacaccagaataccacaatcgctcccgagactaaccgaaaaatatccacataaaaaatcttaa

SEQ ID NO: 31332 - protein, 231 aa, DROSOPHILA
MPLLSSEKASAAATPAMSMMGGATPMSSGTPAASSSVATPGTPRITDPEEFFGGGMRWQEAHGGIIGAAVQNLRARSIKRKAARSPSTSISPHPSGRPTEHIYEEPGGSTSGVTSTKVKFKDELKEEQPEEAESSTKLRRSVATSTPALVVRIEAEIDPEAEDKPIQDMEMTERQLSLPLKPPRRKASRSNSPASVYSDAFENVEATVSKGHTRIPQSLPRLTEKYPHKKS

SEQ ID NO: 31333 - DNA, 2386 bp, DROSOPHILA
taaagactaatgtaatccttttactttttcaacagagcatccgccgaggacatgcgggcagctgctcagcaaaccttcggaggaaacacacctgcccaaaccaacgatcgagcggggattgtgaacaacgcccagcccttctccttcaccggtgccgtgggcacggacagcaatgtgtgattcagaagctagctgatcgggatttcgaggaatcgaagagctgggtgtgccgtgagaaaacaagactcaaaacgcaacatttgaagggcaaacctaaccaagagaacatcggcaggcaatcataaacataatcatgtgcaatttctgattgttcaataaccaacgcaaatggataacaaaagtttttaaatccgattagctctgatctctttctagagcaatccaaattactcgatcagaaagaagccacccaaaacaagatcattaaattttaaaccatttttgtattaaatgtatgtaaatgtatattggttttaaaagcgttttgcgttttctgtatcctattaattaattgtgttgcctgtgtcccatcattccaaaacatttggtttcaactaagtagaaattgcaaataaattattgaacgacatcactagcgaggtgaaaaaaaagatcatgtaaaatttatgtttagtcatagtttaaatataccttaaatatatttaaatgcataatactaaaatgtttaaattaatgcaaataacactataaatattgtatgtaaaccatattaaaattgaattaaagatactttaaattatgttaaataaaattaattatacaaatcatcgttgtaatcatcgctaaaatgtaactattgtggggcatgctttttggatgattcctgagctgcggtatcttttgggggaaataaaaaatcagattacgctcacaaatatcgtataattttaaaacttttcgccataacaacaaatactatttataaaaacaaaaattacaaaaactgttaactaaatgattaagattcattggaggcgctttcatcggagacgctttcatcggaggcgctttcattggagccgctttcgtagccttcaggatactcgatgatcaaaatttcttcggatgcactgccgctgtcatcatccgcggcatcgtcatcatcatcatcatcctcctgcaagtcgttggcagactcatccgagtcctgcgagaattcccaacggaaacgacgatcgctgatcacatcatcacccttgtccacaacatccgaggagagactggcggcgatcaccatggcgatgatacctaaattggatagacttggatgatttggtatccttttcgtcggcttccttttcctaactcaccaaagaacacgaagaaaaccttgttagactgcatatttgatgattgattgtagcttgagatgctttcgatgctgagtgagcttttggcttcggcttatatactaaaattttggcaagtgccttgcgaatcgtctctgacccagcagactgtgtttgactaccccaagatcaacgaaatgccccaaaattctacatagaaacaactaacaaaatattagcatagctattgagtttgagcgatcaaggtcagagctttcggggtttgctgggtgatttgtgttgttagaaccacgcttcaatgctgtaaattgggttgcaaattaggtggcagtaaaatatcttagagatacactaattgaatatacttaatattaatataaaggtccatacaaatccacacacatgccttctaaatcggtaaatgagtgttttttttagaaaaaaaaaacaaatattatagacattttaattacagtcatgcttttcatttaaaagggtagaattttggaaatataagtacattttccaaaactgaaagcttattttgtagcaaaaactatttatgatcctaactagttttaatattgtgatttgttttttattcatttaattttagttatataaaatgtaaggtcacagctcaaaagtatgcagcagaaacgtatgtatgtaaaatattttgtataatacacgcgtataagtagaattccgtgtatatttgaagtataagagcagtttgcttaaggctttctgcttataagttttcaaagtgttttcacatgcttttaaagcgtattaaaaagtgtaaatggttagttctcctcctcgcaagcatcaatccaatcgttgaacacatcaattgcctccgtgagatagtttatatgtgtttgaaaaaattcttggcacacggtacaggtaattcttcctatttttttcgccttatctctatgaatactatgaaattagcggagtaaaaccaaattttgattcctactcacagtttcgcttcacatgactgcttgtgattgcagaat

SEQ ID NO: 31334 - DNA, 324 bp, DROSOPHILA
atgcagtctaacaaggttttcttcgtgttctttggtatcatcgccatggtgatcgccgccagtctctcctcggatgttgtggacaagggtgatgatgtgatcagcgatcgtcgtttccgttgggaattctcgcaggactcggatgagtctgccaacgacttgcaggaggatgatgatgatgatgacgatgccgcggatgatgacagcggcagtgcatccgaagaaattttgatcatcgagtatcctgaaggctacgaaagcggctccaatgaaagcgcctccgatgaaagcgtctccgatgaaagcgcctccaatgaatcttaa

SEQ ID NO: 31335 - protein, 107 aa, DROSOPHILA
MQSNKVFFVFFGIIAMVIAASLSSDVVDKGDDVISDRRFRWEFSQDSDESANDLQEDDDDDDDAADDDSGSASEEILIIEYPEGYESGSNESASDESVSDESASNES

SEQ ID NO: 31336 - DNA, 2844 bp, DROSOPHILA
tacgacattgtcatctcattatcactacttgccacatcctcatctggccgtgttaggtgatcatctaagggctcttctggattgaaatattctgcatattctggttgtccaaagtctttgcataacaaatgttaagcacccgaaataatttacgaatattcagttgacttaccaactagcagtagaacgcaaaataaattaaaatttataataaatcccatgttctccttgtcgctcagatacttataatactgatggatggcagtaaaaaacattgcatttaccatttcgagcttttaatatttaaacagcatgtttcttattaagtattcatatgtatgatgtttacctggatctatttgcttaccgaaaattatatttacgatatcaaagctcttaatacccgggccaattgtcaataattaaaataaattacaatttttgtatttattcgactggtcaagaaaacttagaaaggtcattatccccatccttttttttgtcgaaattcctatgaaatacctcgattagtagacagtggaagctctttaaagaatttcagaaagcttctggccattctccagcaccagaacttcaccacgggcccagggagaattcaccacgaccgatcaactttagctaaacctctcactggtaaacaaaactcggccagaacctgcgagaggaaaaggccaaaacaggcctgtctggctcaaaaaataaaaatattaattaaacaaaatctggcgggtaggcgttaatacgcgtaaaatattgtttaaacaagagacgagattctgtcgctgccactgtcactcgatctatctgcttaaatacataatgtgataacgaagattgcgggtatgggcattaaacaatctttccaaactgcggttcagtcgtcaactgttgtcgctgtttttcacacacaaaatacgaaatacgaaatacgaaatccgacatccaaaatccgaaaccaaaggaataaaataaataatatatgcgcagaataaacgttgaacagaccaactagtttagtttgttggcgagttaccaaagaaacggtcacgtttggcggcttcagtttatatgtacgttctcgtgccaaatttcagtaaataataaactggtacagtgattgattgattgatggacttgttgagtgagtgagctgcaatcatggctaattacacagtggtgcgtgtgacaaaagtgcaaccatacctgcatgtggtggacagtggttatgcagctttagcccatgtcgatagcttttatgcgccgaccttggaggccggattactggatttccatgcaaatggcactgcgacccatgccaatttaacggcggaaagagtcctcgtcctcatcggcgaggaaaactacagctatcgatcgacctcgaccatagtcctcatggtttccgcctggatcctgctcattctgggctttgtcttctgctgctgcgccgagtgctgtggcgtcagcgtgtggcgtggcaaaaagacacggtccagcatcgatatcgatggcttaaatcaggcggaacaaggtggaaatggaaatgggagtgcctccgcccgcgatgcaactgcaggtgagtgcttcaagttcgctctatcatcgaaagcttttgttttggggctcgtttgcatacttttaggctgccatcgaatattgattggcctggggagactggccaagttctcccttgcctgtggataactaaactcatatttcacgagtatcccataaatggctacaataaacgagcagccacagggatatccaagaatttgcaagtgtgcaatatactctacgattcggttaagcacagagcttaatggatatatataaaattcaataaaagcagaataaacatgcttatgtactaatttgaaatattaagttaaaattacgattaagaaatctagaaaagagaacaacaaagcgcgtagatacattcttgatacaacttatttcctgattctaccaaatttcacttcggtcggggtcgaagtgcagagtataaaaatgcattcgaatggcctgtcaatgcgctttgctgttattgctgaactacttttcgaaacaacacgaaggggtttctgtgggcttgagagttgctctgcggaactgcctgctgcctcatcgatatcataaaatatttagctatttctcttatttcgcttcgctccgtttttggcaaatttggcatgcgttttggctgaaaattggcttttggccaagttaacgaaacgttcacagaaatgaatgcttctacgcaaacattcacacacaaatatgccagtcgggcttgcacatacacaacgaaaatattgccgcaactttaaaaacatattggtatttagtgatttagttttaaaaatataaataaatgctttttgaaagaaatgctggcccatctacttatgagttaggggattattgattgatcattgtatatttatattagtgcgatagcataaaatatttttctcagtgcacgggctgtagaaatttcgtcggataatttggttgcatatgctgcgctcaatgcagcttctgtttgcatcgttggcaattagcattgtctcgaagatattgcgtttcattagagcgatatgtgttttagagtgtttgtttgcgcctgaatgtgcgtatatgtgtgtgtgtgtgtgtatgtgtgagccaaagagcacagcagtcaatgggtcatttcgataacggcaaaatttgttgcaaaatttgtttggcatttaagccaaaactgggatttgtgtattgtgtggggctgccagagcttaagttgttgcatttctgccatggtttctgtcgattttt

SEQ ID NO: 31337 - DNA, 426 bp, DROSOPHILA
atgcgcagaataaacgttgaacagaccaactacttttatgcgccgaccttggaggccggattactggatttccatgcaaatggcactgcgacccatgccaatttaacggcggaaagagtcctcgtcctcatcggcgaggaaaactacagctatcgatcgacctcgaccatagtcctcatggtttccgcctggatcctgctcattctgggctttgtcttctgctgctgcgccgagtgctgtggcgtcagcgtgtggcgtggcaaaaagacacggtccagcatcgatatcgatggcttaaatcaggcggaacaaggtggaaatggaaatgggagtgcctccgcccgcgatgcaactgcagccacagggatatccaagaatttgcaagtgtgcaatatactctacgattcggttaagcacagagcttaa

SEQ ID NO: 31338 - protein, 141 aa, DROSOPHILA
MRRINVEQTNYFYAPTLEAGLLDFHANGTATHANLTAERVLVLIGEENYSYRSTSTIVLMVSAWILLILGFVFCCCAECCGVSVWRGKKTRSSIDIDGLNQAEQGGNGNGSASARDATAATGISKNLQVCNILYDSVKHRA

SEQ ID NO: 31339 - DNA, 2606 bp, DROSOPHILA
attattgattgagtatgtgcacacaagcgatttctaatgaatgactgattgataatatagttaattggtgttctaaacaagaagcagcaagccactttgtgatttatatagaccttataaaaaatataataaaataatataatttatatctcatttaaagaaaatacattcttgtaaatctagctttctaaattgcatgcatttgctttgaactctgttaaataatttattgatattcgtaggcctatagtttttggagtttatggatctcaaaccatcattaagtagttcactcagtaaatcgacgttttacacgtgagctgccttggatttgcccttatgcacttcacgtgtaatcgagaattagctgggcaaatatgctaagattttatagcctcgcaagtggcggagattaaacgaaacggagcagagctccggagtaattacaaatgttttccctcatttccacttggcaaatcaataaaactgaaattcatacagatagacagccgaaggatatacagtatatgcatatgtttattgctaagataaattccccagcagcaaaacagtaaacagcagagatatatatgaaaaaaaaaggagagctttaatgccaacgatcaatatttgtgcaacaaatcagcaatgagagcggcctgtatctgtgagatacagataccattttcaacccaaaccgtacgagatgcgtgaggcgaattaacaccgatgcgttaacacaattagttgaaaagtgaaaaacggcataaagtagaagcttggagattaaataaaataaaatctatatgccaatcgggagtgtcgacaaaaagcgggccagcgaatttgcaactttaccctcgacgcccgttttcagtcgcgcaatgaagctccagcatcgcggctgagtttaagaaagaaatatatacgaaagcacatgtgccgactgtactaaaactagtgacaaataaatattacagaatatatataattctgaaagatggctgatttactaaaggctctgaatattacgggcaacctgctggcaggcctcgaagatgccggcaatctaacgattgcaactgccacaaccacaactttaagtgaaggccttaatggcaatgcaacgaccttggatgccgcagcatccaccagtagtggcgaaaaactcgatcttggcggcttcgatctgcccggcaactactccatactcattaacaaactggagcagctggccttgggcttggattcggccttgggaaatttcaccatcgatcgccaggaggtcgagatcaatttgagcggcgcagccacggccaacgacgttgccgatgtagccgacgatctctttgatgtcctgccagctgctcgggcacctccgccgcatatagcacacggatcaaggatatataccggcgacgatggccaggactttgcccacgtggtcagcgatatctggattggagtcatccttacactgctcatcgtctttgtgatattcttcatatgcgcttgcttcgtttaccacaaattccagcagtggaagaactcatgtaagtgtgggcaatggggcgtatgcgtgatattgggttcaagtgtattttaaaaatccattcggtgtgagattcttgacttattctcttggtatttgatttgctgttataaatcaacttattttgattatcttatgataactacttaagcgccattcagtctacccttcgaatttcacctatgtcagcatatcgataatcatcgaaatattatttcgccataccccgcttgggtttaatctgttccttcatatttacatacctgacaaatcagacataaacaatcactcacacaacacgattgcgctattgaaaattccaattcgcggtaatccataaatcaaattgcagaatcattcgggctgaattaaacgtcagtggaaactcgtttagacttggactttggcgcgaagagcggcgagagccaagcaaataaaaaacaaaaatagaaaccgataaaagcaaataaacaaaagtaccaaaagcaaagtctgcggcaggaaagaacttttccaacacaaatgaaaaaagcgtagaacaaaaataaaacaataaactccgtcccagcagagtatgtattgtagtatgattcacctaaaaaaaagggggaattgaaatttcagccagtatttgtttagcacataccacacgtactcgtatcttgtgacttggaaacagtggccaagatcccaagacatttcacagctttgctggctaataaacaataaatgagtgtgttccatgagctgcctgtttgcgcctactatttgccaaaataataattagaagccgcagatcagaagctaataacactgcaaaaattatcacaaaatcgtgccatttaaaaataaaaacatattctgataaaattaatacaatttaacacaattaccattcgtataaaatgtatactaatttaatagagaaagaatattcaattcgatgttatcgaataaaataatttggtaaaggaaaactaaataattcttttataatttatttagttcaatgaaaataatttcatttttcctttgttttaatctatatatattg

SEQ ID NO: 31340 - DNA, 606 bp, DROSOPHILA
atggctgatttactaaaggctctgaatattacgggcaacctgctggcaggcctcgaagatgccggcaatctaacgattgcaactgccacaaccacaactttaagtgaaggccttaatggcaatgcaacgaccttggatgccgcagcatccaccagtagtggcgaaaaactcgatcttggcggcttcgatctgcccggcaactactccatactcattaacaaactggagcagctggccttgggcttggattcggccttgggaaatttcaccatcgatcgccaggaggtcgagatcaatttgagcggcgcagccacggccaacgacgttgccgatgtagccgacgatctctttgatgtcctgccagctgctcgggcacctccgccgcatatagcacacggatcaaggatatataccggcgacgatggccaggactttgcccacgtggtcagcgatatctggattggagtcatccttacactgctcatcgtctttgtgatattcttcatatgcgcttgcttcgtttaccacaaattccagcagtggaagaactcatgtaagtgtgggcaatggggcgtatgcgtgatattgggttcaagtgtattttaa

SEQ ID NO: 31341 - protein, 201 aa, DROSOPHILA
MADLLKALNITGNLLAGLEDAGNLTIATATTTTLSEGLNGNATTLDAAASTSSGEKLDLGGFDLPGNYSILINKLEQLALGLDSALGNFTIDRQEVEINLSGAATANDVADVADDLFDVLPAARAPPPHIAHGSRIYTGDDGQDFAHVVSDIWIGVILTLLIVFVIFFICACFVYHKFQQWKNSCKCGQWGVCVILGSSVF

SEQ ID NO: 31342 - DNA, 2833 bp, DROSOPHILA
gtgtatccaaccgacttaaaacagtcacgtccccttggaggacatacgttaagctcgatgtaagccggccataattaactaaagtcaattgaaaattacaaaaaggcttaagcacgttgagctgtcgtcggtggggaaggaggtaatggagttaggccactgacagctcccccagggtgctccactgccacatggtcgagccagcccacccgaaatgagttttcactttcaatccgcccgctttcttccaacattttccggcaatcatcaatttaatttcgtaagctcgcagagcgttgcataaaaaatgaacgtccattcatgtgggtgtgaaaatgttgaaaaatgttggaaaatgttggaaaatgtcgacccgcaggccttaaatccctgctagtatcgaaagagcagctaagaatgaaagggtgtgaagcgaagcgagtgccattttcaatatttgccaaagccacccagcatgcggctaatctggaaaatcttgtaccacgtcacggggaaaacgcttgccgcatcaacagttccatgtactccatcaccggggctgctgactcaccttctctgggtggcgagaattcctggccagatgctatacccatccctggagccacatttatttcccttctgccgctggacaattgcaataaatgtttttgttgcctacttttaagggttggccgccttaagggcttttcactggcttttaaacgaacaagcattgggtataaaaatttcatttagatccgcagcagcatccccaaaaactataggtaacattgtcgggcatttgaaggcgatttaagtgccgtcgattcccaattctcaaagggcagcaatgggtaattgatttgataattctgattgttcttttttatgccggatgcggaaatctggagggcagaacaaaaagaatagaatatgaataaaatacatttaactaataggtaactaaccttatagaagaatacaatatagtatttcttatatgacaatgaagtatatgagctacagaaatatcttctatgattaattttatagactagttaaacctgccactcttatcgccatctattgaccggtgcatccatttccttcacagaccgtgccaatcacagtgatcccacgatcgagatctgccgccgctgtccgccggactacgaggcggagtccctgccctcgtacacgattgtttccggactgccgacgtacgatgatgcactggaggagttccgcaaggcgggcattatcctcacacccgccatggtgcccatcatcaagatcttcgagtgcaacgagaccggcaaggagcaggcggtgggctacagcctggtggagacgaacatagcgagtgcggatgctgccgcggataatgtgtcgctggcctcgaccacctgcaattgtggcaactcctcgcccacctcatcgctgcccagttacagtgccgccacggcggctgtgatggcagcggcggctgctgctcctccccaggtgatcgaactatcaccggaacacctggcctcgttgtcccagaagcgtctctccctgcagatctcattcaataactcggtgcgccggcagtcgccgctcaggaatcatctgctgagatcccgagcggtgggaaataccgccggtgttggtccatcggaggcagccggtcctgccattcacgggtcgggagctcacggagtccatggcggcggaggtgcaaccattctgcccgttctgcatcgctcctcctctacaatttcactgtccaacgaacgccagttgctggatcaacgcctcaggcatttgcatcatcgcggttccctctactgagaacccatatagagcattcaaactgcctgactaatccttcctaaagggtattccctatgttaatcatatgccaagagttgttagttttaagacacagacataataaacatgcgttgtttttgatggcttttgtttcaattagataagttaaaatattctatgacaaatattgaaggctaaacctctgctccaatatttctatagcttgatagaaggttattaggacttttggtatcaattcaatatcattaaaaagatacatacatatgtatttttatgtataataaatatagggtacttttaactaccatggttgtttactggtaaacgtaagtataaatcgcataaaatcaataaaagcaaatcaatacaccggcacctcaactaattactatggaaactaaacaaaatgttttatgccgtcgccggcttttgtagtttagtttgatatttaaagctttttttaaaagtagctatgagcgcctcaacacgtactggattaattcccacgcccaagaggcatatcaagtatttaaaaaaggtaaagacctaatcagtatcctacatttgtttgttttcttttactagtatgaatcattattagtacaaaaatgatattacattgagattctaaaggcgatcaaagttcggctttttattttcaaaagtatttaaaattaaaaaagtacaattataaaaatttgatagttctccatcaattgaagtgcttctgttttaatagcgcaaaaaccaacatggcgatatatcgcgaatgcctctcaagttcgaggccacgcccatgccgctatccttacgcccgtttggaggactcttcaatccttttgccaaaggatgctcggtgctgtgcaatcatccggcgccatctggtgtcaaggatgtgattaatcagctgaagacatcgttggcgatcgagggcaaaggccagcagcatgggaaacaggataaaattcctgaggagccggatttgcagccccatgag

SEQ ID NO: 31343 - DNA, 714 bp, DROSOPHILA
atgacaatgaatgatcccacgatcgagatctgccgccgctgtccgccggactacgaggcggagtccctgccctcgtacacgattgtttccggactgccgacgtacgatgatgcactggaggagttccgcaaggcgggcattatcctcacacccgccatggtgcccatcatcaagatcttcgagtgcaacgagaccggcaaggagcaggcggtgggctacagcctggtggagacgaacatagcgagtgcggatgctgccgcggataatgtgtcgctggcctcgaccacctgcaattgtggcaactcctcgcccacctcatcgctgcccagttacagtgccgccacggcggctgtgatggcagcggcggctgctgctcctccccaggtgatcgaactatcaccggaacacctggcctcgttgtcccagaagcgtctctccctgcagatctcattcaataactcggtgcgccggcagtcgccgctcaggaatcatctgctgagatcccgagcggtgggaaataccgccggtgttggtccatcggaggcagccggtcctgccattcacgggtcgggagctcacggagtccatggcggcggaggtgcaaccattctgcccgttctgcatcgctcctcctctacaatttcactgtccaacgaacgccagttgctggatcaacgcctcaggcatttgcatcatcgcggttccctctactga

SEQ ID NO: 31344 - protein, 237 aa, DROSOPHILA
MTMNDPTIEICRRCPPDYEAESLPSYTIVSGLPTYDDALEEFRKAGIILTPAMVPIIKIFECNETGKEQAVGYSLVETNIASADAAADNVSLASTTCNCGNSSPTSSLPSYSAATAAVMAAAAAAPPQVIELSPEHLASLSQKRLSLQISFNNSVRRQSPLRNHLLRSRAVGNTAGVGPSEAAGPAIHGSGAHGVHGGGGATILPVLHRSSSTISLSNERQLLDQRLRHLHHRGSLY

SEQ ID NO: 31345 - DNA, 3833 bp, DROSOPHILA
aatcatctgctgagatcccgagcggtgggaaataccgccggtgttggtccatcggaggcagccggtcctgccattcacgggtcgggagctcacggagtccatggcggcggaggtgcaaccattctgcccgttctgcatcgctcctcctctacaatttcactgtccaacgaacgccagttgctggatcaacgcctcaggcatttgcatcatcgcggttccctctactgagaacccatatagagcattcaaactgcctgactaatccttcctaaagggtattccctatgttaatcatatgccaagagttgttagttttaagacacagacataataaacatgcgttgtttttgatggcttttgtttcaattagataagttaaaatattctatgacaaatattgaaggctaaacctctgctccaatatttctatagcttgatagaaggttattaggacttttggtatcaattcaatatcattaaaaagatacatacatatgtatttttatgtataataaatatagggtacttttaactaccatggttgtttactggtaaacgtaagtataaatcgcataaaatcaataaaagcaaatcaatacaccggcacctcaactaattactatggaaactaaacaaaatgttttatgccgtcgccggcttttgtagtttagtttgatatttaaagctttttttaaaagtagctatgagcgcctcaacacgtactggattaattcccacgcccaagaggcatatcaagtatttaaaaaaggtaaagacctaatcagtatcctacatttgtttgttttcttttactagtatgaatcattattagtacaaaaatgatattacattgagattctaaaggcgatcaaagttcggctttttattttcaaaagtatttaaaattaaaaaagtacaattataaaaatttgatagttctccatcaattgaagtgcttctgttttaatagcgcaaaaaccaacatggcgatatatcgcgaatgcctctcaagttcgaggccacgcccatgccgctatccttacgcccgtttggaggactcttcaatccttttgccaaaggatgctcggtgctgtgcaatcatccggcgccatctggtgtcaaggatgtgattaatcagctgaagacatcgttggcgatcgagggcaaaggccagcagcatgggaaacaggataaaattcctgaggagccggatttgcagccccatgagacggataatattccggaggatctgttccggcgatatgcggaaacggactcgcgtccgatgacgccaacgcccacggtaactagtatccataccaggaccagtgctgggtctttctatcgccgatgcattactccggaatggggtaaacacgagaacataaagcgtaagaagatcattttggacctacggagatcgcactcccaggagacgctctactggaagcccagttcggacctgacccaaagcggcctggaggaggacaagaaacccaagagtgccggtgccaatgaggacaagaagccaaagaggcagccatccaacgagcagagaccgaagtcctcgctggccaccgcaactctgacacccggcggagatgccatcaatgaccaggaggccaagcccaaaacctgcatcaatgagcatgagctcagcgacgaggatgtgcgaaggggcaagaaacgcaagaagttgaagccagctcaaggtgaataacgctaatctttaatctttaagattaaaactaaaacaaagttggctttgagttgaaacttatggctacttatttcttccaaaattaaagccaccaccacattccacttgagtgaggatcccgagacgcaggtggctgctttgggtcccgattcactgaatcccagcaccagaccaagtttgatacccaactcactcaccttgttgcccaaggacaagcgagaaactgaacgggaaccgatcctcttgaagggcagtttccttaccgatgaagcttttcaggcgctgaaaaccgatttggatgtggatcttattgaaaatacttttggtcgatatgtaagtgtaattatttaaaacttggtattggttttttaaagttgaaatctattttccaaagctcaatagagctctaagagaggccatcaagtacatgccacccaaacccaaaactgttccgaagcccgtcgacgataaagtttcaccagaaacaacatccaaaatgccgcgaaagttctcaaaatcagcgacaagattcgatgtacccatggacctttccatgctaaaaagtgtgtacgctttaaatattttaaggaaattaacttaactaattaacttacccatttagatatgaccccgtgggattatttgagcaagtacgtctgggtgtcgcaacagagaaaacagctgtataaacgagtattcttaaagtatctgagtagaatcgaggagccggaaagcgagttggccgccatgggaaatgatgagctgccggaatacaaataccgtgagagaaccctcgtctggcagagtctgccgcaagctctcgaggatgttctggagttccatggcaccgaggaaaatgtacaaggcacactgagaatgttgggctacgacgcccaagcatcgggtgacttggacttccgcgcctggtgcggaattgtctccttcgccgaaagattggccctagctgatgaatccggatcggatgattcgtgcgacgagttggaaaaggccgatttcaatagcatggagcaaataatgccaaacttcactgtgcccgaaaagcttaaggaaattttcgatgtaattcgaaagacacataaaaaaagatattgatttaagatttgtttttaataattgtcactaaattgcatttacaaaataaaaactatgtgaaacaaaacaaaatatcatcagttatgaatctaattgttgtagaaaaagaacatacatatgtatacataaaattcatttgtaaacaaagtgaaaaaacgattttattatttttaaataaaaatgagaaaaacttgaaaacaattttgaatatcgcggtctttgaaattgtatactaacaattattagatattaacgtaaaaatactgacaaaatacagccatactaaaacagtcgatatggaaactgaagcatcggtattgtgacaatcgacctatcgatactaccattagtgaataatccaaacccgactaattaaattgtaaattaaaagtaaaaactcgttaattaccaatcatggccactttggaagacaaactattgggcgagaaacttgagtactactgcagcagcagcgagggcgaggacaatggtgacgagggaggcgataataagggggcatccgggaaatcccgatgctccggtctgaccatcgacacaaatccggatgcgactccggctggtggattccggcagcaaagctcaacgaacacgggtcccaagggcgttgtaaaggactggcagagattcaagcagctcgaggcggagcgacgggatgaaaccgaacgtcaacgtctggcgctggccaagaagctcaccattacggcgacaacgtcggcggaggacgaggaacgcaagcggcaggaggaactggacgccgagctggacgaactgatgagcgaggacttcctgcagcagtaccagaaacagcggatggccgagatgctgcgccagacggggcaccaccagcagtttggccaggtgcagcagttgaccagccacgaggagttcctcgcctgcgtcgagcaggagaacaagcacaccaccatcatcatccacatatacgaacgacaattggccgcctgtgccacgctgaacaaat

SEQ ID NO: 31346 - DNA, 1617 bp, DROSOPHILA
atgcctctcaagttcgaggccacgcccatgccgctatccttacgcccgtttggaggactcttcaatccttttgccaaaggatgctcggtgctgtgcaatcatccggcgccatctggtgtcaaggatgtgattaatcagctgaagacatcgttggcgatcgagggcaaaggccagcagcatgggaaacaggataaaattcctgaggagccggatttgcagccccatgagacggataatattccggaggatctgttccggcgatatgcggaaacggactcgcgtccgatgacgccaacgcccacggtaactagtatccataccaggaccagtgctgggtctttctatcgccgatgcattactccggaatggggtaaacacgagaacataaagcgtaagaagatcattttggacctacggagatcgcactcccaggagacgctctactggaagcccagttcggacctgacccaaagcggcctggaggaggacaagaaacccaagagtgccggtgccaatgaggacaagaagccaaagaggcagccatccaacgagcagagaccgaagtcctcgctggccaccgcaactctgacacccggcggagatgccatcaatgaccaggaggccaagcccaaaacctgcatcaatgagcatgagctcagcgacgaggatgtgcgaaggggcaagaaacgcaagaagttgaagccagctcaagccaccaccacattccacttgagtgaggatcccgagacgcaggtggctgctttgggtcccgattcactgaatcccagcaccagaccaagtttgatacccaactcactcaccttgttgcccaaggacaagcgagaaactgaacgggaaccgatcctcttgaagggcagtttccttaccgatgaagcttttcaggcgctgaaaaccgatttggatgtggatcttattgaaaatacttttggtcgatatctcaatagagctctaagagaggccatcaagtacatgccacccaaacccaaaactgttccgaagcccgtcgacgataaagtttcaccagaaacaacatccaaaatgccgcgaaagttctcaaaatcagcgacaagattcgatgtacccatggacctttccatgctaaaaaatatgaccccgtgggattatttgagcaagtacgtctgggtgtcgcaacagagaaaacagctgtataaacgagtattcttaaagtatctgagtagaatcgaggagccggaaagcgagttggccgccatgggaaatgatgagctgccggaatacaaataccgtgagagaaccctcgtctggcagagtctgccgcaagctctcgaggatgttctggagttccatggcaccgaggaaaatgtacaaggcacactgagaatgttgggctacgacgcccaagcatcgggtgacttggacttccgcgcctggtgcggaattgtctccttcgccgaaagattggccctagctgatgaatccggatcggatgattcgtgcgacgagttggaaaaggccgatttcaatagcatggagcaaataatgccaaacttcactgtgcccgaaaagcttaaggaaattttcgatgtaattcgaaagacacataaaaaaagatattga

SEQ ID NO: 31347 - protein, 538 aa, DROSOPHILA
MPLKFEATPMPLSLRPFGGLFNPFAKGCSVLCNHPAPSGVKDVINQLKTSLAIEGKGQQHGKQDKIPEEPDLQPHETDNIPEDLFRRYAETDSRPMTPTPTVTSIHTRTSAGSFYRRCITPEWGKHENIKRKKIILDLRRSHSQETLYWKPSSDLTQSGLEEDKKPKSAGANEDKKPKRQPSNEQRPKSSLATATLTPGGDAINDQEAKPKTCINEHELSDEDVRRGKKRKKLKPAQATTTFHLSEDPETQVAALGPDSLNPSTRPSLIPNSLTLLPKDKRETEREPILLKGSFLTDEAFQALKTDLDVDLIENTFGRYLNRALREAIKYMPPKPKTVPKPVDDKVSPETTSKMPRKFSKSATRFDVPMDLSMLKNMTPWDYLSKYVWVSQQRKQLYKRVFLKYLSRIEEPESELAAMGNDELPEYKYRERTLVWQSLPQALEDVLEFHGTEENVQGTLRMLGYDAQASGDLDFRAWCGIVSFAERLALADESGSDDSCDELEKADFNSMEQIMPNFTVPEKLKEIFDVIRKTHKKRY

SEQ ID NO: 31348 - DNA, 2204 bp, DROSOPHILA
gcactactccatggacggaaccaccagttacagatattactactcaaaaatccaatccaccatgcacttgtactgaaagcactactcgaaagacaaatccgacttgtacttgtactgaaagcactactcaaaagacaaatccgacttgtacttgtacggaaagcactactaagaagacaaacccgacttgtacttgcacagagagcactactccattgacggaaccaccggttacagatattactactcaaaaatccaatccaccatgcacttgtacggaaagcactactcaaaagataaagtcgactagtactactcaagggactgagccaccaagcactcagaagactcttccacccaatccaccaagcactaagaacaccgaaccaccaaatagcactcctcctccagagaaaaccacccgaaaaccatgcggatgtagtagctctcacccgtctggatggaatcctggcggtcctataatcccaagcttttcaacgactaccaagaaaccggacgaatgttcgacaaaaccttcaggttggaatcccggaggtccgattgtgacaataccaacaacttctcgaacgccctgcgggtgtgtctcgtggaatccaccaggttggaatcccggcggtccttggcctcccacatttcccggaccttgcagaccaggacctgtcattcccaacaatgcagaatgcggattcgatccacaatgcccacaaggctggaatcccgatagtcctctattacccgatcccgaaattcccgggaattttggacccggacctgtcattccccgcagtggagaaaatggatgtggctgctcctgctcgtgatttgcatgtccaccattgatgtccaccaaaagcggaacttaggaaagagcttcgtattaccgtgaatcgaatacaaatactgatggaagattgcatccaataaaaaccatgttgattgaagaagaaagctgacaacacgatctataatttttacctaattatttttcattgaattttattgctttgcaatcagacattgcgggacccgccgggatatgacggtacaggtcagcgggacaggtcggcggaacactttggtgggacaggtcggcggtacaggcctgcaggactgatcggcggtacaagacgcgggacacatcggcggggcatataaaatattgcgaaaataactcgtagtccatttttaaataagttcaaaatcaaactgaatgtggtaattctttgcgctttttggataccaaatatacccactacaaagtaagggcatggatggtgatgattttccactcagcctgtgccaactgcttatataatatttgaaaattgaacatttggcgctgcacttgagaaatgcttagaccaggccatgatgatgaagtttataaaactcttgaccacatttgccgcacccgtcgcctcgccactcccctcccgttttgaaaagtctttccttttcgttgccttccactttggacatgtctggccagctgacgtcggaaaatgtggttagagaagaggtccgaatggatcggggttggggatttggagatggtgatggggatggggatggggtatatggaatgcattgcacttgactttagcgccacttgtaagtgtaaattttatttgagccagcgaagtaggtacacatgtagacactcacattcaacagccatgccctttgtcaagagagctccacatccaaagtgcctggccagcgatattggcgttcgcactcgtacttggtctgggacttggaaacattttcgacttggtcttggattcggctggggagcagtggtttcggttccgtagccggttttttggaccggagtttggcgtcgtgtcgttgacagctaagtggtgataatcgctttggaattgaatctgagcaagtacattcacaggcagacgaagttaaaattcaaaaatgcaacagactaaagatgcaagagttttggtcaatggccatcggacaaaaggcgtcactcgctttgccttggtctgtctcaatttttgggtgggcgtttgggcctttgtgttttggttgcggctttactagctactacggtttctttggctggttactgtggctttaatttggtgaactgaatttgcagcatcacgaagcgaatgggcttgatttaaataaatgcttaaagtcataaaattatgacttga

SEQ ID NO: 31349 - DNA, 204 bp, DROSOPHILA
atggactacgagttattttcgcaatattttatatgccccgccgatgtgtcccgcgtcttgtaccgccgatcagtcctgcaggcctgtaccgccgacctgtcccaccaaagtgttccgccgacctgtcccgctgacctgtaccgtcatatcccggcgggtcccgcaatgtctgattgcaaagcaataaaattcaatgaaaaataa

SEQ ID NO: 31350 - protein, 67 aa, DROSOPHILA
MDYELFSQYFICPADVSRVLYRRSVLQACTADLSHQSVPPTCPADLYRHIPAGPAMSDCKAIKFNEK

SEQ ID NO: 31351 - DNA, 2195 bp, DROSOPHILA
gataaaagcaacgtggttcttattccgaaggctgtcaagcactttataaaagcccaagaccgaagcacacttatcactgaagtcaaacaagttgtcagtagcagtaccaacatgtcgaaaattactctcatttttggtaaggatatagaccgctataccataaaagattattaacccttatgataactattttagctattctctgcctttgcgtggctgttcaggctcaaactcgtgaacaagaaatttgccgtcaagaaaacgaaacttgccgtcgaaatgaacggagattgggagttcaaaatgatgtttcgaccacatttaataatcactgccgccgccagtcaggcattcgaaactggcgaaatgtctctcgttgcgaattgtctctggctacttgtcgatgtaagtatctgatttgaaataactatatttcatataaaaatataatattttattatcaaactactatcgatttaacagtgacactcgagcgttgtgctgttataaactgcaaaaatgtgagaaacagcattgatggtggggtcaccgctcgccctccaacttcaaggaggacaacccggcgaattcctgacacccgacgacctcgaactactcgtaggaccccaactacccgtcgtgctccaactactagatcttctcgtagaactacacgtcgtcgtgctccaacaactagaactactcgaagaactacacgtcgtcgtgcgccaactactagaactacgactcgtcgacctactgaagaataactcctagaaccatttcattcagagtaatatcctgcaaaatgtatcctgctgaaaaacaataaaaactttaatgctctcaaatatagaactctcaatattactataacaggttctgcttaaaaaacaaaatatatttggctcaacaactttgatcgaacttttttacaatattttatcatatcattttatcatagaatatttatttcatatatcattacttaattaatatcttagggcattgaaactgttgaattattatcagctttattaaattcagcaggggtttcttgtgtaaccgctacgctactctcttctacattttttgcggcagtatccaatttcgatgtggcgtttttgttttgaggtatttccactccaataatgctcattatattcctcgaacttttccggcagtcttcgttcatcagcgagtaaaagagtattccggctaaaaaaactccaagtattatgccaagaaaaagacaaccgatagactttctggcaggtagtcctttgaatcaaaaatgtattaattttaaccaaaaatagttgaataatattttctataataaaattcaatattatttgtaataagcactcaccttcatttaggaagggtttacttgccagtttcctatttaattttgatgagcttattgggatcatttttggacaaggtctctttggcgaataaatttaaaacgtgttgagctcattcttttcttataaaaattaaacgactttgaaacaattgagtaaacatacattttaaatgcataaaaattgagcagacagaaatgcgcacgaggtaatttaacacgtttcgtttatataattaatataaacgaagttacatatatattcaacttttcgaatatccaattttgagcggtaatcgaatattgtttcattgactgaccagttgcactaagtgatatctatatcgatgtgctttccatatctagataatgattgcgaaaagcagtttggaaaaaatattatatattgattgtttgtataagtaagttttatttatttcatcaaaaaattctaagcatatatattgagagcatcgaagtatttatttaattgcagtaaagacggattttttatagatgtcgattaaatgtttcgaatctgatcttggtattttattgtgcaagggctcgccggacattctcgcaggacaacgtgttacatcgctcaagggtcactgcacaaagataacatatgtataaaatatattttttaaaaagtgtttatatatacttacatatacaattagcttttgcgagttcgcatcgggagatttcacgccaatttctttgtgttcgccgacagttctcattgaaaatattcgaaatatcgttgtttctgccatttctcacgacccttgactcacatctggcgacaatccgtctacaa

SEQ ID NO: 31352 - DNA, 195 bp, DROSOPHILA
atgaacgaagactgccggaaaagttcgaggaatataatgagcattattggagtggaaatacctcaaaacaaaaacgccacatcgaaattggatactgccgcaaaaaatgtagaagagagtagcgtagcggttacacaagaaacccctgctgaatttaataaagctgataataattcaacagtttcaatgccctaa

SEQ ID NO: 31353 - protein, 64 aa, DROSOPHILA
MNEDCRKSSRNIMSIIGVEIPQNKNATSKLDTAAKNVEESSVAVTQETPAEFNKADNNSTVSMP

SEQ ID NO: 31354 - DNA, 3121 bp, DROSOPHILA
atggtagttgaaatgcatatagctcaagaaatgaataccaataaaatctccagcaacagatttatggaaatcctagcgctttgaatcaaataaaaaatgtgcaactgcgtacaaacttcttagattgtaaatacccttcgcaagaaagtaacatgttaataataataaattcttgtaatccgccacacgatctgaatactaatgtttaccaagtaattggtaataacattctgaataaggaaatcactggcatttacttgtctaccattaatttatggtattgtcgaacgcttatgtttggtgaaaatatattaaaatgcccgcttagaatttatggccagtgtaatggtttccacagaagcactaataaaatgtcgaaatttattcattttcacgatgttgccaaatttatagtgactcctatgaaattttcttgccgtggattcctagaagtgagtggatacattcttaaatttaattttaatttaatttagacattgccaagaataaaaacttttctgatttgctcaaatattaaaaattgattcaagtatttttttaattcatttaaatgatctgaataaaaagtaaagtgatttacagtgctaagctagcaccatgttttatcaataaattccagaatgactaattcattcgctattcgaattattatttagggaatttaaaaaagtctctcaaacaaaaggtttgtttgtgaattttcttatcaatggaattccgttcttgctgaatcagtgaagagcccatttcagatttacgctattcataattagaaatttcatatattttatatgtatccttttcttttcttcaaaatcaattttgattcgtaaagataaagttttctgtatgctaacataaaaaacattaatgcataaaataggccctaacgaaatatacatttttctgtagctgttgctaacttcgcgacccccatagtgttgggtggccccagcggcaggccccaccttcttgccactcacctgtgcagtcgctccgtttgctcggcttcgttttgcagatcattgatggcgaacagctccatctcgccgctgcgcccgaatatcccattggggatcttgcgcaggaacttcttgagcacgctggcgatggtgaacaccgaatagttgtccacgttgacgagccgaccggcctgcaggaagtggatgagcttcttcattgcgccctggtggccgggtgcgcggaatacatcgcggcggttcggtgactccttgttcagtttgaggatcaggacgagcaggggcccgggaatgttgttgttgtgcttgcacacctcctccagcggcacaccgaatttgaccttttcgaggcggtacgggtaggcgggagcggtggctgggtggccgcaggaggtcaccacgttgcccaaatccgcggcgcgcctatggacgcgttctgcccagctggacatggtttttcacgcgattttcctgcctccctgccttcctgcctgtgtttgtgtgcttttgcgtgcgcgtgtgtgcgtgtatgtatgtgctggcgagtttttcagcgagcagaggaaaatgtgctcggcagattttatggttttatgctggccacaaacatgttcacttgactggaatgttaatttgttcgcctgcccaatatgcggaaaatatctttcagattttcactatttattattttttattattttttactttattttcgacacctactctcgcgtcgcagccccagattttagcccaaaatgagcagctttgaaaagccagctttgattaaaaaatcgccaccactcctgctgtatgcatttttctcttctcttcttcgcgtctctcttttacactgcgtttctccgtttcttttgcgcttttcttctttttggccaacgcctcggagctgctatgccttttgcgccccttcgcttactgaattaaacgctcgcctatcgcatttcgcttggatttgttgagaacgcggcgttcggcgtcactttcggttagtttagcactagtttagttgtgttatttcggggagtgtttaattattttgctgcgctcgcccgcacgctcgacttttttcgctgtatattgaaaacggagtgtggacatcaagcggtagctgcagaatgcctgaggctcagcgcttcgctgcgaaataccaacggaatataccaagaaattatactgcacaagtactgtgatagtaggggtgttccagcattcgttaagtttcaaaatgccaaagccaaagataaaaagatataaaaaaaattaacgcacttatgcaataccaaaaacgaataaatacataatgttactacttttatcagggaacttggcttaacaaagtttatacaaatgcacaatgaaattaaatctacttaactgctaactgttattattagttatttcatacgatatgcaggaggcagaaagttgcttattaaacatatattttcataaatatttcacgaaagtatgagaaaatttcaaaatcgtttgataatatactaatacgctatttagccacatatataagtctctaatgtatttcttaaataaatcatttgtaaagctataaactaaattcttttataaaatctactcccaaaaaaaacagcagcatcaaaccttagcgtcttaatattaattcaaatgaacactcatcgcttgccgattcaaaatcgtaaggttttcttttaaattcaaaactcgctggaatgccgagacttgtgacgtcacacgccatcttcatgctgcgcggcgagaaacatgcgcaaacgtcaccttctcagcggcagactcaggttgtccatccctggttcaagtaatgtcaccctggtttttgttttgtaaagtgaaattgttgcaagtcaaacaacaataataaaaatcattaaaagcgcgtacaagaagtcaaaaagaattgcccacacaagtacgtattgacgggctgtcagctttgctatatggaaatcaattttccactcaacttttacttggaaatcggtatttaattttgtgttgtctgctgtgaaagtaacaacaacaaaatcaagagtaacgtcaagagcaaaaatagttttccccattttcaaaattgacaaatatag

SEQ ID NO: 31355 - DNA, 1121 bp, DROSOPHILA
cttgatgtccacactccgttttcaatatacagcgaaaaaagtcgagcgtgcgggcgagcgcagcaaaataattaaacactccccgaaataacacaactaaactagtgctaaactaaccgaaagtgacgccgaacgccgcgttctcaacaaatccaagcgaaatgcgataggcgagcgtttaattcagtaagcgaaggggcgcaaaaggcatagcagctccgaggcgttggccaaaaagaagaaaagcgcaaaagaaacggagaaacgcagtgtaaaagagagacgcgaagaagagaagagaaaaatgcatacagcaggagtggtggcgattttttaatcaaagctggcttttcaaagctgctcattttgggctaaaatctggggctgcgacgcgagagtaggtgtcgaaaataaagtaaaaaataataaaaaataataaatagtgaaaatctgaaagatattttccgcatattgggcaggcgaacaaattaacattccagtcaagtgaacatgtttgtggccagcataaaaccataaaatctgccgagcacattttcctctgctcgctgaaaaactcgccagcacatacatacacgcacacacgcgcacgcaaaagcacacaaacacaggcaggaaggcagggaggcaggaaaatcgcgtgaaaaaccatgtccagctgggcagaacgcgtccataggcgcgccgcggatttgggcaacgtggtgacctcctgcggccacccagccaccgctcccgcctacccgtaccgcctcgaaaaggtcaaattcggtgtgccgctggaggaggtgtgcaagcacaacaacaacattcccgggcccctgctcgtcctgatcctcaaactgaacaaggagtcaccgaaccgccgcgatgtattccgcgcacccggccaccagggcgcaatgaagaagctcatccacttcctgcaggccggtcggctcgtcaacgtggacaactattcggtgttcaccatcgccagcgtgctcaagaagttcctgcgcaagatccccaatgggatattcgggcgcagcggcgagatggagctgttcgccatcaatgatctgcaaaacgaagccgagcaaacggagcgactgcacaggtga

SEQ ID NO: 31356 - protein, 150 aa, DROSOPHILA
MSSWAERVHRRAADLGNVVTSCGHPATAPAYPYRLEKVKFGVPLEEVCKHNNNIPGPLLVLILKLNKESPNRRDVFRAPGHQGAMKKLIHFLQAGRLVNVDNYSVFTIASVLKKFLRKIPNGIFGRSGEMELFAINDLQNEAEQTERLHR

SEQ ID NO: 31357 - DNA, 1781 bp, DROSOPHILA
aacccttattttagctttaaagtcaaaaattcaacttatttcacagtgtgtaaacagtttcttgacaaactgtatgtacataaccttaaatgtaaagatatattgatgtcaaatgttcaatttcgcttcatctttcagatttttaataagtttataattgagttaaaatgtcggatctggtataaattaagattaagatttacagatttgagcagattttaattcttaattgtttgatgcttctgcctaaagcacaactgttacatttcatagcaaaattcatttttttaaatataaaggaattttaatttagttatgttaaggggaaattcaataactgttatatacagtagaattcacctttaagtataatacacacatacataggttctatacaaccatggcagttgaatttcatcatggctgccacgaattcgggaattcccaggcatttcgaaagtttatggagcatttgattgcaaatggtaaatccatatgtacaaaacatatgtatgtacatgcatgcatacatctattttttgcctacgccgatatatcgcactttgcacttactttgttgttgttgctgatgcggttgttgttgttgctgctgctgtggttgttgcagctgctgtggttgttgcagctgctgtggttgttgcagctgctgtggttgttgctgccgttgttgttgttgcttttgctgctgctggggctgtggtgctgcagcgctatcctgtcctcctttcttgttctctggggtggtaattggaaagtgcatatatttgaatagctgtatggtcctgcaggtgggacaactcactatctttttttcccatgatttacttttgagggtttcgagttaactgacgacttttaatagacgattttttaatgcgtcacagtcttttttagtgatgggaggccttaggggtgggcgataagttattgagcggcacagctaaagtgttttctgttatcgattattgataggaacatacggactaggcgggccattcaagtggggactctatttatatttgtatatttttatacatgttttgtatacatgttgcttgttgagtcaaatgtatgctatattcgttgaaaagcatgtatccggcaaaagaaaccgatttcgacctaataaattatatatattataatatattatatatattatatatataaggaccaatagccgagtcgatctagccatgtccgtctttccgtccatctgtcagtccgtacgaacgtcgagatctcaggatgaataagaagctagaaaattgagattacggaaagcccccaaaacttcccacgcacattttcaaaatgttttgacatttttcatatttttattagtcttgtaaatttccatcgatctgccaaaaaactttaaattgccacgcccacagttatgcaaaatgtgatatttttcatattttgattagtcttgtaaatttctattgatctgccaaactactattactcccacaaaccgccgaaaagccacgcttacaatttttaacaattttaattttttttcttattttattcaccaatatctaatttgcgttcgcatttccaatagttgagtaactggcatctgattatcggggaagtttaaaataggaaaaaaattttaatttactagtttttttttttaaattttattttggaagaagacatcagtaagaatcaataaatttaatcaccactgctagaaagcattatttttatttttccgcctttaagtgaaaaatagttttacattccag

SEQ ID NO: 31358 - DNA, 249 bp, DROSOPHILA
atgcactttccaattaccaccccagagaacaagaaaggaggacaggatagcgctgcagcaccacagccccagcagcagcaaaagcaacaacaacaacggcagcaacaaccacagcagctgcaacaaccacagcagctgcaacaaccacagcagctgcaacaaccacagcagcagcaacaacaacaaccgcatcagcaacaacaacaaagtaagtgcaaagtgcgatatatcggcgtaggcaaaaaatag

SEQ ID NO: 31359 - protein, 82 aa, DROSOPHILA
MHFPITTPENKKGGQDSAAAPQPQQQQKQQQQRQQQPQQLQQPQQLQQPQQLQQPQQQQQQQPHQQQQQSKCKVRYIGVGKK

SEQ ID NO: 31360 - DNA, 6162 bp, DROSOPHILA
tgcaatttcgtttcgtggaagcacgactcttgcatgtttaaaatgtacaccgaaatgacttaataatcgtattgaagatgtctctgtagtcaaagatcgaagttcaaggagttcaccaagtttagttggggcattgccacataaaatttagtgagctataatatacatataagagctaccaatgtatatctcggacattttcttatcgttgcgttcgagttgtcggctttaactttcacatactcgtatagcccatatcaagcatacctgctgtaataaaagctctcaagtatcaatggttctgttctgactgatataatatgggggtacaagttgcttttcgcatttttaattgtgctcgggagtggtaatttgaacacttaccggatctaagtcggagtcccatatatctttgaggtcgccatcgtagaattccatggttggcgctagtcagatgcgctctaagaactcttttagttgttttttttttattgcggttcggggatggtgtggtatggtttaattcggttccactcggttgcagtcacactaatttttctactttaacccacttaagaactgtcttcttataatttttgtagtttatggtattatactattatttttatacgattttgctgactgaaaagtggctctttctccgctctttctctttctttatactttatcttctttattcctcgtgcgctcttctacctctctttctcttttattttttactttactttttttccgtaaagaacagttctgggtgatgactgttggttgcttctttataacacttattaaggggaaacctgttgcttccagagaatgttttcacttgacattgttatagtctgcgtgtgtgtgtgtgtgtgtgactttttcgtttgtatgtgtataccgggcattcattcgtattggttgtggtatttggggtgtatctgtgtacggatctaacttggtttacaactgtcggctggatttaacttgttgcatgcgcttttctcgtcggattatatttggcgttaacattaattgaattattaacttttttcccgattcggaaacgaaacactcgattttcatagaaaatagttattatatgtatgtttagattcaacgttgataaccatataattttagtttatttgatttttcttttcgctgtactgtgttttggactcgattacgatttcaattgatttaattgaattttttgatgtgttttgtgtgtgaatgggcagtaaaccgctttagaaatggctttgctcggcccgtgtataatagcatttaatatgtgtagttaatatcgttaactttagcaataatatttgtatgtttggatgtatgggatggtagcacacaattagaataaactgtccgtagtgcgactgcagccaaaaacggtactaaactaaatgtcggtgaaattcttgtgaatgcgaacgaacgaatcgaaacgtcagtcctctgctgacgtcgctgccgccgctcagtcgctctcttttccgctacaacgctttgtctctcttccgcacgtatagcgctctctttccgtctatctctttgtctctctctctctgcgcttataatgccggcaatttcagaatttcatacagaaaacctcgaacaattgatacttttgtaataaaaaaaataacaaatttaaattaaggatatgatgaattgatgtttcctcattaaaatgagaagagaaaaggtacaataaatggcctaaatatactctttcaatttgaaaagatcgctacaaaataacatcgtatttctaatatcctgtgttaatagtgttattgattcgttaatctacgggaaacgtttggggttgttgcttttcgttcccaaaggtcaactaatcacataccttatgttacatttgctatagtttaattgaatttattgacttcttaacgtgtttggggtagttgtaactgaagactgaagccgtgtactatacatttcaaatattgtattcccatggttcttggccaccaatctacccttgatactgtgtaacatgcgggttagccggcatcgaatccgaatccaaatgcgatagtatccgactctctcccgaaaagcgtgctcttagtgaaactttcacgctctttggggtttcgagaagtgaatgtaagttgattgtcgtaagccggctttgacgtcgttttgagaccggagatcggagaccaggggcccgagatttgagatttgagacccggagccgcataggaaaggaaaacaagtttcttccgacgctatgggctgcgtcgacgtcagcgttgcggcaacatttgttaacctgttttttattatagattttgtgttgttgctgcgagtatttgatttggcccgaatgcacgatggaataggacggggggtgtaccccgctctgcaaccagacccgactttggctgctgccgcttggtaacactcgctccgttgatcttgtcaacttgaccaagttatttgaactatgcacatgtgcagaccatagagagtcgggccattccaacacaggcgggccaagccgagtcatttgaaggctgtttgccggagctgggagccaagagttttgttcggagatctttgagagccagagcctatggatatggatatggctgtggggatctttggggcctggcctggacttatgctgctgctgctgtcgctgctgttgctgctgctgctgctgcaatgctgcgacgacggcgacgacgcaaagtgaatgtactttcaaaccaaagatccggtttaaagctgcccgggcaacagatacagcgcagacaaacgacgatgacaacggcgatgttttcacaaaaacgcttgtgtaatacatatggagaggcataggtatatgactatagctccgtgctccgtgcacgtcatgtatacccccgctgaaaatatacacacagctctcggccactaatttcttgtttgttgacgtgattttattgtattcatttaaaaatttcaaatttgaaaatccccaatatggcttacaccacatagtaaattggctgggccaacaagacgcctctgagagggatcagatcattggtgcgcccttctttttcgtcgctgagtacattgatttctcctttcgtttggtcgtagtggatttccctgaattatgacacagatatttgtgcgctgtattcgatatagagaagagcgttttgttcgcactcacttccaaaaacatttcgttacactttctaattgggaaaaaggttaagatgatcttgtcaaagttgatcgattccatggcttcacatcaattgactctcggtgtcaatttaagaggtttatggtaaatttgcaagggtagcctttcccttcttgtttcaaaattttgtgtatatacgcgcacatacttgaatcacaatcccatcaacaacatcatcaatgtgcattgtgagtgtataaacagccccatgaatcgactaagtgtgcgagtgttttgtattttacacggagagaaagaggacattattgataattttacttaacatcaagatcgaaagatctgaaagcttaatgtacagtttgtagttttgataacaaatatatatgaattaataaaaaagattgtgagccagggtgggatttgagctcggacaacatgcctatattgattgtcgaatcgtttccgttagtaaataacttcactttattcactttttattcactttatggaaataaaatatttttttaaattagattattatattagatttttaaattcaaagtagtgtgatcagatcagtcctattctattatgcagcttggtgtagagttgaacttcgtttcaaatgtcaaagtaatattcaaaatctagttctatctattcgatcgtgttatttcaaaataatattacctgtagatccacgtctttttggctgtgaagatttcttgtttattttaaatgatgatatcattgcgatttagataagcttctgttttccttgctgtttaatagcgttgaatgtttgaatggttaatatgatgtttttttaaatatgatttttgtttgtgcactttaaatcccttttttttcaagtgtacattaaatttcatttaccagtcgcgagactgtgtgtaataattcgtcatgctggccgcatttgaacccgcatagctcgctgccgcagtctgcgtctctggcctctggtgcttggtgttcactgttcggggtttcttctcgagccgggccgggccgggccattcccaatgtttttcgtaccccgagcccaaccccaacaccgcccctaatttgcaaggcagcgagataatgcgcgcctctcttaactgttctcttagtttgcttgccggattcgatcgctctctgcggcttcaagtggattttacagttatatagtatatatagaaagagatattgtatcttatgggttatggctggcacaaatacttttcgccaccgacgacaacgctttttcgtgcatttttctttattctcttttaatattatatatatatattttatttgatttgtgaatcacggcaaacagacagttgagttgtggataaatgggtgtgtttttgcgggaaaattagagatacagctcagttggtgctggaagatgtatgtaggtgtctgtttgtccgcttttcccccgcctgtttatctgccgtaatattttaatttgcactcgagatttcttttagaatataatttagcgttatgccagaaaattgtgattagattccttcgctgtcatgccgctggggttgataatttactaacttcctcctatgaatgaatgtttgttattgcgggttcctgttatcattctagatttgccccaacgaacacataaagactataaatatctgctaccacggcttagagccgtacaatattttaatttcgaggattttaaaggctctgtctaataatctttaagaggaatgctagttccacactaaacatacatatgtgtatgctgataaggatttcccttgcaggacacaaaggaccgcttatcgcgttggtaaaatgagtcactccatatcgactcttatgctgtgcctttctttcccagcgggtcacaacattttcttatcgctaattatatttagcataaatttccatgtgtagggaaaccgatgcctaagagaccgataaatccatgcgacatgaaacttttacctcgaattgaatttcgctttcatgttgataagtttaatttattcttcgcattgaacaaaattctcttgtttaatgatatgctattattagcggcacgtatgaaaaagcagctgtgcctgtggcttttgtgtgttcctcggaaaaatactaggaaaatgcataaaaacatatgccatggcatctaaaaatatgtgctcgtgtttagctatttcgataaacgatgggcacaaaggccactatttagcaggacattgatctcgttcaggtgagttgctaattgcattagaaacttagtcagtctcaattagtcagctcaactatagagttattattgcggctgaaagcgacagcaaagtcagacaaataagtcagcactacgttctgacccagtttcatcattatcatcactttgtcaaaagcagacttccagatcatacgcagtagcatgggtagtatcgcatcgtatagtaccaatacctgccttttggagatacgatacgcatttacctttgtctaaaaataataaatgatctcattgttgactgtttgttctccctcaggactttttttgggaaacgatcgtgttgtcatcgtcatattttgggccacttgttttggccgcatgaaaaagtatctctagaagacgctggcgaatgatattaacacacgaggagattgtcaataaatgtacatgtggattgtaaattaaatacacctatattgggttgcatctatatatcgtgtcgtgtaaacatacgcaacgcagcagacattctgccgtcgttgtctttacaactgaatccacatactgcacatatatatatgtacatacatacatgtatctgtatcgtcagcgcattgagcactcttttgttcaaactcgatcgatgtttcccgtcatccgttctgtccatctgtcaattgcatttaaagcaaatatcgcccataagaaatgggctataata

SEQ ID NO: 31361 - DNA, 159 bp, DROSOPHILA
atgcgcttttctcagccagagcctatggatatggatatggctgtggggatctttggggcctggcctggacttatgctgctgctgctgtcgctgctgttgctgctgctgctgctgcaatgctgcgacgacggcgacgacgcaaaggaaaccgatgcctaa

SEQ ID NO: 31362 - protein, 52 aa, DROSOPHILA
MRFSQPEPMDMDMAVGIFGAWPGLMLLLLSLLLLLLLLQCCDDGDDAKETDA

SEQ ID NO: 31363 - DNA, 1543 bp, DROSOPHILA
gctgttcctgcgcctgcaagatgctcctgagcatcgtgttttctgcgctcctgatggtcgtggtgatcggcttgattgtctacttcacggtcttctatcacaaggataagaacacggatgaggtgcagaagcaggtcgcccaactgacgcccattgtgaagcgcagcatacgcgactacttcaacaaggagtactgatctgaggacatgaatttatactataggccatattaataataactccgtcgaaatcgaaattgaaacgaactaagaaccaaagccgttcagtgcatgacttaatctaatcgcgtcggatgctcgttatgggattttttcttatctatagatagtttgggactcaattgaatgggcaatttgtgcgttctttagaaaggtagataatgttggagcggcaaaaaatgtgactcactgtataccttacaatacattttgaactcgaaacccagtaaagcattcacaatatatatttaatgtataatatgtatgaatgtaaggcagattaaaaaagttatattgtactggatgacacactataaacaagacaataaaactaaaatatctatagaaaattgaaagtggaaataaaagtaagtgtatcattaattaatagcatctctacatactggcttttaaaatttgtaaatctaaaataagctaatattttaagcttgggggaaagaaattagaaaacttcgttattgaagtgtgagatattcactaataaatatttgagctagggaagttcaaatatttttttaagatgagggtttaccagcagggaaacccctcattaccacagtccttccagctgttttcctagttttatgtacaccattgtttgggatcaggtagcctagaacaccgtcgagggttgaaaagtgtccaagatctggtggtccgttcaaatgcatttcaaactcgtccccttgacttgcttcaatcaactttgggctcagttgttcgccagcatcaggttcacaatgtcctccgattccacgctgtacttcagtgccgtcgaggatatgttcaaggaagtgttaacaataggggacgagaagagggatcctggaaacgaggatttctccgaaacacctaaacgttgcgtacgattgcgccagcaaaagttgttcgcgaacgataccgcgagttttgtgataggtcgccgttcgccgaggattgaatccaaaatcgatctcaacagagatgtatctcctggaaggcgaaaggagctgcgcggcgaggaaatccttcggatgcgcaaggatcgggcggaaaaggagcgtctgaggccccaaaggcgtcttaccatgcggatttagtgccacacctatcgatatgatagctatccaccgagttcattgtgttccccaatcgaagtgcttccctgttgtatgctctactttaggatttatttttaagctcacctaagtatgctaagttttgagtgccaataaataaagttattagtgaatacaattggtctgctaatgttttttactttgttattatacatcatatataca

SEQ ID NO: 31364 - DNA, 339 bp, DROSOPHILA
atgtcctccgattccacgctgtacttcagtgccgtcgaggatatgttcaaggaagtgttaacaataggggacgagaagagggatcctggaaacgaggatttctccgaaacacctaaacgttgcgtacgattgcgccagcaaaagttgttcgcgaacgataccgcgagttttgtgataggtcgccgttcgccgaggattgaatccaaaatcgatctcaacagagatgtatctcctggaaggcgaaaggagctgcgcggcgaggaaatccttcggatgcgcaaggatcgggcggaaaaggagcgtctgaggccccaaaggcgtcttaccatgcggatttag

SEQ ID NO: 31365 - protein, 112 aa, DROSOPHILA
MSSDSTLYFSAVEDMFKEVLTIGDEKRDPGNEDFSETPKRCVRLRQQKLFANDTASFVIGRRSPRIESKIDLNRDVSPGRRKELRGEEILRMRKDRAEKERLRPQRRLTMRI

SEQ ID NO: 31366 - DNA, 3202 bp, DROSOPHILA
aatgcaaaaccaatagggtaacactgaaatttgaaattttggagggaattcttctgagtgttgtatgatcaatcaaatgcaacacagttcacgttcattttatgcaaatgcataatactaaaaaatttcttatatttgattaattgtacatcaacctagtactgatagcaaccaaaaacggcagcaatgcagataaaactgccaccatcaaaggtgaaggttatgtagtcatcggacagctcatcccaaatggcgcgagctccgtagaaacatccggctccggtctgctggtaaagcattacgttcacaacgtgcttgaatcttggagaagagccgcgtcccttcatcttaatgtttatgtcatcggcgacttcgcgggtccatttaagggcttccgattgattataggtcttgtttgccagcttctccttgaccacctgggctatcatcaagcgaatgtacggcaatgggaacttcttgccgaatgctggtcccatgttgtagtagttatagatggtgacatcagatgccggcttatcctcattcccaggctcccattcttcatccgagtcactgtgggacattacctcggatcggctgtctgcgctgaccgcggacgctcgaaaggactcctttgcagtcgacaaggttttgggtctttgtgtcgacatttttgcgatatttttatctgtgtttcgttcaaattccagataaacttcgattgcaataagttaagagaaataatcagacagaacaaatttttcatggccatctagttttccaaagaaaacacagtgattggtaaataataagttcaattttcgctttttaaccttttttgcaattataaaaaaatctattgttttgttagttttttatttcgcataaacatatttttgttatttttttttacactttccattgtctaaatgacccaattttttctagttaaaatatttcaaagttaacctaacgttaagtagtaaccaaaagtgaagatttaacgagctgaatgcctgtaacgtcgaatacgaggatgtcgattggagagattctgaatgtaggtgtcactactctgctcttgacttgagcgttccctggccttcggtgtgagcaagtcatcgactggattctggttctgacacttttccatttcctcctttttgcgctgctgctgctgaagctcgtggacttttcgcaggcagcagcagttcctgagcgcatccataaagcactctagattcctgcgaaagatctccagattctccggagaaatgggcgacttctccgcatgacaacactcatcgatgaccacctgggcatggaatatacactcgctagcctgaccgagtgtattctttagattgaagatttgctgtttcttcttcaactgcatttgaatatagcgagtgcacagcatctcgaaacggcgctgttcactccggtactcatcgaatagctcgtcgtatttggagtgcagctgctccgttttgctttgaagtaccttgagagccttttccctcttggctaactgccgacgactttggcgatgggacacggagagctcaacgtaactgaaaatgcgccagaatacttagtgcctacatatgtatacccttttctaatattgttgaaaacttaccgctgttgcatcagcagtggactgatggagtcgtacagctcaccaatggagttcacatgggagccactggggcccctcttctccggatcgctctcactcgaactggagctatcgattccccggagcaactgcaccagtcgctcgtttcgcttcctttccgtgtccagtgaaaacaccagttcctgaacccgttctgtctgccgatcgagggccattcggagcttgaactcctgctgccgatcctcgtgaattgtgtgctccagttcattcactagtcgcagtatctgttggacggtctgctggtagggattgggctcctggtttttgttcaggctggcatcagttgaggccagatgattttcgcccagtgatatgggctcgtcctcttcgtcctccgagggaagtaagagactggaaacgggatccaaatttgaattatttgaagacgagctcgacgtggagctaagaggggccaggggacgacccaagtcgctctttctcgtgacggttccgaagccaagaccgttgctcacactcctcagaagggtgctcaggttcatccttggtcctttcccacctcgtgtcgctgtcgtcgtcgatgtctccgtcttgtcacctgactgtaaaagtactcaggtgtgtgctgcgctgtgtgctcggcttgtttgtcactaaatgactgcctacttgtgctcggtacactacaataaataaatataaaaacagatacttttagatgcttttaagatattagcttttttgtagaattgattctctatcaatgtttagacttctaattaaacagcaggaagtcaaaaagttgtggtttctattatgaatatagcaatatttactacaatttaaacaaattaaattatgtaaatttcttcttattggtttctgaagcttttcttagatttttccgagtataccaacagctatccgaaagttgctgccttccgggctcactttccatatggtatcgcacaactttttaaattgctttcagttttaacacctttgccttcagttttcccggcactcaatcaaagttgtcgttactccgccaccgatttcattccctcgcatatgttctgaaggcttttcccgacttttcccaactgccttcacagctttcctctggtgtttgttagtcgtgcgtaaattgccattagccaaaaagggttgccaagacttgatacacttattgcatttttatgggccaaacttttgttgttttttcctcagtttttccattttttggttttgctgacatagagagttgcatgtatccttgattaagagcgatacatacgtattgtaaacttgattgaggcaattttgcaatcggtaaagattgtggagaatactcgagagttgcctttacgtcatgggtttcagtaaaatccttgatgatgtttttgcaccaagtaaaaaaatttattgtagtaaattgcagcatattaactagatttaactagatatacaaaggttatagtatcgctgctattgacaattaattatacgaggttcacttaattttccgactgctactatgac

SEQ ID NO: 31367 - DNA, 1134 bp, DROSOPHILA
atgaacctgagcacccttctgaggagtgtgagcaacggtcttggcttcggaaccgtcacgagaaagagcgacttgggtcgtcccctggcccctcttagctccacgtcgagctcgtcttcaaataattcaaatttggatcccgtttccagtctcttacttccctcggaggacgaagaggacgagcccatatcactgggcgaaaatcatctggcctcaactgatgccagcctgaacaaaaaccaggagcccaatccctaccagcagaccgtccaacagatactgcgactagtgaatgaactggagcacacaattcacgaggatcggcagcaggagttcaagctccgaatggccctcgatcggcagacagaacgggttcaggaactggtgttttcactggacacggaaaggaagcgaaacgagcgactggtgcagttgctccggggaatcgatagctccagttcgagtgagagcgatccggagaagaggggccccagtggctcccatgtgaactccattggtgagctgtacgactccatcagtccactgctgatgcaacagcgttacgttgagctctccgtgtcccatcgccaaagtcgtcggcagttagccaagagggaaaaggctctcaaggtacttcaaagcaaaacggagcagctgcactccaaatacgacgagctattcgatgagtaccggagtgaacagcgccgtttcgagatgctgtgcactcgctatattcaaatgcagttgaagaagaaacagcaaatcttcaatctaaagaatacactcggtcaggctagcgagtgtatattccatgcccaggtggtcatcgatgagtgttgtcatgcggagaagtcgcccatttctccggagaatctggagatctttcgcaggaatctagagtgctttatggatgcgctcaggaactgctgctgcctgcgaaaagtccacgagcttcagcagcagcagcgcaaaaaggaggaaatggaaaagtgtcagaaccagaatccagtcgatgacttgctcacaccgaaggccagggaacgctcaagtcaagagcagagtagtgacacctacattcagaatctctccaatcgacatcctcgtattcgacgttacaggcattcagctcgttaa

SEQ ID NO: 31368 - protein, 377 aa, DROSOPHILA
MNLSTLLRSVSNGLGFGTVTRKSDLGRPLAPLSSTSSSSSNNSNLDPVSSLLLPSEDEEDEPISLGENHLASTDASLNKNQEPNPYQQTVQQILRLVNELEHTIHEDRQQEFKLRMALDRQTERVQELVFSLDTERKRNERLVQLLRGIDSSSSSESDPEKRGPSGSHVNSIGELYDSISPLLMQQRYVELSVSHRQSRRQLAKREKALKVLQSKTEQLHSKYDELFDEYRSEQRRFEMLCTRYIQMQLKKKQQIFNLKNTLGQASECIFHAQVVIDECCHAEKSPISPENLEIFRRNLECFMDALRNCCCLRKVHELQQQQRKKEEMEKCQNQNPVDDLLTPKARERSSQEQSSDTYIQNLSNRHPRIRRYRHSAR

SEQ ID NO: 31369 - DNA, 2189 bp, DROSOPHILA
aagagattcttcttcttttattttgttttatatctaactgattaacaatcgacgggcattgttgttgctcctatcagtcagtcaaggcgttaaggccgaaatgttgagtgaggttgccccgtagacctgctcgtatatctcgatcgccattcgatcgccgtcatcatcatcatcagctcgatctctccgcgtttcgtgtgaagctgcatcggctgaaattttatttttctccttcgatttttctgttttctgttgtatttggagaggcaacaggttaacacgccaggttaaactgacccggggagaccgcaaaactgttgccttggcccgaacatttttgattgcttttttaatgtttccaatttatacgaatcattgttgttttatagtccgccacgagagtccataatttagccagaagtgctggcctggcctggcctggccattgagcccggttcagcacatcaaaacaaaaaaaaaaataaaataaatgttcttaagaaaaattacaaaataaatagcaagttcttcttcttcaactcttcgacttcggccggcttcagatgtcataaagtcaaaacgcttttgtcggcatcatcatgccgcgttcccattgatttctgttacgcactgtggcaatgtttttaattagacagttttgatgtttgcgtcaattgtcaattggccaaggaggcagcaaagccgcaaagaaggaaggcgcaggagccgagccgagccgaggatccttttacaagtcccggcttagacgcctgggccaaaaaaggcgacgacgttgtcgccaactttggccaacaaatctgtgtcaaggcatggggcaacatgcaacattcagctgcatgttgttgctgttgctgctgctgctgcatttactcctgttgttgctgctgcagccgggcggatgatctgaagcgcgacaagtgattgccatcagttgtcaggccgctatcgttgatcacaatgtcaacagcagcagcagcaaatgcagcagcagcagcaacaacaacagcagcagcagcaactgcagcagcaacagcaacaacaacaacatgcagacagtcagactggcgacggcatattcccgtggggagctgcatttaaaaggcatttaagccacaaaatctcaagcagcagtagcagcagctccaccagccacaattactgcaagtaggggagatcatttgggcctggtgggaaaagggggaatctggtaataccctaaccaatttccagacttcaacattatcctatgaatattaagaaataatataacataatataattgtaatatatttgtaaatttattatttagaactaaatgcaagtaaattattttaaagataaacaaaaggtttcttaattgaagcaaagcaattaaaaattctttaaaaattccaacccacatgaatagccgcccttttttcgtttgcacaaccaataaaaactcttcttcagctattaaatgatattagaatattgtccaaaatatttacgacatattgtaagccaataaactatattgccagttttccttttatgctaattgatttgggtcgagggaaactcatcccgagcccaacccaattaaaaagtggccgtgcccagtggggcaagggccaaataaacactaaaaacaaaaaatgtgagccacaataaagctgagccgccagcgcactggactactgcaaccacagcaaccaccgcagtggcaactgcagcagctggcagctaactttcgtgacatgacaatttcgatgacgacgatgatgagccccgccagtcggcaagcttggcccgatcaggatcaaggggctatagccaagagtccagccttgggatggcattaatgcactgggaaaaattgccatcattttaagcttgcattaaaataaaaagtttcgctttccatatccagttaattatgaaagtaagttggaaaaccaatgttttaaggtgggttttcttcgagatcatgtggcttttgaatataaagatgacgatgtaataagcacagagatatttttcttaatgtgtggctgctggtgttgttgggcctgctgcatgatgatgttgtcggttgacagtgacgatgacgatgacgacgaggaggatgacttcaactgcgactgagactgaagcgcagacgacgcacgttgacgatatgatagacg

SEQ ID NO: 31370 - DNA, 189 bp, DROSOPHILA
atgcagcagcagcagcaacaacaacagcagcagcagcaactgcagcagcaacagcaacaacaacaacatgcagacagtcagactggcgacggcatattcccgtggggagctgcatttaaaaggcatttaagccacaaaatctcaagcagcagtagcagcagctccaccagccacaattactgcaagtag

SEQ ID NO: 31371 - protein, 62 aa, DROSOPHILA
MQQQQQQQQQQQQLQQQQQQQQHADSQTGDGIFPWGAAFKRHLSHKISSSSSSSSTSHNYCK

SEQ ID NO: 31372 - DNA, 2650 bp, DROSOPHILA
ggtgaagtcacaaatgcaaatcgcacgcatgcccagcaatccaaatccttgatggcgaaggacaataattgtaaagcagtaaggcggcaaaggcgggagcactgcgaggagcgtgtgcagccagattcgaagtgtggtgataggcgaataagagctcattcagttcagcgatcagttttagcccaaagcagaggacccaccagctatacttcgatagatcctcagcctccttcagccaagcatgaaacaaaggacacccagacggaatgcttgtggcgggagaggcctacgcaaacagagcggcagatcaggatggataaaggctgtcaagtgtgccgagaacgcaaccagtttcgggatcggaccaatcctgcatcagcaattccatctcattccaaaaactttccctataattcaatggcaaccatgcaaagtgaatgtgctgaggctgtgatgaaaggcacctatttcgatgaagaatattgtgctcctgtcatatccaaactcgaatcttcgagcaatagtaagccacttgaacaattttccagaaaaagaacagattacgttcatgtccatgaagagggacaccctgggctattggattgcggacaagatagtccaagaacaccaagagaaattcagcacattacctataagcagtctgtttcgcagcaggtccagactcctccatatagtccacggacaccactgctatcttatagacagcataaaagttctaaaaacgagtatattacccacactccacaagctggcacaaattcccggagccaaagtccatatagaagtagtcctgtagaagatctatcgtcgagttctcataaaagttctggaaaagtttatgatactcagacccgtcaagtcgtcgcaaattcccgaagcaacagtccatatagaaataatccagctgaagatctatcgttaagtcctcaattacaacgctctctgtgtcagtacattcaaaatatgcccggacatattgatgacgcgtctttccaagtggattcccccagctgcaccaatgacataccctcgagatgtgtggtggagactcgacctgaatgtgttcattgtgaaggagagcattgtgaacagtcctgtaagcagcatagccccagatcgtgtatgtcttcttccccaagacaaatttcagttttggagaccgtctgtgaaaagcgcacgcgaacagtgaccttcgaggacgagaaagggggccagaccaaggaggagcatacgaaggaaagttgtagcagtcgcatcgattgggagcgcgccctcaaatatcacacatcagatcacggcgatgagacggattatacgggacctagctccacttgcagtaagttattcgataaagcttttccatgggtgctaaatattatgatgtattctactacatattattggtactttttattcgtacttatacttcatttctatctaggatccagcagctctgcggagcacacgtgcaatgagtccacctacgatgatgacttcgccagctgcgatgagtcgcaaccgcagacgattcacatgcgaatacctccgtttaatggttgtccctgcatgtaccagacctacttgaatctggccactatgtgccagaacgaaggtggtggcttcatttaatgagagtcccttatccgagataatcgcgcccgtcgttgcattaaatctttatttatttttgacaatcttatatttttacaatttcgataacccagccaaacaataaatttgagttaacataataaacaagaagcgtatgcataagtatactatcaattaaagagtcttcgatggcacccgggggctaacctcacgtgtcctagcctgattgtagcgatcatcggcgagatttcgacgcagatcgcgtacctgttgctcccacttttcagccaactcctcgtggtgcctgcagcggacacgctcctcctgcaactgatccttttggggaaatataataattactattaggcttaatcattgggtttttcaaagaagtaaaagaagcggttaaccttcacggccacaacttaccaatgtttgctggagctgacgttgcaatcggtccatttcatgtttggacctaatatcatcgtcctcctgatgctgctgatcattgtgcaagcgcccgagcatgagatcagtggtttcgttggtgacctgattaatggccaagctctgctgaagctcatcgcgcagtttttcgcattgtttttcaagctgtggagagtattattgatgtcaaattgaaaagcgaaccgattagagctacttacaagcgcaatttagtttgttacgtctatatagttagagtatggttagaaagcgaagtagactacagcagagtattctaactaggatacagatacggaaagtgatctggaccggagctgaagctcacctttttgcgaatttcattcacatcattcagctccgcattgagtttgcttctttccacatccaacttatcacacagctccttgcgcgcctcaagatccaccttctggacacggatgtcatctcgggcattctccagctccctttccaaacaacgcactgaagcccgagcggcggtcagctgcacctccatatcatgaagtgcgcactggcgaagctgcagttg

SEQ ID NO: 31373 - DNA, 492 bp, DROSOPHILA
atgacgcgtctttccaagtggattcccccagctgcaccaatgacataccctcgagatgtgtggtggagactcgacctgaatgtgttcattgtgaaggagagcattgtgaacagtcctgtaagcagcatagccccagatcgtcgcacgcgaacagtgaccttcgaggacgagaaagggggccagaccaaggaggagcatacgaaggaaagttgtagcagtcgcatcgattgggagcgcgccctcaaatatcacacatcagatcacggcgatgagacggattatacgggacctagctccacttgcagatccagcagctctgcggagcacacgtgcaatgagtccacctacgatgatgacttcgccagctgcgatgagtcgcaaccgcagacgattcacatgcgaatacctccgtttaatggttgtccctgcatgtaccagacctacttgaatctggccactatgtgccagaacgaaggtggtggcttcatttaa

SEQ ID NO: 31374 - protein, 163 aa, DROSOPHILA
MTRLSKWIPPAAPMTYPRDVWWRLDLNVFIVKESIVNSPVSSIAPDRRTRTVTFEDEKGGQTKEEHTKESCSSRIDWERALKYHTSDHGDETDYTGPSSTCRSSSSAEHTCNESTYDDDFASCDESQPQTIHMRIPPFNGCPCMYQTYLNLATMCQNEGGGFI

SEQ ID NO: 31375 - DNA, 4231 bp, DROSOPHILA
gaaaacaatgctattcaatcaaatcaaaacaaaaccggacttcaaccgatatttccttaaatatatcggttatcgaaagtgaccatcacacctcagcaaggaaatcaatcgaaaatttgttttagtattttattatcgaacgcaaatgtatcgaaatcagtatgaaaaataacatcgattgcccagaaaaaacgttacattcaaaataaaatataaaagctgaacaaaattttatattttttatgaaaattcatagattttaccaggtatgtactgcaaccgaaaagaagttaccgaatatttcaatataataattttattattgttcatgtgtctatggctatgtctaaaaaaccaaattataatacaaattttttaaacttttagaattgtaccaggctttactaaataattgaccttgtccaaatcagaattgttcgatatttgtctttttattaaaaaaaaactaaggtgtggactgcgattaatcaacaacaaaacagtaaaagttcttaaacataaaagacgcttcattatctgatataaaattacgttctggcttttccgaggaaaacggatttacagttggcggcattacgacatttaagtgtcgattcgattggttaataaattgaatcatatccaaaggggcctcgtattttgtataggaagtaactacgatggggcagttgagattgagtgcagcttgaatggtatctggccaagtatcctccagagcgaaaccagttgatcggtacagaccgcagttaaagaagcaaactatgaatttatgtataataattattattagtttcgcttaaatgagtgttaacttactcaaattcggctgaagaaagtgcgattctctgcagtaatcgtgatataaactattctcaaaatgatagttaaccgttctctgggcttttctgcagaaacggcagcatctaaatagattgataatctttagactaatgtttaaactactaactaaaagtgtaactcacttgattttctttagctgttcaaaggatatattattaggattaagttcaggtccaacaaagaccacattcagagttttcaccgctggcgttatgtggagcaggaagagttcccatttctgcagcatatccgcctcaaattcgatctcggctccaattaagtgaagagtcatctcctcgcagtttctgaggcgctcgcaaagtttcaaggcaaaccaggcagttaatgggccagtggacacctgggtaagtgctgcgtactcacactcattggtaacatctttaaatcagtataataatacattataataaaatccttgaatacttcgtgtttacttactaaagcttagcttcttcatcatctgcttggtgttggagcaagccatgggcagctctctaagaatcttactgggcagtgatggctccatgcggccgaactgttcctgaaacatgatgaaggccttgaaaatctgataggctccacaccacttggcgtgctccttgcctcggtgctccggcttatccttgcagaaagccacctcgccacatccaccgcacatggatagacgtttaaagcgatgctcccggcactttgagtcggcgcagatcagtggaaataggagcaactctctctccgttgcgctgagctgacgattcatctccttctccacctggcgaatgcacacgatccggaaggaacggaactgttcgtcactgaagtcgccgcacttgtagaacatctcgtgacctgcatccgccccatccaaaattggcaattagtgtgatttatgaatttgtgaatcgccgaaagacactcaccattgcggtccaccgtctggcgcagggcgtagcacagctggcggtgctcctggtcgtctttcatgtgcccactgctgcagtagtagctcagtccacagcgggagcagggtatccgattctggccgcacagatccgacttgcagaactgcaagtattataaaaggcttagtaaaataaaattgtaaaaaaatcttattaatgcgccctttacatttgtatatagaaataggagagtacgctatagccaacttcctcgactatcagatacccattactcatctagcgggaatgccaccattaatgagcatatcgatagaaactggcaagaaaccattttacctgttacatacttttcaacgaatctattatgcccttttcctttaggagtgtagggtatacaaatgtagaagttttaaactatagtcccttcagcaattaagcacagtttgtaatgaatactacctacattgcacagtgaggccataaaatattgccttggcttatagatgtactccacatactcctccacttcctcatcggatgactcgacatcgctgggcggcgcttggctgaaaagctttccaagattgctgaataacgcggctgctggggattcaccagatcctatcaagcatattttagttatgttgaattgtatatacttcctaatgattatctaattaccctttggcagtttgctgcccaagcatttgagtagatcatttatttcctcttcttttgaaattccagatgccttggcttctgttttgagttttggagtaaccgaggtactcgaaatctttggtttcttttcttcacttttgatttcctttggttgggtaactattttgaccggatcagttgatggcttattttcgctggatggcacagcactatttttggccaataatttcctacgtaacagttgctgtatcagccggattgtatcgttctcttgcggattttccacttgaccaatttttgataatgattcaagcagagaatttccacttgtaagtaagggcttttccaccggaggtttactttctacaccatttgccgcttttgagccattacttttgagtgaagacgcaattgcgtctggagattccccttgatcctgtggcacctggttgatcttgttgcgctggcgattccgaatccttggcttctttttgtggacccccgactgaatcatgttagctgcgtttctcttatttcgagtgcaaaattagccagagcacgttgctcaattgaacgaacaatgaagaatgcgcattgttcttggttgggagtcttgcggtccgcctcgattcaattggccgctagccatcgcttctcatcgcggccgcaagcccaaatgtatgccctggctatttttgttgggcacgggcctgacgatgtctgacaacgccagccggtatctgaatccgcatcccgcatacgaatctcaattcgcatgggctagcgtccattattattctcgagtaccagcgtttgattaattctctgcctatctcaactaattgcgtcaacaagcagaaaattacactgaagtccactctgtggtgctctttaaaaatatagttcttggcagaaaagggattatacataatcccttaatatatttgtaagaatttagaaaaaacagtcagttttttaataaggtatcagttgccaaaaagtattgatggaactgtcgttaaaaatagaagcaacaattgttttcaaagtattccaatagtttatgtgtgaacaaaatcataacaattggtatggatatcttgaaaagcgatttttccataaattcggaaacaaataagcttatttagcatgtttcaattccaatttcgaaatttcgcgcccaatttgaaaagagagaaatagcacacatttactttccacgcactatttccaataccgttcttgctgcccgctaagttcaaaataaaacacaaacatttgaaattgttccattagttattttttttttcgcatccaaaaaatatatatgaattaagattttcatataaattaaaaatgtacggaaagtaacatcgtagtttacttaagcttaggagaaattataaagggtttcttattattaatgcctctttcataaaaggtcaaaattttcaattcgcaaataccgtattatacccacccagtaatacttaagttatcccaaacttttggggttttgcgataacaaaagtacgtctgataatcggatgttaaacactttaggatataagataccgttcactagtttacttatggccattggtaggatcaacgcctccgcaggcaccttcgctgtcggaagtgcttatgctaccattgcaactttttgatattccatttgtgggtgtaatgggaattttcaaggagctcagcgattttgttgctcc

SEQ ID NO: 31376 - DNA, 1719 bp, DROSOPHILA
ttgtcagacatcgtcaggcccgtgcccaacaaaaatagccagggcatacatttgggcttgcggccgcgatgagaagcgatggctagcggccaattgaatcgaggcggaccgcaagactcccaaccaagaacaatgcgcattcttcattgttcgttcaattgagcaacgtgctctggctaattttgcactcgaaataagagaaacgcagctaacatgattcagtcgggggtccacaaaaagaagccaaggattcggaatcgccagcgcaacaagatcaaccaggtgccacaggatcaaggggaatctccagacgcaattgcgtcttcactcaaaagtaatggctcaaaagcggcaaatggtgtagaaagtaaacctccggtggaaaagcccttacttacaagtggaaattctctgcttgaatcattatcaaaaattggtcaagtggaaaatccgcaagagaacgatacaatccggctgatacagcaactgttacgtaggaaattattggccaaaaatagtgctgtgccatccagcgaaaataagccatcaactgatccggtcaaaatagttacccaaccaaaggaaatcaaaagtgaagaaaagaaaccaaagatttcgagtacctcggttactccaaaactcaaaacagaagccaaggcatctggaatttcaaaagaagaggaaataaatgatctactcaaatgcttgggcagcaaactgccaaagggatctggtgaatccccagcagccgcgttattcagcaatcttggaaagcttttcagccaagcgccgcccagcgatgtcgagtcatccgatgaggaagtggaggagtatgtggagtacatctataagccaaggcaatattttatggcctcactgtgcaatttctgcaagtcggatctgtgcggccagaatcggataccctgctcccgctgtggactgagctactactgcagcagtgggcacatgaaagacgaccaggagcaccgccagctgtgctacgccctgcgccagacggtggaccgcaatggtcacgagatgttctacaagtgcggcgacttcagtgacgaacagttccgttccttccggatcgtgtgcattcgccaggtggagaaggagatgaatcgtcagctcagcgcaacggagagagagttgctcctatttccactgatctgcgccgactcaaagtgccgggagcatcgctttaaacgtctatccatgtgcggtggatgtggcgaggtggctttctgcaaggataagccggagcaccgaggcaaggagcacgccaagtggtgtggagcctatcagattttcaaggccttcatcatgtttcaggaacagttcggccgcatggagccatcactgcccagtaagattcttagagagctgcccatggcttgctccaacaccaagcagatgatgaagaagctaagctttaatgttaccaatgagtgtgagtacgcagcacttacccaggtgtccactggcccattaactgcctggtttgccttgaaactttgcgagcgcctcagaaactgcgaggagatgactcttcacttaattggagccgagatcgaatttgaggcggatatgctgcagaaatgggaactcttcctgctccacataacgccagcggtgaaaactctgaatgtggtctttgttggacctgaacttaatcctaataatatatcctttgaacagctaaagaaaatcaagtga

SEQ ID NO: 31377 - protein, 501 aa, DROSOPHILA
MIQSGVHKKKPRIRNRQRNKINQVPQDQGESPDAIASSLKSNGSKAANGVESKPPVEKPLLTSGNSLLESLSKIGQVENPQENDTIRLIQQLLRRKLLAKNSAVPSSENKPSTDPVKIVTQPKEIKSEEKKPKISSTSVTPKLKTEAKASGISKEEEINDLLKCLGSKLPKGSGESPAAALFSNLGKLFSQAPPSDVESSDEEVEEYVEYIYKPRQYFMASLCNFCKSDLCGQNRIPCSRCGLSYYCSSGHMKDDQEHRQLCYALRQTVDRNGHEMFYKCGDFSDEQFRSFRIVCIRQVEKEMNRQLSATERELLLFPLICADSKCREHRFKRLSMCGGCGEVAFCKDKPEHRGKEHAKWCGAYQIFKAFIMFQEQFGRMEPSLPSKILRELPMACSNTKQMMKKLSFNVTNECEYAALTQVSTGPLTAWFALKLCERLRNCEEMTLHLIGAEIEFEADMLQKWELFLLHITPAVKTLNVVFVGPELNPNNISFEQLKKIK

SEQ ID NO: 31378 - DNA, 5751 bp, DROSOPHILA
tctagtgtctttgctttgttcatatcttgaggcacgaaatgcggacacaagcactcaacaatcattgccttattaatttttcacacgccgcaagatgaatactctaatgacaaatattcttatataaagtcatgtttgaaattgatttttgtgataatatgtacatagatttggctttttctaatctattttcaaataataataacgttaaggcaatgcaaaacaagaatttttcgcatggtgccaattgataaaaaataatatagatttaaagtctaagaacttctacggtgaagggcatattttgtcaaatttacaatgcatgagcatacgtgtgcacacataaagttgtctgctatcactgtatgcgtagaaaagagcggttcgctgtagcgctcttcgctctctcgctctctaacaaaaattcgagagagcctggagccacctctagagccacggccaaaaaattgtgtgccaaaaaatcgtatggcgttacgcgtcttgttattctagtgtctttggtctaactcaattggtatcaattcttaggcaataactcaatttggtataaaactttggacaaaaataatgcctcttcatattgaaatttcttatatttccctactttcagtaaagaaactataaactattgcaattgaaaatattttattttgatcttactaaactattggaaaaaaatttaacattacgttaaatataccttaggaaataaaggcctaaacttaagaattgtatgaatactataaagaattttttacttttacttttacaattattcatagataataatttttatttttgtttatttattacgaattttatgaattatacttaatacttatgaatacttaaacgataaacacacattttagttgcttcttaagctaactataaagcgaattggtgttattccaatcctttaaagtgtttttcatcaaagaaatgctttggcaatatatttcggagaaacataaatgcaatggccattaatattgctttatttacgttacagatcacatcattgctccggccgcacggtgccagtgtaagctataaggcgatcgaagcggcgactctcgaagaattgccagcaacatccgtggcaacagcaacatccacggctgcaacatcacgcgccactggaggagcagcagcaacttgtgtggacgttgagttcatacccacgctaaatatcatatttgagaagccgacttcgtcgagtgagcaactacagtgcgccgagaaatcggaacatgtggccggtggtgtgtccgataaggaaccagcagatgattgtgactccgacaatgattctacgcgcacatatataatctcgcgaagcagttggacgggggtaacatcgagtagcagcaccccatatgcggttacatccacggataccgccgaattactcaggcgccagaacaatctcagccttacggaggaagatcaatctgtgtcgtcgtttagcatcgagcagcccaccagttccataaccattgaaatggccgatcaacggacaaccacgaccaccacaacaacggcgacgacggcaacaacgccgagcagtgctaacattctggccacaacagcaacgacaacgaccacaactagcagtagtattgaggaggagatcgaagaggccatcgagatcagtgaggtggaggagcagctaaatactccactggaatctctatcggaggcggctgcctatgcccggccaaaggatgagcaatcaagtgccaaaagtttgagtagcaatccggcagaggatgaggatgctgatgagtttcggatcgatgatgcccagttatctggtggccagttggctcagcacttcctggtcgatgaggatgaaagcgaggagggttcggatcttccagctgcctccaaagtggaggttagtctctcctctaatgatgatgactttgatatcagtttgccattggagcagaggaaacctgtgcattccctgcacgaagatgatgagtctgtagatcaaagtttaagtaatcaaagcactacggatgatgtttccgaattggtcgaggagccagtccatgagatggacgataaaaccgatggcagtgcggccattagtgccagtgcacctcaagaaactcaggtggatgaaagccaaataaccgacgagcaggatcactctatggaagaaatagttgccacaaatgaatcaattgaggtgacgtacgaagctgaggaaaccgtcaatacttcacagaaacaagatttaatcaccgatttagatgaagagtcagaggatcaggtgcacgtggacaacaggcccacttcgactttgcaagcattgaagcttcctgcgttgcaacaacctcagattgtagaaaggaaagctgctacagcattgaccacattacgtctgcaagcagatgttttggagcccttagagttaaccattctggaaatggatgatgatgagaatgaagaggatgacgacgatgaggagagttccttgcaactgatgaagctgcgattaatggccatgaatcagcaaatgattgtggacaatgcacccaaactttcgcccacggaagcggaacaaacacaagtaaccagcagcagtaacaatttagaaatcaaacaaatggagcgagtgccactcacagagttctccaaggatgttctggaggatattaccgaagaaagcgagagacttctctcgatgagcacaactatggaagaggagcaggatccgccttccctctccttggatgagtctaaaactctgctgcagccaggagcacataaaactgggggcagcagttccagtttggtgagtttaaatatgcttaagcagctggaggccaaggtacaggaactacacacccaactggagaccaaggacaactgcttggcatcgcttaatctgcagcttgagacagcaagaagagaatccagtgcgggtccagcttcagcaagggattccagttcgctaatgaccaattcgacagagtatcgcactcttcaggaagaactaggcggcccagtaagtgtatctatatattgtaaattaattttgtgcatatactaaaaataattcttttccccacagacattggacatttatgtggagatgtcacggagggatgagttgattgccaaactaaccgattcgctgcagcaatcgctgaatgtgcgtgacaagctgcaggtggatgcggatcgtctgggtggcgaagtacagaatctgcgtaggcaactccaagagacgctcgatgcagtgaaacgctcgagtgccgtatggcccgatcaggaatgcaatcccggtcagcgtatctcagagatctccatggatttgatcagcgaaagcgatgatgatctggatcgtcattttctcacggacaacgaagagcgcggatcacgcagctccaaggaaaggcagctaactcagttacaaaccaacgaagaattgggactgcaggcgtcaaacccggagtggacaccgacatttagcaagcagatcgaacagttccacacatatctgttgcccaccgaacagcgcatcttccagatggtccagcgcaagttcgacgactatttgaaccaacagatcaccttgtgtcgtgatcttggcgcccaggagctgaagattgcccgcgatcagtgggagagcgagaagctaaccagcgaacagaaccagcaggcagctcatgccaagcaaatggaggatctgcgcaagtactttgagcataagtgcgccgatctggaaaagcaattctcggacgatgtcttctcgcacaagtcacagcatcagacaggggacagttcatcggagtgctcggaggtagatcagttgcccgaggaaggggccgccgcggtgtcctccaaggaaccatctccccgcaaacggaagcgagctgagctgcttctgagtcccagtcacaggcagatgactccttgtggcttggattcgctgggagaaaacactggaaaaactgaaaaagacgtgagtgggatttagtcaactcttctacttattgaaaaagattaacaaaatagttacgatttttaagatgttttctttttcggcatggataacttcttagtcctttttccatctaccaaaattgcctataataatgtacattattttgtagaatactgcggatatagccgacctaaagatcttttaccaaacccacatcaaggagctaaagcgcgcgcatgaggatcaggtgcgcaagctgagcgatcggataaagttctatgagcgacagcagggtgatgatgactataaggtatggataaaacttttggagtcacattgtacacctaagcttgttttcactaactgtgctaactgcatgtccattcttgtttttcttttcgaattttataacccaataaaccaaaaactaaaccaattgtaactacctgcaatcaacacccaaatgcaaaaactaacacagcctgcaaccgaatcacccgaacgtacctgcccggatcaggaatccgcagggggagtcgcgaatacctcccttattatcatcgatgaggatgagttgaatttcaacaacgaatcgcaggttattcagcgaatcatcgaggagtacgagaagagattgcaggagcaattggccttggctcggcaggacatcgccaccgagttggagcagcagattaaggtgagcggaacaggcaggcatgtggcatgcaactcaattcattgcacggtttctgttaatcaaaattaattcataaactgcttatttcgaacccattcctcgctgtttgttgcatacatttaatttattattcattcgaaagagttaaagattttgaaaacacaatttaatatcataagcagcttaattaatgatcaacgcaatcgttgtatgcgtgattcaccccactgattggtctaatcttaaagtgtctcccttgcaaaaatctcttcccgagcataaattatttttaaacacactgcagcacgcagctcacatgaaaaaaacgtgcgaaatttgtcaagtagccaaaattttaaatgaaagcaagaggaaaaatacgagagatctaaaaacagagcaacatgaaaatcatgctgccacaagcgtgtgccaaaagaactttcaactcgcttcgaattatgtagcattaaatcagtgtgcactttgatacctgggatgccgctatttatacccaccagtcaatgatccccttgtgtcgttgacagatgcctcaatcctttccagcagctgcctcaatcatcgccacctcaccaaatatggtggccacgtgtcagcaaatgcttgggataaatagagaagacctccctttagttggcgctacacggggcactatttgttgttcttttgtgcgacaccaaaataaatccatcgaaggtcaaagactgctggatatgccattgtgtttacaagtagttactgttgatactagtagtagtgttgatggcttagaaattatggttaaaaaactgttgcgttttcaatcaacttaggctttattcagatttccccagtagtgatatacaatggtcctaagaaaccaatatatactgtatgtttacgcactattcaaatactataaaatcgcatcattctgtggcacaaaaccccatcactgttcaccaaaaatttcccgccccacttatgctgtcagaaaatagtcttttatatgtatcatatgggggctatctgccgatcggtctgtttgccaacagcaaatttagcagac

SEQ ID NO: 31379 - DNA, 3363 bp, DROSOPHILA
atggccattaatattgctttatttacgttacagatcacatcattgctccggccgcacggtgccagtgtaagctataaggcgatcgaagcggcgactctcgaagaattgccagcaacatccgtggcaacagcaacatccacggctgcaacatcacgcgccactggaggagcagcagcaacttgtgtggacgttgagttcatacccacgctaaatatcatatttgagaagccgacttcgtcgagtgagcaactacagtgcgccgagaaatcggaacatgtggccggtggtgtgtccgataaggaaccagcagatgattgtgactccgacaatgattctacgcgcacatatataatctcgcgaagcagttggacgggggtaacatcgagtagcagcaccccatatgcggttacatccacggataccgccgaattactcaggcgccagaacaatctcagccttacggaggaagatcaatctgtgtcgtcgtttagcatcgagcagcccaccagttccataaccattgaaatggccgatcaacggacaaccacgaccaccacaacaacggcgacgacggcaacaacgccgagcagtgctaacattctggccacaacagcaacgacaacgaccacaactagcagtagtattgaggaggagatcgaagaggccatcgagatcagtgaggtggaggagcagctaaatactccactggaatctctatcggaggcggctgcctatgcccggccaaaggatgagcaatcaagtgccaaaagtttgagtagcaatccggcagaggatgaggatgctgatgagtttcggatcgatgatgcccagttatctggtggccagttggctcagcacttcctggtcgatgaggatgaaagcgaggagggttcggatcttccagctgcctccaaagtggaggttagtctctcctctaatgatgatgactttgatatcagtttgccattggagcagaggaaacctgtgcattccctgcacgaagatgatgagtctgtagatcaaagtttaagtaatcaaagcactacggatgatgtttccgaattggtcgaggagccagtccatgagatggacgataaaaccgatggcagtgcggccattagtgccagtgcacctcaagaaactcaggtggatgaaagccaaataaccgacgagcaggatcactctatggaagaaatagttgccacaaatgaatcaattgaggtgacgtacgaagctgaggaaaccgtcaatacttcacagaaacaagatttaatcaccgatttagatgaagagtcagaggatcaggtgcacgtggacaacaggcccacttcgactttgcaagcattgaagcttcctgcgttgcaacaacctcagattgtagaaaggaaagctgctacagcattgaccacattacgtctgcaagcagatgttttggagcccttagagttaaccattctggaaatggatgatgatgagaatgaagaggatgacgacgatgaggagagttccttgcaactgatgaagctgcgattaatggccatgaatcagcaaatgattgtggacaatgcacccaaactttcgcccacggaagcggaacaaacacaagtaaccagcagcagtaacaatttagaaatcaaacaaatggagcgagtgccactcacagagttctccaaggatgttctggaggatattaccgaagaaagcgagagacttctctcgatgagcacaactatggaagaggagcaggatccgccttccctctccttggatgagtctaaaactctgctgcagccaggagcacataaaactgggggcagcagttccagtttggtgagtttaaatatgcttaagcagctggaggccaaggtacaggaactacacacccaactggagaccaaggacaactgcttggcatcgcttaatctgcagcttgagacagcaagaagagaatccagtgcgggtccagcttcagcaagggattccagttcgctaatgaccaattcgacagagtatcgcactcttcaggaagaactaggcggcccaacattggacatttatgtggagatgtcacggagggatgagttgattgccaaactaaccgattcgctgcagcaatcgctgaatgtgcgtgacaagctgcaggtggatgcggatcgtctgggtggcgaagtacagaatctgcgtaggcaactccaagagacgctcgatgcagtgaaacgctcgagtgccgtatggcccgatcaggaatgcaatcccggtcagcgtatctcagagatctccatggatttgatcagcgaaagcgatgatgatctggatcgtcattttctcacggacaacgaagagcgcggatcacgcagctccaaggaaaggcagctaactcagttacaaaccaacgaagaattgggactgcaggcgtcaaacccggagtggacaccgacatttagcaagcagatcgaacagttccacacatatctgttgcccaccgaacagcgcatcttccagatggtccagcgcaagttcgacgactatttgaaccaacagatcaccttgtgtcgtgatcttggcgcccaggagctgaagattgcccgcgatcagtgggagagcgagaagctaaccagcgaacagaaccagcaggcagctcatgccaagcaaatggaggatctgcgcaagtactttgagcataagtgcgccgatctggaaaagcaattctcggacgatgtcttctcgcacaagtcacagcatcagacaggggacagttcatcggagtgctcggaggtagatcagttgcccgaggaaggggccgccgcggtgtcctccaaggaaccatctccccgcaaacggaagcgagctgagctgcttctgagtcccagtcacaggcagatgactccttgtggcttggattcgctgggagaaaacactggaaaaactgaaaaagacaatactgcggatatagccgacctaaagatcttttaccaaacccacatcaaggagctaaagcgcgcgcatgaggatcaggtgcgcaagctgagcgatcggataaagttctatgagcgacagcagggtgatgatgactataagcctgcaaccgaatcacccgaacgtacctgcccggatcaggaatccgcagggggagtcgcgaatacctcccttattatcatcgatgaggatgagttgaatttcaacaacgaatcgcaggttattcagcgaatcatcgaggagtacgagaagagattgcaggagcaattggccttggctcggcaggacatcgccaccgagttggagcagcagattaaggtgagcggaacaggcaggcatgtggcatgcaactcaattcattgcacggtttctgttaatcaaaattaa

SEQ ID NO: 31380 - protein, 1120 aa, DROSOPHILA
MAINIALFTLQITSLLRPHGASVSYKAIEAATLEELPATSVATATSTAATSRATGGAAATCVDVEFIPTLNIIFEKPTSSSEQLQCAEKSEHVAGGVSDKEPADDCDSDNDSTRTYIISRSSWTGVTSSSSTPYAVTSTDTAELLRRQNNLSLTEEDQSVSSFSIEQPTSSITIEMADQRTTTTTTTTATTATTPSSANILATTATTTTTTSSSIEEEIEEAIEISEVEEQLNTPLESLSEAAAYARPKDEQSSAKSLSSNPAEDEDADEFRIDDAQLSGGQLAQHFLVDEDESEEGSDLPAASKVEVSLSSNDDDFDISLPLEQRKPVHSLHEDDESVDQSLSNQSTTDDVSELVEEPVHEMDDKTDGSAAISASAPQETQVDESQITDEQDHSMEEIVATNESIEVTYEAEETVNTSQKQDLITDLDEESEDQVHVDNRPTSTLQALKLPALQQPQIVERKAATALTTLRLQADVLEPLELTILEMDDDENEEDDDDEESSLQLMKLRLMAMNQQMIVDNAPKLSPTEAEQTQVTSSSNNLEIKQMERVPLTEFSKDVLEDITEESERLLSMSTTMEEEQDPPSLSLDESKTLLQPGAHKTGGSSSSLVSLNMLKQLEAKVQELHTQLETKDNCLASLNLQLETARRESSAGPASARDSSSLMTNSTEYRTLQEELGGPTLDIYVEMSRRDELIAKLTDSLQQSLNVRDKLQVDADRLGGEVQNLRRQLQETLDAVKRSSAVWPDQECNPGQRISEISMDLISESDDDLDRHFLTDNEERGSRSSKERQLTQLQTNEELGLQASNPEWTPTFSKQIEQFHTYLLPTEQRIFQMVQRKFDDYLNQQITLCRDLGAQELKIARDQWESEKLTSEQNQQAAHAKQMEDLRKYFEHKCADLEKQFSDDVFSHKSQHQTGDSSSECSEVDQLPEEGAAAVSSKEPSPRKRKRAELLLSPSHRQMTPCGLDSLGENTGKTEKDNTADIADLKIFYQTHIKELKRAHEDQVRKLSDRIKFYERQQGDDDYKPATESPERTCPDQESAGGVANTSLIIIDEDELNFNNESQVIQRIIEEYEKRLQEQLALARQDIATELEQQIKVSGTGRHVACNSIHCTVSVNQN

SEQ ID NO: 31381 - DNA, 2654 bp, DROSOPHILA
ataagcttttcaaataggcacttagttggttcaagctggcataatttattagagtatttccatatataagcgtatttctaaataccaatttagtttactttaaaccttcatcaggatgagatttttcatactttcggtgctgttcgggctagctttactcgctaactttacagaagcggcagctaaaccagattggattacagtgagggaatacacagtctcacttgaaatagattaaactagttaagatgtgaaaataacaactttcttcaaatgtatgtgtgcacgaaaagaaagtcaatttaattgtttaaactctcagttggtcgtctacgtatttgcaaaaactttcaaactgtcacctgcagtcgtgcatacaaagttgcagtagtaatcatactaaaatgtttaactaaaactgtgtgccttggcttggaaattacacttagtgttacattgtttggttaggaatataaactatagtatacaattccttcttgtttatatggttgaataaaaaaactttgagaatgcaagcaagttattaagatgtaacttggattttggttttaaaatctataatattataaataaacaaaatatacaagttattctttggggtttgaagcttacaagtatgtggggaacgaaaaatttctcaaataatttatttaagcttactttttctaccatcgaaattgaaacccggaatcggaactcagaagcaagactttttaattgccgtattgtttgagacaatagaacagatgggaaacatcaagctaccaaatttttggcaaaccgctaatgacaactattcagcaaatctgtttttccgaccgccgagaacccaactaagcaaatatgaaactacgcaaaacgtggttaaataatttgcacggattcccagaaacgaattttagttgaatcaatatttgaactgattaaatgaaaagtaaattatacccgtaaaagaggtgctctataaaatgggggagcaatggccaatggaagtcagttgaaagtggttgctagtttggaaaatatgcgtctgttcgtggctctggtttgtgtcagtttggtggcagtgtcatctgcccagttgtcactgcgcggaagattgggacgctcatcgaaggtggatttggcagtggagacacccactttgctggccaagacagccggacttgtgcccactgtgcttgtgaaaaatgccggcatagtgcccactgtgttggtaaagaatgcagcccaaatcttacctgccgtcaatgttgccgccgatgtggaaacgcccagcatcttgccccaagtgtccaacaacatcttgccctactatccccgctactggcccgactatggatcctatggatcctatggctatcccggcggctggaacagtcccagctactggaataataactactacgactatggagcaccctatttgcccagacgtcgttttgttaagcccgttgtgtcccctgccgtgatcactgcacccacttccactggctcctcgtccaccagcagcactactaccactgtttctggtgaggattcgccatctgtgactaccgatgtcgttcccgatcagtcggacgcttccgaaaatcaggttgctgaacccgtggtcacgacccaggtgatctaaggagaggtctaaaaaataataattaaattttatatattgagcaattattttttcattaatagagaaagttgggcgattgtcaaaggatcttattgctaaataccttgatgttactatcagtaattttctcacaaatcttggatatcattttagagggtacaacacataagtagaagacattacctatttttttaataagttaaaaccactttggtataccaacaggaatttatagtttgtataattaacacacaattgtgatagatttgaaacttaatcgataatatctatgattcaggatttgtatcaaagttaattatcaatttatggccactttaggcctcgaaccagaacgagtacccatcggctatcttatcgcggttagtcctatatactatatactaaacgctatttgtcgcattgagtagagtgcaaacactgagcttagtggggcattaaaggtgcgaactatccgttgtcgtggccaaccagttttgaccagcagcagagccagaaaaaaagcaacaggctaagagcctgccatatggcgcaatattgaaatatccaatcaaaatgttaattcgaggatagaagaagagacgagaaatgaaaatcaaaggaccatttttcgttcagggtcgggcattgtttcagtcctggatcctggccaaggatcaactcagttcaggtaaaattttcattcgaaacttgatgggtttttatgtaaatttacgatacgcgccgaagatagattttgatgaaaaaaaaatacccttttcacacttgttgattcattaaacggcgcgaccgatgggtgaaatacataaaaagaaggggtttattgttattttcgctcttagtttgtttggatacaaaaaaaaattgtgtttggttttgtttttgcctatgtaaccggagcatattgagggactttctatgctcgctggactagtgggagtgggaatggtagtgacgtgctttttgctccatgtttattttt

SEQ ID NO: 31382 - DNA, 654 bp, DROSOPHILA
atggccaatggaagtcagttgaaagtggttgctagtttggaaaatatgcgtctgttcgtggctctggtttgtgtcagtttggtggcagtgtcatctgcccagttgtcactgcgcggaagattgggacgctcatcgaaggtggatttggcagtggagacacccactttgctggccaagacagccggacttgtgcccactgtgcttgtgaaaaatgccggcatagtgcccactgtgttggtaaagaatgcagcccaaatcttacctgccgtcaatgttgccgccgatgtggaaacgcccagcatcttgccccaagtgtccaacaacatcttgccctactatccccgctactggcccgactatggatcctatggatcctatggctatcccggcggctggaacagtcccagctactggaataataactactacgactatggagcaccctatttgcccagacgtcgttttgttaagcccgttgtgtcccctgccgtgatcactgcacccacttccactggctcctcgtccaccagcagcactactaccactgtttctggtgaggattcgccatctgtgactaccgatgtcgttcccgatcagtcggacgcttccgaaaatcaggttgctgaacccgtggtcacgacccaggtgatctaa

SEQ ID NO: 31383 - protein, 217 aa, DROSOPHILA
MANGSQLKVVASLENMRLFVALVCVSLVAVSSAQLSLRGRLGRSSKVDLAVETPTLLAKTAGLVPTVLVKNAGIVPTVLVKNAAQILPAVNVAADVETPSILPQVSNNILPYYPRYWPDYGSYGSYGYPGGWNSPSYWNNNYYDYGAPYLPRRRFVKPVVSPAVITAPTSTGSSSTSSTTTTVSGEDSPSVTTDVVPDQSDASENQVAEPVVTTQVI

SEQ ID NO: 31384 - DNA, 2414 bp, DROSOPHILA
aatgtgtggctcaatagatcaataaatgttttatctctcaaatatttacttaacattagtaaggtgcagccattgtgcagtttgcaatagaaattttaaagcaaacacggcattcatatataagaagtgcagtactttgaaaaaacttattcaaagaagaactaagtctacgaaatagagatgcactttctgatggtactcgtgataattgctcttttggccatggcctttgtgagtgcaagcccacttccccatccaagtggagaagttatcgttattgtcaacccaaaagccccagttgactggtgctctacaacatcagcggcttaaattcgaaaatacaaaaatatttagaaattctcccccgatgcaatttctcaaacacaaaatatgaaatgagcaactgataaatcaccaataaagaaaataaaaataaaacttattcagggtaaaacttttaaatacgttttttggtctttataagttaaatgaaatcaataaacgttttgaagttcgatttggagatatcagattttttattttgctttatattagcacatattaccacgacggaaatgaaaatcctttaggcgaagtaaatagtaatgaaggtaagaaaatttgtatctaatgttttaaaaaggccaaaaaccattcactatctttttaattcaatgattgcatgcgagtgtgtaataaatatgacaaaataaaaacagaggtcgctatagtcaagtgccacgactattagatacctgttaatcagaatagaggcaagcacaacgaacccacttactcaaaacaattctggacaattcccagaataatatcaattaagattgtgcgtcaccacgcaataatgggataagcatttgttcaaatatgaaattcgtaaatgactcgttcaaataacaaaaaaaggcatttaatataaaaagcgattgatcgagtaaagtttcaaatcagtttaaaacttcgctgagcacaagaacacaaaaaaatgcgattcctaattgtcgttgctcttgtggcctttttggctgttggtcttgtggctgcacggccagctgaggatgaggagtcctccatccaggataacaccaatgaggattcgtccagtaatgatggcgagggaaactccgatgctgccgaggaagaacctgctgttgaagaaagtcaagattctggaaatgtggataaccaggatgatgaaaatagcgaggataatcaggaggagtcagataatgaatcaagcggagatgatgaggaagataacaacgggtctgatgataataccgaatcggataataataacgattcagaaggcgatcaggagcaggatgctccacccaacaaccagattcgaccattcggacctcttctcatccaagcaaggccccttttcctcgattaataacacgtgtttttaaaatatccattaacaataaacattagacaaaatgctttaaaattatacaacaaataaaacagtaaataaattaaagctatatatgtcgatcgatatgaaaaaacgccacaaagtatataatactttttgcagaatttgtttagcttgaggggcttgtctacacagttaaaaaaattatatagaatgaatacgctttcataccatcagtttttaaaaaaatgtatgcttaaatgtcagttaaataacagtctttggtatttaaaatctggccacaagattttaaataatttgattttgctaatatgctgatattatatatatagttaaagtaaattatttcatttaaagtaccataacacaagataagctgtatgtcataaccccaagtattttcgttaaaatcccgtgttacagaattgctttagcaatttttacggctattttattgtaaaacaatatatctctaaagtttttgactgccattcccagtgatattatagcaacaatgattatatggggaatttgaataatttcgtgctacagaatttatatattttcaagttatttttagtgcaaagaaagctgcttatgatatatgcctctcagttcctaaatatatctcttaaattgtagttcacttacatcgtcaggtgacggaagagttggcagataaaactgcaatatttacttttgtacatatatggcaatctacagattgcacagcttggcaggtaaaatttttctgaataagaagaaacattccgttttttatataaaatgtgcagttgataggagaaaggtgtagttaccggagaaattcaagtggattaagatgcgttatttaggaattattgctctcgtcgctttcctggccatttccactgtgatggcacatccatatgcgaacagtagcactgaagaaggatcaggatccagtaaccgatcgactattcgtcctgtccccagatggcctaagtggggtgga

SEQ ID NO: 31385 - DNA, 414 bp, DROSOPHILA
atgcgattcctaattgtcgttgctcttgtggcctttttggctgttggtcttgtggctgcacggccagctgaggatgaggagtcctccatccaggataacaccaatgaggattcgtccagtaatgatggcgagggaaactccgatgctgccgaggaagaacctgctgttgaagaaagtcaagattctggaaatgtggataaccaggatgatgaaaatagcgaggataatcaggaggagtcagataatgaatcaagcggagatgatgaggaagataacaacgggtctgatgataataccgaatcggataataataacgattcagaaggcgatcaggagcaggatgctccacccaacaaccagattcgaccattcggacctcttctcatccaagcaaggccccttttcctcgattaa

SEQ ID NO: 31386 - protein, 137 aa, DROSOPHILA
MRFLIVVALVAFLAVGLVAARPAEDEESSIQDNTNEDSSSNDGEGNSDAAEEEPAVEESQDSGNVDNQDDENSEDNQEESDNESSGDDEEDNNGSDDNTESDNNNDSEGDQEQDAPPNNQIRPFGPLLIQARPLFLD

SEQ ID NO: 31387 - DNA, 2180 bp, DROSOPHILA
gaggaaaccaaaagtcaaactggagaagatggcgagttcttcgaagatgaagaggaggaagatgaagcgactgtggataaaccaactgatgtcataccagttaattttctaaaatatcccgagcacgaagctgattttaagtcttatccaaggtttgcaatccttcgaaatggctatgtgcatcacatgaacttggacttttagcgtttacgcaatttcatcacaaattcgagctaatgacgtgttctcaagaacattgtcagttaatgtcgatagatggggaaattccgactacagtcaggtggtttgcacagctgtgactctgaataaaagttagatctgtggtacctatgtatgagtttgttttcctatagctatacctacaaacagtgtgctccgagccacacatttgagtagttttgtttttagttaccaaaatgcgtctctacgttgggttactatcggttttggcccttacttttatgattgccttaatcacgtgtgctgattcatcatctggaaagtcccggaatcgcgaagatcgatttgatctagaaaacgagagctttaataatcaaggaagtgacgagctaattgcgtcatgtgaaagtaaagagagtgtggaaatcaatagctgtcgtcaggggaaaagtaaataccccaaaagaaagacatttaaattcgccatttagttaaaacattcgataatactgttctcaataaaaatgtattaaaaacaaataatagctatgatgtttacttggtttggtttttatagttagaatatattttgataagtactgatttttgatcatgcaggccatagttttttgctattctttaaatatattatttatacagcatttgcttttaaagataatttttttcacaaaattgtataatgtatatataatttttctttttatagttaaacaagttgtgaataagttgtgtattcaatttgtattttcagtgaattcaactcatcggcaagatggttatggttagttccgcggttctgggggccgcagccggtacaggattggccctgatcctggccgtgacaatcgtcatgtaccgctactaccttctgcgtaagcgtggcaaggagtgggacgaactggaccgctgggaggaaacgcgcattatgcggaagctgcagatgaaggtaggcgactgacgcagtctgttaatgttaatgtgattgcggccagaacgaggcgaggacaccccgtgaagttgcagacgcacagctgacactaccaggccagaatgatatggagcacaaagttggccgaatagcgtgggaggttggtctgcctgtaaatgacataggtccaatggtttcataaatacgttatatggggatgcttactttgtttgttttgaaatctctttaagaattcttttgttttaattatatttcaacttgtgcctaagattaatataatatagaccgtgggctatcgaacggatttcttggttgtttttcaaaccaactgactgcaaggacggctgagatttgagtttacacgcttataatacagtggcgccactatttcaattacatgtagcggcgaacttctgaactagtggtatctacactttatctacatttcatgtaaaatactggtttttctgatttcaatataagaaattgtaatctacgactatctaataacaatattaggtattaaagatcaagaataacatggcttaggaaatgatatggtcactatagcaaatatgtataaattgcgtttaacagtgacgattttttgggtatttatcttaaattttattgaccatactttatgggaaatgataaattgttcaaatatatttattagagttgagtacccatcttgacgcttaatttctttaagaaagcgattatatttttaatttacaacttaaaaatgaatatttacattaaaatatgattaatagaaagcttgaatattttgaaaatgtggttttgtagttaagaaatcctgtacggtatacataaccattaattacatgccagaaaactgagttggtcagccattttgaatcagtgagaagtccaaaggatcgcagacaaccacaaggatacaaatgtgtctggtgctcctgggagagcggctgcaatcgaatgaatgaggccgtatcaaaatctgttttattatgcatttgat

SEQ ID NO: 31388 - DNA, 180 bp, DROSOPHILA
atggttagttccgcggttctgggggccgcagccggtacaggattggccctgatcctggccgtgacaatcgtcatgtaccgctactaccttctgcgtaagcgtggcaaggagtgggacgaactggaccgctgggaggaaacgcgcattatgcggaagctgcagatgaaggtaggcgactga

SEQ ID NO: 31389 - protein, 59 aa, DROSOPHILA
MVSSAVLGAAAGTGLALILAVTIVMYRYYLLRKRGKEWDELDRWEETRIMRKLQMKVGD

SEQ ID NO: 31390 - DNA, 2636 bp, DROSOPHILA
agtaaacgtacaagagagaagacaatacaatgaatcaatacaatgcagtaaaagtaacaaaacagcgcaattaacatataaaagataaaaccaaacctctcagacaatactggatatatataaaatctcaatagctcattcagtatttggtgataatgaggacagattaaaaaacattgcaaaaacttttttcactcggtcaaaaattgatcccgaatatttggttttaccttaaagatattttggtaacaaaattaaatataaggggcggtgccacgctcacaatttttggtatcgtaaaagatatggcctagtgtaacccaatgcaaaaaaaaagaaattgaatgtctttatccgttctgggtaaatctataatctcattgtcagcattaaaaattactaacacgcgccgcattataatgcaattcgcctatgttcgacgagcacctgactgccgttgccacttttacctttatccttcttgttgactccttcgttggcaacatttcttcccttttaaccgcctccaggaactgtttacaattgcgcacaagtcgtcaatggctgtcctcgtccttgggctccctccaatggcatctggatgttccaacacgaactgctttcactttcctagattttttcacagattgtgcattcaactaaacatcattacgtttttccagttgccccacgcaaataagcaacttaagctgaaattttatgattgcggcttctttaagaacatttaatttgtcacagaaaattattggaaaaacatattacgttttcttcaattctaaacaatttatggaaatttaaaatttgcgttattttaaaaagaattttatatcgttcgtctaaaaatatgcttcaaataaaaatccatttttttaataaactgtttatttttataaatgactgatcccaaaaatatgaaatgaaaataatgtaacatgtagtggagtggttttttatgaaaactttcaataaggctcagtgcctattcattttccctagcggctatctctttttcgatgtcatctagaacctggtcaatagcatcttcctcgggatcgatcagttcatcctcattttcgttgtcttcctcggattggtcatggccatcttccaactctttctctttatcgagctgatcctcttctaggtcatcaagctggtcctctgaaagatctgtttcgttgtcgtcttcgtcctcttcagtttgatcctcctggtggtattgatcttcgccagattcctcgtcactctgggaaatctcatgagaaaactcttgggaaatctcgtgggattcctctgcactggactgtggaccctcgacaatctgaccattgatggtgggcatgatgcgatagtaaccgttgttatagtacggataccaattgttgttccattggttacgtggtgacgatggggtagtatttccctggttgctgttggcaacggaattggacactcccgtaatgatcaccgtgttgtttccaaacttaaccgtcgtattcctttgaccagcctctgccaggacggcctgcagccaacccaaattcatctggggagctgcattgccataggcaaggataccggcaaagatcagaagagcaaatgctatggattgcatgattatcaaaagtatacaggctgagtgcaactgagactatgattttcaattagcttatctttgtttttatatctttaaaaagttgtccaaatcgatcgatttattgtgacatgattacattatgctaacaatcgtcaaggttccatcatggcctacgatatatttagttagaagtagttattgtttttggcttaccacaaatacgacaccgaacatgtgagtaaatattaagaagtttcgagtaagcggagcaaaacaagctaatgtgctatgaatcagaaaataagaatatggagggccattcccaaaatttgtaaacaattgtaggtggaacagtggttattctacaaagaaataaaaaggagtcattaatttgatatagacattttcataagcaagttaactatggattataacatgctgtgtttgctttccttaggttatacaatatattgtatataaaagtatgacgttagccacgtttcactgtaatctttatacgttctccaagttccgtcagtcaaatgtttacgcacgactttgcctcattttttgacgctcaaaccaaggcaacagctgtcgcggggtaaacacaaaacgaaccaaataaattgtcacaatgcgcgcttttatttttctgccaatttagagattttgctataaaagcgtattttcaatgtggaactgaacttagttgaaaactaaatttgacaatacaatgcgtgcctatttgctgcttgccctgtttggatgtgtgcttttggccacagtttccgcaaatccggtggacattgacgacttggaggacctcgaggaggacaaacgaattgctgatgagcaggataatgctaacgatgatgagaaagacgatgaggattcaaatgaacccgagtccgacgacgacttagatgagcctgaatccccggaggacgattcccagaacaatgatgattccgaaagcgacgagagcatccagtacaatcaagatgaagagtagctc

SEQ ID NO: 31391 - DNA, 636 bp, DROSOPHILA
atgcaatccatagcatttgctcttctgatctttgccggtatccttgcctatggcaatgcagctccccagatgaatttgggttggctgcaggccgtcctggcagaggctggtcaaaggaatacgacggttaagtttggaaacaacacggtgatcattacgggagtgtccaattccgttgccaacagcaaccagggaaatactaccccatcgtcaccacgtaaccaatggaacaacaattggtatccgtactataacaacggttactatcgcatcatgcccaccatcaatggtcagattgtcgagggtccacagtccagtgcagaggaatcccacgagatttcccaagagttttctcatgagatttcccagagtgacgaggaatctggcgaagatcaataccaccaggaggatcaaactgaagaggacgaagacgacaacgaaacagatctttcagaggaccagcttgatgacctagaagaggatcagctcgataaagagaaagagttggaagatggccatgaccaatccgaggaagacaacgaaaatgaggatgaactgatcgatcccgaggaagatgctattgaccaggttctagatgacatcgaaaaagagatagccgctagggaaaatgaatag

SEQ ID NO: 31392 - protein, 211 aa, DROSOPHILA
MQSIAFALLIFAGILAYGNAAPQMNLGWLQAVLAEAGQRNTTVKFGNNTVIITGVSNSVANSNQGNTTPSSPRNQWNNNWYPYYNNGYYRIMPTINGQIVEGPQSSAEESHEISQEFSHEISQSDEESGEDQYHQEDQTEEDEDDNETDLSEDQLDDLEEDQLDKEKELEDGHDQSEEDNENEDELIDPEEDAIDQVLDDIEKEIAARENE

SEQ ID NO: 31393 - DNA, 2614 bp, DROSOPHILA
atggtgttctatgataataaaaaataagaaagagatctggaaagagatcggcaagacgaatcctttatgccactgcagtacttacatattttatattttaataaacaaataatgcattccgaaatcaacactatgataacaagatgatataatgtattatattccgacttcgatcccatgacagcaatattcgcccaattttggcagaacttatatattgtcatagaactggtcatgataagaacagttaataatcatggctatgacgaattaagtcgtctgatttgaaccgttcggaagaactcatttgaaagagtttctttctgtgcaaccttctaaacgaaatcaattaaatataccctctacaagggtacagggaaaatcgcaactaacgtaaaaaaatcgatcattttattgaaccagatagtccgccctatccacaccttgtataaaagctgaccgcatgaaacgtctaataaacgttaatatataaaaaatactatatactatacatattagaattttttgcattcaatttaaaagtaacatatgcattgaagattttatgaaaacccaattatcaatagtacgcacaacatttaaaaacagacgctgttctctatgataggtaatcttaatttgtgaaatgggatactaatcctttattgatgtgatccgcctcatttcgtgactctttattttctttgccgatcttgtttgtaatcatactcaaccaaccgaagaagtacccgcagtaattgcaattaatttgaagtactcttagataagttgcaacaatcagaaagcagttgatgtcagaaaatccgttgccatgcaacagagtacgttgagcgtaccgacgtacctgcagtcttgatgacgcatttcatccccttcatccttgggatttcggaaagcaggtagggaaggaccctcctagtcattgcaccaccatcgggtataaaaggccgggcagctagacctacagcatcattcgatcaacagttctccatccgagcagatcataagtaaccaacctgcaaaatgttcaccgaaaccgctcttgtttccaacttcaatggagtgacagagaagaaatctcttaccggcgcctccaccaacctgaagaagctgctgaagaccatcaagaaggtcttcaagaactccaagccttcgaaggagattccgatccccaacatcatctactcttgcaatactgaggaggagcaccagaattggctcaacgaacaactggaggccatggcaatccatcttcactgagttcttctgggacatccccctccatcgagtatctgtgatgtgacccgatcaaaaggtctataaatcggcactccggctttaatatccaactgtgatgacgagaacacaagactgactgacttgtgtgccttggaggtgacaaagttcgtcgcctctgccaactgtacatatcaaactagctgctaaaatgtcttcaattatgctttaatgtagtctaagttagtattatcattgtcttccattagtttaagaaaatcattgtcttccatgtttgtttgttagggtaaaaaaaactagcttaagaataaaaatccctcgcggaaagaaaacaatatttcatcgtattattttttcatcctgtttattattaggttcacttatttgttttgtgtttttaatagccttgaagatacatttgatgaacacaatgtcttaattatattgcgatgaaataaattggttcggcagttttctgtacgaaggacatgtactatacactgttcgtcagaaaatgttctgatcgaattggtctcgctcaaaataagtgtatttttgctatttatatgcctttgataaaaatgatttgaaaaatacaaccgaatatcgtatcatttgcgtcaaaactagaaagtttgcttgattctaaatattgtatttttattgtttttatacaaatgcaattttctcacactatgtaattcattaaaggggaaccctagtaatcgggcgcaatgcagatgtaccgaacagtcgtattagaatatatatttgcaaagttaaaaaatttttattgaatcaattttttatttaattacaatattttacacgggtcacacagttaaagtcgaaaactattcagaaatttaacatttcaaaaactcaagttttttactttgtccatagttagcagtcacaaatctaattgattgctcgctgtgttgcagacattttaaatagttctgcccgtcccttgtcggcgagggcacactgtacaacagccgagggcaaacagtacacttagtgataaggggctcttgaacacatacaacttttaagttttttattgttgtttgtttgttgttgttttttataagatcgttattgtgtgctccctgttatttaacggtaagtttcagacataggggtaaagatttttattttctattgccaacattaccaaaatatgaataaactagaaatctaaaaactaaaattattcaaattaggcaggtgtaatataactcacatgctagcccttcaagtaggcaacacattgtgcaaaagtacagcaagcagctaaatttctagcttgtaactttttttatgctgtaat

SEQ ID NO: 31394 - DNA, 614 bp, DROSOPHILA
aacagttctccatccgagcagatcataagtaaccaacctgcaaaatgttcaccgaaaccgctcttgtttccaacttcaatggagtgacagagaagaaatctcttaccggcgcctccaccaacctgaagaagctgctgaagaccatcaagaaggtcttcaagaactccaagccttcgaaggagattccgatccccaacatcatctactcttgcaatactgaggaggagcaccagaattggctcaacgaacaactggaggccatggcaatccatcttcactgagttcttctgggacatccccctccatcgagtatctgtgatgtgacccgatcaaaaggtctataaatcggcactccggctttaatatccaactgtgatgacgagaacacaagactgactgacttgtgtgccttggaggtgacaaagttcgtcgcctctgccaactgtacatatcaaactagctgctaaaatgtcttcaattatgctttaatgtagtctaagttagtattatcattgtcttccattagtttaagaaaatcattgtcttccatgtttgtttgttagggtaaaaaaaactagcttaagaataaaaatccctcgcggaaagaaaacaat

SEQ ID NO: 31395 - protein, 78 aa, DROSOPHILA
MFTETALVSNFNGVTEKKSLTGASTNLKKLLKTIKKVFKNSKPSKEIPIPNIIYSCNTEEEHQNWLNEQLEAMAIHLH

SEQ ID NO: 31396 - DNA, 2237 bp, DROSOPHILA
aataagtgtatttttgctatttatatgcctttgataaaaatgatttgaaaaatacaaccgaatatcgtatcatttgcgtcaaaactagaaagtttgcttgattctaaatattgtatttttattgtttttatacaaatgcaattttctcacactatgtaattcattaaaggggaaccctagtaatcgggcgcaatgcagatgtaccgaacagtcgtattagaatatatatttgcaaagttaaaaaatttttattgaatcaattttttatttaattacaatattttacacgggtcacacagttaaagtcgaaaactattcagaaatttaacatttcaaaaactcaagttttttactttgtccatagttagcagtcacaaatctaattgattgctcgctgtgttgcagacattttaaatagttctgcccgtcccttgtcggcgagggcacactgtacaacagccgagggcaaacagtacacttagtgataaggggctcttgaacacatacaacttttaagttttttattgttgtttgtttgttgttgttttttataagatcgttattgtgtgctccctgttatttaacggtaagtttcagacataggggtaaagatttttattttctattgccaacattaccaaaatatgaataaactagaaatctaaaaactaaaattattcaaattaggcaggtgtaatataactcacatgctagcccttcaagtaggcaacacattgtgcaaaagtacagcaagcagctaaatttctagcttgtaactttttttatgctgtaattgtattcgttttagccaactcaccatctaaagaactgctaattctacctgcaaaacggttttcatccccttagccaccgaaattttacaaagcaggtagggaggattgcgaaatctgtgggtataaaaggccgagcagctagaccaacggcatcattcgatcaacagttctccatccgagcagatcatcagtaaccaacctgcaaaatgtttgccgaaaccgctcttgtttccaacttcaatggagtgacagagaagaaatctcttaccggcgcctccaccaacctgaagaagctgctgaagaccatcaagaaggtcttcaagaactccaagccttcgaaggagattccgatccccaacatcatctactcttgcaatactgaggaggagcaccagaattggctcaacgaaaaactggaggccatggcaatccatcttcactgagttcttctgggacatccccctccatcgagtatctgtgatgtgacccgatcaaaaggtctataaatcggcactccggctttaatatccaactgtgatgacgagaacacaagactgactgacttgtgtgccttggaggtgacaaagttcgtcgcctccgccaactgtacatatcaaactagctgctaaaatgtcttcaattatgctttaatgtagtctaagttagtattatcattgtcttccattagtttaagaaaatcattgtcttccatgtttgtttgttagggtaaaaaaactagcttaagaataaaaatccctcgagggaaaacaaaaaaatcttttggtcttttctattctatgctgctttaaagacgcttaaattttttgattaaaaaatagtaaaaaataacaatgttcaactataagatgtgcaataattacaaattttttgcaagttcaaaaagtttcattttgacctattcctattaactatttttaagtgacacttctattcttggcatatgtcttgatacaaatagatcaaaagatagacaattaaaatgcttattagtggtaagggcaggcatattaaaataaagaaaacatttgaaatgaaacggattaaatatggtaataatatagtagctccacattaagtgaacgaggttactaaaaaataatatatatatacgggtaaaatatggtaataatatagtagctgcatattaagtgaacgagattactaaaatatatctgaaaggctcgataatcattaaattttttaataaagtgctcattactgtgtttaccgttttaaactatcacatttcatgagatttgtaaaggacttgttggtttcctgatactatattttagattgacagcaataattatgccagtaaatgcaattctgatagtttagagtaatagtttgcatattaaatctgaaaaaagaataactaaaaccaaatagcctccaatgccagttggttgcaagaaaccc

SEQ ID NO: 31397 - DNA, 237 bp, DROSOPHILA
atgtttgccgaaaccgctcttgtttccaacttcaatggagtgacagagaagaaatctcttaccggcgcctccaccaacctgaagaagctgctgaagaccatcaagaaggtcttcaagaactccaagccttcgaaggagattccgatccccaacatcatctactcttgcaatactgaggaggagcaccagaattggctcaacgaaaaactggaggccatggcaatccatcttcactga

SEQ ID NO: 31398 - protein, 78 aa, DROSOPHILA
MFAETALVSNFNGVTEKKSLTGASTNLKKLLKTIKKVFKNSKPSKEIPIPNIIYSCNTEEEHQNWLNEKLEAMAIHLH

SEQ ID NO: 31399 - DNA, 5340 bp, DROSOPHILA
acagcaataattatgccagtaaatgcaattctgatagtttagagtaatagtttgcatattaaatctgaaaaaagaataactaaaaccaaatagcctccaatgccagttggttgcaagaaaccccatatttttaaaaagttggtattctctggctctggctcagtggcgccgctgtttttcacctatcgagtctgttaccagaactatgagcactggccagtcacgtctccaaaaataatcgataggcgaggagttgcccgggcttttggctccgtttcaaactgtttatttatttcaacgcttataataaaagttgctgtaacaatacacattcgatatatgtatatataagtatatatgttggaagtgcacttgggtttcgttatccgtgtaggtgattcgggtgagatgtatgtctgtttgtcacttgctgtctggatttgctgcatttgttcggaagagttctgacaacattctggaagatgaagtatttatatgcggtttcgtcgtttagggttatagttttagatccaccagtggcatgtagagtttgttcgaggggctcaaacaaatgtggagcgtaggggacaaatgcagatggcaagaccgaaacggaagaatcaatttctgagtggaagccgacttttggattgctgtattgctggactgcggtgctcggttgctagtgcgggtttcttttttctcttttctcaaaaacttctcgaaaatgttgaatttctctcgtattaggtgcaattatctaatatcaatattttgttcgtctaaaaccaaaaacggaacgctggccaattgtagttcgtctgggtctagcaagcagttcgccgcccatctccgatatccctcgtactcagcactacggatagtccaccgaatcactgtcgaggatcgtggaggagaccctcgaggcgcgtcggtgccagtagtccgagtaactggcctcgtactgggcggcggtgcggtgccacggtggccatttcagctattcctcgacaatgtcccacaccatcagggacgcatctgtgccgcccacggtgatgagcgtgtggtcgccgcacaggaagcggacgcaggccagcatcccggagtacaccttcgactcgtgaaactcggcgcgcggcgagatgcagggatatctgaaaaagatggcataacatttgatttaagactatacaaatcccagagttcaaagagagacatacgaattctccttatcgaaagatgggatgttatataaaatgcattttcgcaactcacctgaacaatcttagatagccctcggcgtcaccggatgcgagcatgtcgtgggcggcggagcgactgcaggtggccacgatggtgttggtggtgctatagtagcggttgctccactggcccgccaccaggaagcccacggtgcagttgttggtcagccacttgacgtccttcatggcaatgggactgcgctccggggacaaggacttggcatcccaaaagagcaggtcgaaatcgatggtcaccgtctgcacaaagttgccgtccatgctccagtccaagtgggtcagcggctgcgatcctcggatcttgttcaccttcttgtacgagaagccgtcgcgcgacacgcggaacagataaatgctaccgttttgggagcccatggctatcatgtcgccaactgcgaaaaggataaagggtaaattttaaattttattaaatatcgatgcattcaacgaataccattactatttaaccctgatatcttaccctggttgtaagccacgcaattaaggggcgacccgcataccctcagggtcagcatgactgccccattttcgcagttgatgacaagcaggtgaccttcggtgcttccggcggccaaggtgccgaagggatggaatgccagtgccacgcactcataacctgtttgaatggtccagatgagcttgttcttgcgccacagggccacgtgcttgtcatgccctgcggtagcgtatagctcgtcgtccggatgggctgccaatccccacagttgacgtccgtggccaaagaccacctgggtgaagcggcgctgcagcgagccctccaggatgttgttccgcgtggtgcccacgtaaatgttcccgtcattccgtccgggccgctgcggatagatggtacgtactccaccggcggcctccgggagctgtggtttcgaaaagttcaattagcaacgttcctcttttcatacatgggatcaaaactaaaatcagcttagacagaatcttacctttgtatcggcaatcttcttgtagttctgcagggagtcccaggcggcgatcttgcgatctttctcgcctccggagagaagggtgccctcgcccagcatgatcaggcatccgatgcccttgttgtgcgcctcgaactccgtgcggacgaagtaggcgccatcggaatccaccgagtaaatggttatgaacccatccgaatcagcagtgattacatcgccatccggctcgaattgcacactggtgacatgggaacgcgacggctgtttcacgatgtccgtgcgctcaaagaagccatccttgcgccggtgccagaaggccaggtgaccacgtccatgggtgatgatgagattatcgtccaacgggtggaaggcagcccccgacaaaccctcctgcagggtctgtaattgagtcgagaatcggaattaggacgcttcttaagtgggctggattaggcggacttacggccactttgcccagcaggtgaccccattgccactgccacacggacagaatgctctcgcgtccactgtccacagccagtatgtagctacctccgttctgccggggaattccattggttagtcactaattgggtttaagtcctgggggcatgacttaccagctgcgagaaggctactgctgtcaccccactgtccagttcacccatgccaaagacgtagagcgtctgcagggactcggtgctccagatgcggacgtgcgcctgcgacttgcgatctcgtccagctttctgtccagacgcaaccagttccctggagggatgcacatccatgctggaaatgatatgcatttagatttataacttcatggaatttattttacttttaattaagggaacggcatgtacaatataatcgtaaatcataaactttagatatttaagtacttaccacatgatatcctcagtgtgtccggtgtagtgcctctgtgcatcctcgtcgcggtcaaagagtacggccacggcagccacgtagtagagcagttctccggagggcaaaacccagagatttcgccgcgcatcaatgccgcgatagccatggctaaaacagtcgaatctctgtaggattggttaaaacggaagtcgaattcaatatactaacacccattggagttgcagttttttgtccggcggggaattgtcggccggcgcatggtgaacgggcggatagaaggtgcgccgcagtccccggattgtgaccttggtgggctcctccttcatgatgtccagcatcgtgtactcgccgttcggccgcaggatctcgctctccggagcgtacaggatccgcggtcggctcttgctccgcggacgggctcctcgcagcggcaccttgggcagctcatccgtgggcaaaatgggtgcggcggccaccaccgaggggcgggacctggagcgccggatgggtgagccggcaatcagggcagttcccgtggccaggtagaaggtgtcaacgtcggcgaactcattccgtagctgggaaaagctgcggacctaaaaagccaataatatattataattattatagaagctattggtaagttaattaacaggataatatttatgttatataaaatttatgaaaaggtatatttatattgtttgggttcagatcaagtgtgaaatacccaaattaatatcttttggcgccgtgcgtgagggcaatttgtcaagcaattttgcaagtcggctaagttcggttcttcattaagttattaggccgtgtcaaggtcgtgcagttagcggctcaccccctgcatatatgtatacatacctcctggccagtgcctgtgtacattttctttgctccgttaattttcagcacttgacccaaatcctctagcacttcctcgaacggctgcgaggtgcgtaggttcagcaaaacgcgacactgaaaggggagaacagtgggggatatggcatgagtatatagatttgtatatgtgtaaaatcacgtgttaaatctggacgggtaattagtctggcaagtggctacatacacgtatgtgccacgcggccctttcaacacatttcacttgacccgcggtcaaaaatttagccatggcacgcaacttccgttcgtcggcttaaggacccgactttcccgattccctctaggtttaagtaatgcttataattatatgttgtcgtcgacttgcgtcctcgccgcatcctcagccacatccactttcctttgaggcgtgcagcacaaatcgagtctgtgacccagtttgcgttttcttttaatgcttaatacattttatttgttgcaaaaaggaatcacgcgaaaaaaaatgtgactagtcatccagaaaatacagagatttagataatgggcacttacaacccaagataatagcttcttagagatatttaaggaaatacgtttggaaattgtaaaatgtattaagaagttttaatttgcttgaccaatctgaatggtttttctcgcagtgcatgcagcattgtttgcctgcgccccattgtagatatgcttattgttgttgcactcgagctcttgcgctcataattgggtgcaccccacgcataccaccacccaccacccacacacaaaaccacccagagtgaaggccatgctttgttgcatttgttgggcggcgcttgactttggcttttctgctttccctgcttatttttcaagtggaatacttgagttttaatgaccttcagggccttgataacagttattcacgcgtgttaaagaagaatttgtctctccacttctgccaggatcctccatctccatcatcattttcctataataaggactcgctcagaattaaagcagctgccacggaagtttttatttggccgaaaaggacgaggtcctgcatcctggaccagagacaacgataaactttcgccgttgtctggccgagcttggtttaatttatgtatttagtttggcttcgaaaaaggcgtccgtttaatggttttatgtccgtgttgagtggttttccccgcacattgctgccacttaattttcccaacccaggtcggactgattgtcggcaaacaggaacagaaaaaaaaaacctaaaa

SEQ ID NO: 31400 - DNA, 2319 bp, DROSOPHILA
atggctaaatttttgaccgcgggtcaatgtcgcgttttgctgaacctacgcacctcgcagccgttcgaggaagtgctagaggatttgggtcaagtgctgaaaattaacggagcaaagaaaatgtacacaggcactggccaggaggtccgcagcttttcccagctacggaatgagttcgccgacgttgacaccttctacctggccacgggaactgccctgattgccggctcacccatccggcgctccaggtcccgcccctcggtggtggccgccgcacccattttgcccacggatgagctgcccaaggtgccgctgcgaggagcccgtccgcggagcaagagccgaccgcggatcctgtacgctccggagagcgagatcctgcggccgaacggcgagtacacgatgctggacatcatgaaggaggagcccaccaaggtcacaatccggggactgcggcgcaccttctatccgcccgttcaccatgcgccggccgacaattccccgccggacaaaaaactgcaactccaatgggtccatggctatcgcggcattgatgcgcggcgaaatctctgggttttgccctccggagaactgctctactacgtggctgccgtggccgtactctttgaccgcgacgaggatgcacagaggcactacaccggacacactgaggatatcatgtgcatggatgtgcatccctccagggaactggttgcgtctggacagaaagctggacgagatcgcaagtcgcaggcgcacgtccgcatctggagcaccgagtccctgcagacgctctacgtctttggcatgggtgaactggacagtggggtgacagcagtagccttctcgcagctgaacggaggtagctacatactggctgtggacagtggacgcgagagcattctgtccgtgtggcagtggcaatggggtcacctgctgggcaaagtggccaccctgcaggagggtttgtcgggggctgccttccacccgttggacgataatctcatcatcacccatggacgtggtcacctggccttctggcaccggcgcaaggatggcttctttgagcgcacggacatcgtgaaacagccgtcgcgttcccatgtcaccagtgtgcaattcgagccggatggcgatgtaatcactgctgattcggatgggttcataaccatttactcggtggattccgatggcgcctacttcgtccgcacggagttcgaggcgcacaacaagggcatcggatgcctgatcatgctgggcgagggcacccttctctccggaggcgagaaagatcgcaagatcgccgcctgggactccctgcagaactacaagaagattgccgatacaaagctcccggaggccgccggtggagtacgtaccatctatccgcagcggcccggacggaatgacgggaacatttacgtgggcaccacgcggaacaacatcctggagggctcgctgcagcgccgcttcacccaggtggtctttggccacggacgtcaactgtggggattggcagcccatccggacgacgagctatacgctaccgcagggcatgacaagcacgtggccctgtggcgcaagaacaagctcatctggaccattcaaacaggttatgagtgcgtggcactggcattccatcccttcggcaccttggccgccggaagcaccgaaggtcacctgcttgtcatcaactgcgaaaatggggcagtcatgctgaccctgagggtatgcgggtcgccccttaattgcgtggcttacaaccaggttggcgacatgatagccatgggctcccaaaacggtagcatttatctgttccgcgtgtcgcgcgacggcttctcgtacaagaaggtgaacaagatccgaggatcgcagccgctgacccacttggactggagcatggacggcaactttgtgcagacggtgaccatcgatttcgacctgctcttttgggatgccaagtccttgtccccggagcgcagtcccattgccatgaaggacgtcaagtggctgaccaacaactgcaccgtgggcttcctggtggcgggccagtggagcaaccgctactatagcaccaccaacaccatcgtggccacctgcagtcgctccgccgcccacgacatgctcgcatccggtgacgccgagggctatctaagattgttcagatatccctgcatctcgccgcgcgccgagtttcacgagtcgaaggtgtactccgggatgctggcctgcgtccgcttcctgtgcggcgaccacacgctcatcaccgtgggcggcacagatgcgtccctgatggtgtgggacattgtcgaggaatag

SEQ ID NO: 31401 - protein, 772 aa, DROSOPHILA
MAKFLTAGQCRVLLNLRTSQPFEEVLEDLGQVLKINGAKKMYTGTGQEVRSFSQLRNEFADVDTFYLATGTALIAGSPIRRSRSRPSVVAAAPILPTDELPKVPLRGARPRSKSRPRILYAPESEILRPNGEYTMLDIMKEEPTKVTIRGLRRTFYPPVHHAPADNSPPDKKLQLQWVHGYRGIDARRNLWVLPSGELLYYVAAVAVLFDRDEDAQRHYTGHTEDIMCMDVHPSRELVASGQKAGRDRKSQAHVRIWSTESLQTLYVFGMGELDSGVTAVAFSQLNGGSYILAVDSGRESILSVWQWQWGHLLGKVATLQEGLSGAAFHPLDDNLIITHGRGHLAFWHRRKDGFFERTDIVKQPSRSHVTSVQFEPDGDVITADSDGFITIYSVDSDGAYFVRTEFEAHNKGIGCLIMLGEGTLLSGGEKDRKIAAWDSLQNYKKIADTKLPEAAGGVRTIYPQRPGRNDGNIYVGTTRNNILEGSLQRRFTQVVFGHGRQLWGLAAHPDDELYATAGHDKHVALWRKNKLIWTIQTGYECVALAFHPFGTLAAGSTEGHLLVINCENGAVMLTLRVCGSPLNCVAYNQVGDMIAMGSQNGSIYLFRVSRDGFSYKKVNKIRGSQPLTHLDWSMDGNFVQTVTIDFDLLFWDAKSLSPERSPIAMKDVKWLTNNCTVGFLVAGQWSNRYYSTTNTIVATCSRSAAHDMLASGDAEGYLRLFRYPCISPRAEFHESKVYSGMLACVRFLCGDHTLITVGGTDASLMVWDIVEE

SEQ ID NO: 31402 - DNA, 3024 bp, DROSOPHILA
tttgtcaaacggaaggtggaaactttttcaatagttgttccggaacatgttggatgtgcggacgcttgattgctgcacccgcatgatgtctgcgatttgtgtggatttttttttgtttttggccaactgcctcggccagatgtaaaaagagaagacttttaagccaactgtttggcgagtatctgattgaaatttatgcgaaagtcaacccttcaaatgggttgcctaaaaaaatgtccttgggtgacgaaatggtttttcgaatttcatacaatgtttttatgactttatccccttgtttcttatacttaagtctttttacattaatataattaacttgttttatagaatcaagaaattaatgtactatgtaaataaaagaaataattttctccctcgaacttttggatgaaaagttatcgttaaatctgttacttttaattcgattccatccaccgctttcagtatattgatggaacttatcgataaactgccagctgaccatttcggcctaaagagttaatgtccttatccttttttgctcaactgagctactcttaagaaccactgttctcttagccgtcccaactctcaagttagcccactctcagtcgaccataaaggctaagacctaattcccaacttgccctcgtggcaggccaaaaggcgtgctaattgttggcattgtttctagggctagactcccacaacagcgagagtgagtgaatgcgaatgtgtatgtgaatgagagcgagagaaaacgaaagtgcttgcatgcaaaaatgtggccccaccgaacaactaaccacccacccgctcacttcacccatttcccccgcaaggacccgcttttccgaagaagagggagcaaaacaaagaagccgaaaggaaagcgacgcctttgatttttaggccaagtgaccaagttttctcactccacagcgctgaccgcaaaaaaacgccaaaacctcgtatatagttttatgtatgttatgcacacttacacacacaaccggcacactaactaaaattataccaaaatattcaaatttatattgattttgcgcctgacgtgaaaactctcacttaaacttcaaaataatgaaaaacttagctgagctgaaagcagaaatgcatgcaaataatctggtactaaccttgaaggccttgaacgaggatacgacatagaaggctccatcctccagttcatcgagatgatattttcgatctccgtccatggagaacacatatcgagcaccccgtggcaagtccatcttgggcgagatcttatcgagaagattgtccagtgaggttacatcccgtccgggacgatagcgcagctccacacccggaaagaatggatccccattccggtagaacaccacacggcgtgccttccaataggagagattattatatcgcgatgccgctgcacttgaaatttctggacgggatttagatcgcaccagcggcaccactggcggctgctccgagttctcgctcatgttgtccagatacccgggactaatggcgcgactctgccgcccactggttgcaccagtggtcgcaccgttccgttgctgccaataatccggcacctggcgatctccaccagccacctgctcgctggctgctaagtcctcctcatcattatcgtaccggctggtgttctgaatccggaagctggaggacactgggcgcttgggactcttcgcaggactgctgcggttgctatcgttgttgccgttgatgttgctgccgtgcttgttaatgttgctgctgctgctgtggatgccgttcccgttcccgttcccgttgtgcagattatcatccaaatggggctgcgtcggtggcggcgaaacgtttccctcgagcggtgcgttcggactaatttgtggcattgtttggccgcccagaacggagtcgttactgccagctgcctctccaccgccatcgacctcatcctcgccggtctgggcctgactcaagctggccatatagtcgtcgttctcttcgttggacattgtcctggtgttggtactgttgcttgtcctgctcctaaagcagtcacgtcagctttctcttaaggaattggctcaacttgcgtgctcggtttgttgtggtcaaacggaatcgctaagggcagcgtcgcgtcgacgcaaaggaaaacttggagctcccaaaaggggggcaacttcttggaggttttcttcgagcacgcagtcgctggttgcccagcaaagaactacgttgctggcctggctaaagtggaaaatgtttgattagaaatttgattaaggatttaatttaagtcattttaaataatatttttggaaccaaaaaaaaacatttttttataaaacatcggttcgaacatcgaacgtcactctcctaatataagaggtctataaaaggttggaagtaaattctgttaaggaatctatcagttataatattcgtgattcaaaattgtttatcatgtaccaactgtggagaaacaatgccaaatcttcacagttctctgatagcctttaacatgtcaatagattgtaattatcgaatatatattcccatgtaatgtcttcattcataatcctcaaacacagcatacatatgtcctggtccttgttccactcaagccttgcacttagaaatatcaactgttaactatatcctcaccctctacgtaatcgatatgccacgaactctcgatgcaatgtgtccaatgctcccattgcccagggctctccagagttccgccctctcagcctgcctgctgctcgactcccccacttcacaggactccaaaggattcaatgggctgtccggcgagcacttgccactgcctttgtcccagcaaacagaccaaagagccccactcaaccattcggcgtgggcactacaaacattcacacttctgcggggtcgagggacagggttctgggttctgggttcagggttcacagttcaggcggctccactcctctcctctcccgctggagaggccgaaaatatcgcgtatta

SEQ ID NO: 31403 - DNA, 891 bp, DROSOPHILA
atgtccaacgaagagaacgacgactatatggccagcttgagtcaggcccagaccggcgaggatgaggtcgatggcggtggagaggcagctggcagtaacgactccgttctgggcggccaaacaatgccacaaattagtccgaacgcaccgctcgagggaaacgtttcgccgccaccgacgcagccccatttggatgataatctgcacaacgggaacgggaacgggaacggcatccacagcagcagcagcaacattaacaagcacggcagcaacatcaacggcaacaacgatagcaaccgcagcagtcctgcgaagagtcccaagcgcccagtgtcctccagcttccggattcagaacaccagccggtacgataatgatgaggaggacttagcagccagcgagcaggtggctggtggagatcgccaggtgccggattattggcagcaacggaacggtgcgaccactggtgcaaccagtgggcggcagagtcgcgccattagtcccgggtatctggacaacatgagcgagaactcggagcagccgccagtggtgccgctggtgcgatctaaatcccgtccagaaatttcaagtgcagcggcatcgcgatataataatctctcctattggaaggcacgccgtgtggtgttctaccggaatggggatccattctttccgggtgtggagctgcgctatcgtcccggacgggatgtaacctcactggacaatcttctcgataagatctcgcccaagatggacttgccacggggtgctcgatatgtgttctccatggacggagatcgaaaatatcatctcgatgaactggaggatggagccttctatgtcgtatcctcgttcaaggccttcaagttagtgtgccggttgtgtgtgtaa

SEQ ID NO: 31404 - protein, 296 aa, DROSOPHILA
MSNEENDDYMASLSQAQTGEDEVDGGGEAAGSNDSVLGGQTMPQISPNAPLEGNVSPPPTQPHLDDNLHNGNGNGNGIHSSSSNINKHGSNINGNNDSNRSSPAKSPKRPVSSSFRIQNTSRYDNDEEDLAASEQVAGGDRQVPDYWQQRNGATTGATSGRQSRAISPGYLDNMSENSEQPPVVPLVRSKSRPEISSAAASRYNNLSYWKARRVVFYRNGDPFFPGVELRYRPGRDVTSLDNLLDKISPKMDLPRGARYVFSMDGDRKYHLDELEDGAFYVVSSFKAFKLVCRLCV

SEQ ID NO: 31405 - DNA, 3527 bp, DROSOPHILA
gctgaaacagtggaccaaggggtaacatgtccagatttcgtccgatggaaagaaataaataattgctattttacagggctccagctcaacttctgggtgtggcggaaaatgctttggagacccatcgacaacgctgcaaggcagccaatgctccgcaatcgccgctcattatgaactgcttaactggttcagagcgttccgaactggtggccattggagtatgtgctattatagcgacccaaaacaagcagccaattttgttaagtaagcgtaaaattttatcactgtaaattaacactaatcgcgtgcccctatttagatacgattgatgtttggtctcgcatttgtgcgcagcgtcaaaattcgcttagggattccgccatcctggagcagtccatgcaaattgtgctctgcaatgctcacaatgtgctaaacaaacgtaagctatataattaaacatttttatatttgaaagtcaagtaaccattgtcgtgcaggtggcataatgacctcatatcaaatgaagatggcgccgcaggtgacagccaaggagcagcaggagaacaaggatccgctcaacgagttggatgcactttggaagctgaagtaaacgactgagccaagcaaccaactaaagatctatgcgtaatcaaaacgagtatttatacaaatatttaactgtgcagacctatttctaaatatccaatattgtttcaaacaagttaaggcaagagaaaagtatttaaagggatatcgaaaacatgttttattctgtatcgtaaacgtctctttcaactgttatataaattgtaattcgaaatcgaaaccgaatcgtgatgtgtatgggatattgtcaagcgtttcaaaccactgtacgagtatattagaaatcaatcgaacatttatatcacttaaaataaaatacattaaaaatcaaatgggtgtagaaagcattcctggtggaaaatatcagtaaaagtagccgaatttacatcgaatcatgaaggtgatcagcattcgctggaagacctgcctgccaggccttataatagtttcttacctggtgtgtgctctgttgtatttcggaatggatataacaaagattgagccagtggaaccaagagtagtgaaaaacaagaccaaagtgccacgaatgtatgccaaaaccatcaatcatgatggcaactgggagactattgtaactaatccggaattaaagcccagatatcgggttggcggcggcaggactggtgtccagttcgtgattggagtacccactgtactgcgaccgaaaaagaactatgtgctccaaaccgtggactgtctgatccgtcgaatgactccggagcagcgcgacaattgtctaattgttatattcgtgggtgaaactaagctgcagttcgccaagttcatagtaagggaactgcgtgtgaatcattcgacgcatatgcaagctggcctaatcgatgtcattgcgccacccttgaattactatcccaacttctcgagactccacatcacgctgaacgatgatccgcagcgagttcagtggaggaccaaacagaatctggactacatatacctgatgtcctatgctaagagcaggggtttgtactacctgcaactggaggacgatgtgatggcgaacgtgggtttcatggactacatccagaagtttgcagtactgcatggcagctttcggattgcccagcagatcgattggattgtgatgagcttcagtgagctgggcttcatagggaagctcttccgcacctccgtgctgagctcattcgtggcgtacctcaagttgttctacaatgaccagcccattgactggctgctccagagcttcgtgaccctgcagagctgtcgctgggatagtgtttccgatcccgaatgtcagcgggacttcgagtccagactgctgcgctcctcgcaatcccagtttcagcatatgggtgcacaatcgtcattggcggataagcagcaatatcaaaaggatgccttctttaaccataactttgcaaggcagcgcttgaggcatctgcgacagccgctcaacctgatcgccactcatcgaaactcgctgttgaagcataatctcgacctggtagagggggaaacgtttatctggatctatatgccacggatgcccaagatgatgaagtatctgataaccaatcagttcaagcagacgcagcttcacatacgcaatgcgaaggacacagcccataatctggccgagttcaatattgaattggtcaagggatcgcccacactggtggcaaacagctcctcgacaaggcagtgtggattcgtcatgagtcacaccgtccaatcgtttgcagaaagggatggaaaagcggagcttccctataattatatgtactactacattaaggaggagcccgaggggctcagctggttccgtcgattccgttgggcctccaatgcatcctctttccacgagctacgatccacaatggtattactccttcttgtttttcagtttgtaaataatttataaaaaacttcaaagatatcaacaccacattagcagcacgttcaatttcaaatatttgagttatttattaagcttatacacacattacacgcatatttgttgttctcgttttcgattcgattaagttttgagttttcccaacggcttatgaatattgtaaaattgttattcgtaatttgtagtaattcagctacgatcgttatgtgctgtcgtttcgcggatggggaagcctataatgccataataatgccagctaatatatattattccaattgatcactatccactattattgttgcttgctaattgttttcaatttggcaaaatgagtgtgtcggggagagcgagtgctgtaaattattgttgctagttggcgcacacgtaacacaggaatatataaaaatatatatttatgttcgtacaattatgcaatagtaagtatatgcaaaacattcgtttcaattgttcagtttatcgaaagcagtctacaatatctgttactctatatatagtggcatacgaattgaaattgtataacttttgaaagtcaaaaaatgcaaaagaatgcattgaacttaggtcgtaaatatttatgccactatacattgcaattctctttaatcaacaggaaccaagtttaaacaatcatcaatcttctttttgtttttagtttttttttttcatagtctatcaaaaaatttggcgtttccaattagttgaaccaattataaaatggatcgtatgtatataaaaaatgttttcttatgaatgatttttgtttttggaatttcgttttacaatagctaattagagatgttttacatttacgtgtatatgtatataatgtaggtatataattatttcattgttatgcacaaattattaacaaatcacagtaaaaaagcaacaatgctaaaaatcgtttcgttatttaatggttcaatgtttatgttcatgcatattttatttatgtatgtagttatggcttcatcttcaagaacgt

SEQ ID NO: 31406 - DNA, 1527 bp, DROSOPHILA
atgaaggtgatcagcattcgctggaagacctgcctgccaggccttataatagtttcttacctggtgtgtgctctgttgtatttcggaatggatataacaaagattgagccagtggaaccaagagtagtgaaaaacaagaccaaagtgccacgaatgtatgccaaaaccatcaatcatgatggcaactgggagactattgtaactaatccggaattaaagcccagatatcgggttggcggcggcaggactggtgtccagttcgtgattggagtacccactgtactgcgaccgaaaaagaactatgtgctccaaaccgtggactgtctgatccgtcgaatgactccggagcagcgcgacaattgtctaattgttatattcgtgggtgaaactaagctgcagttcgccaagttcatagtaagggaactgcgtgtgaatcattcgacgcatatgcaagctggcctaatcgatgtcattgcgccacccttgaattactatcccaacttctcgagactccacatcacgctgaacgatgatccgcagcgagttcagtggaggaccaaacagaatctggactacatatacctgatgtcctatgctaagagcaggggtttgtactacctgcaactggaggacgatgtgatggcgaacgtgggtttcatggactacatccagaagtttgcagtactgcatggcagctttcggattgcccagcagatcgattggattgtgatgagcttcagtgagctgggcttcatagggaagctcttccgcacctccgtgctgagctcattcgtggcgtacctcaagttgttctacaatgaccagcccattgactggctgctccagagcttcgtgaccctgcagagctgtcgctgggatagtgtttccgatcccgaatgtcagcgggacttcgagtccagactgctgcgctcctcgcaatcccagtttcagcatatgggtgcacaatcgtcattggcggataagcagcaatatcaaaaggatgccttctttaaccataactttgcaaggcagcgcttgaggcatctgcgacagccgctcaacctgatcgccactcatcgaaactcgctgttgaagcataatctcgacctggtagagggggaaacgtttatctggatctatatgccacggatgcccaagatgatgaagtatctgataaccaatcagttcaagcagacgcagcttcacatacgcaatgcgaaggacacagcccataatctggccgagttcaatattgaattggtcaagggatcgcccacactggtggcaaacagctcctcgacaaggcagtgtggattcgtcatgagtcacaccgtccaatcgtttgcagaaagggatggaaaagcggagcttccctataattatatgtactactacattaaggaggagcccgaggggctcagctggttccgtcgattccgttgggcctccaatgcatcctctttccacgagctacgatccacaatggtattactccttcttgtttttcagtttgtaaataatttataa

SEQ ID NO: 31407 - protein, 508 aa, DROSOPHILA
MKVISIRWKTCLPGLIIVSYLVCALLYFGMDITKIEPVEPRVVKNKTKVPRMYAKTINHDGNWETIVTNPELKPRYRVGGGRTGVQFVIGVPTVLRPKKNYVLQTVDCLIRRMTPEQRDNCLIVIFVGETKLQFAKFIVRELRVNHSTHMQAGLIDVIAPPLNYYPNFSRLHITLNDDPQRVQWRTKQNLDYIYLMSYAKSRGLYYLQLEDDVMANVGFMDYIQKFAVLHGSFRIAQQIDWIVMSFSELGFIGKLFRTSVLSSFVAYLKLFYNDQPIDWLLQSFVTLQSCRWDSVSDPECQRDFESRLLRSSQSQFQHMGAQSSLADKQQYQKDAFFNHNFARQRLRHLRQPLNLIATHRNSLLKHNLDLVEGETFIWIYMPRMPKMMKYLITNQFKQTQLHIRNAKDTAHNLAEFNIELVKGSPTLVANSSSTRQCGFVMSHTVQSFAERDGKAELPYNYMYYYIKEEPEGLSWFRRFRWASNASSFHELRSTMVLLLLVFQFVNNL

SEQ ID NO: 31408 - DNA, 3143 bp, DROSOPHILA
aaactataaatgacttaatacatattaaaatacccatatacatatattatatatatatattatatatgcacataatatgcttatatttttggtaccctctgttttttaaccgggtatcagttattcgatataaacgatcggcactcggcattgtgtgaacattaacaatgtagagatataaattttcgcacttcgtttagcgcacgcaggcgaacgtaaacaatgggtcgaaagaataagtacatatgaaaaaagataaataggtaaataaacaggaacggcgaaaagttcgcacccacgcacatgcacacccatatttactcacacttgtttgcagatcaagtgggcgaatagatgaattaactaattaatcagcacttaaataggaacaaattgaacacagtggattttatttatccatctgggtattttgcaagcagctacttgtagccaattcgcagttttctccctttttcgatgctcttccaattttcgccattcgttgtcgttcgcacgcgtttctcgttgtcttcacatatttacgattgctcgccgagtgcgttatgtaaatgcaagtgatgtaaattattgcagcacttaatggctttgctattgtttaattttatatacaatacagcggggaattagtttcaacgcccccgaccaaaaacaacaacagaacaggctgtgctgccaagcaatcgttatcggcattgctgtgttgccagacagtcgctgacaaatgaggtggccacaccattctgttatgtttaacagtatggctgctggcttattggcatcggttaacatatgtatgttaagggaacaacaggtacctaaacttctcccatctctagccgcattttaataacaaaagatttttgcaaaaatgtatttaactctgctaaacggtactggcttcgttttcaacgtggatggttagtggcttaaagctcaataaaatatgcatttaataaaattcgcttactacccagattacatggaactgcggagcaaacatcgcataatgggtgctccagtgggcacagcgaacacaaaaggctggagtcctaatcaatccagtaagatatccatttctatagggtttctcccagctttggatttgtaaacaatgctaaaatacatttttactatttcttactttttagctctgcccgtggagctcagtaaatttgaaacccaattgcttttggatgagaatatagcaaagttagttgataaatccaaagatctaaaggctaaacccactgccgagaaacttgaggagtgcaaggcggattttgaatcccggttactgggacaggaggaagcattgaaaacggagaaactacgggaaactgaacgatacatggataagattctgacgggaaaacgcaagaagttgctcaagcagggcaaaaatgaattgggtaaaagaatattactagaaaataaatatcatatatgtatgtctaatatttggtataaataatatgtctagtaggctgtgggatttcatctacataaatgcaaaattacgtttctcctggcctaaacttcaaattttaaactgagctgtcagcgtacttaaatctaattttataaaatgtgcatgaaaaaagaattatcagataacttcacttttagctgccgctctgactgataaggatgtactattggagatgtctgtgaatttcaaattcgatcgccaaaatgccttgctggaggtgcattgtgaacatcccacggatcactgtagatacattaaaaccaatatctctcgataagtaatcttaattcaattctacaaccaacagctgcgcaaatagttaccggtcccattgtgcacaccaattccctgaaataccgcgttttcaaagatctgtggaggcgcggaaagtacgtgacttccggcgatgcatttggagcggactttctggtttaccccggcgatcccatgatctaccacgcctcccacattgtaattttgcacgagcaacctgtaattaagcccctggaactgatagcaaaagttcgtctatcggtaattgtcaacaaaagctgcgttttcgcctacgagatggaaaataatgaggaagaaatacattaccaaacggtcgcatggtgcaatcttggaaaatgaggaaatcacaggcaagtacatggagcaaaaaacatgaaatgtgaccataaaattctgacaaaaatagtctattatgttatccatttaattattattctaaagttgggttctaacgttagaaagtctaatgggtagagattaacactttagtcaccaacttttatttgttctgaacatctgtgacgcattgatacgattttgggctcaagggaggacatctaatttcgaccagtgtatttttttttttggctccaaagaatcttatttttttaagactgagcgggagagagtgggctttccgtgagcacgggttttgtttttggcgccgaattgggtttattttttagtggaaattgaatacaatgccggagaaactacgctcccgctccgtcccatttccccaccgctcctcccctctctggcggcctctccacgtttcgccgtcccgctctgagcggcaggagcagcgccagaaacggtttctcccactcacagttggaaattgtacacagtgcacatggtaaatcggtttattatgaccacgacatccaactcgagatgtttgctcgccactccgttcagggtccattgttgtggtttttaggcgggagtcattcgtcgcttcccattaaattttgttaaatgaattagttatacaaaatgaggttataattcgatggcccccatcaaacgccagagcacacatacatacatatgtatgtacatacatctataggcaagcggcgataggcaaataagtcgcatacatttgcgtatttgttttcaacaaatttgtgctgaattcttcatgttttgcgttcgtttcaagtatattcagttttttttaatagaaacaacgtgataaggcgcggtggggaaggccaggcaaaagtcgtgccgcgccgttcgaatttcaaacagtcgagctggcgcacggtgggacaaaagcgttgtttaaaagttttaatgttttaaagtttcatacattttaataaaatac

SEQ ID NO: 31409 - DNA, 777 bp, DROSOPHILA
atggaactgcggagcaaacatcgcataatgggtgctccagtgggcacagcgaacacaaaaggctggagtcctaatcaatccactctgcccgtggagctcagtaaatttgaaacccaattgcttttggatgagaatatagcaaagttagttgataaatccaaagatctaaaggctaaacccactgccgagaaacttgaggagtgcaaggcggattttgaatcccggttactgggacaggaggaagcattgaaaacggagaaactacgggaaactgaacgatacatggataagattctgacgggaaaacgcaagaagttgctcaagcagggcaaaaatgaattggctgccgctctgactgataaggatgtactattggagatgtctgtgaatttcaaattcgatcgccaaaatgccttgctggaggtgcattgtgaacatcccacggatcactctgcgcaaatagttaccggtcccattgtgcacaccaattccctgaaataccgcgttttcaaagatctgtggaggcgcggaaagtacgtgacttccggcgatgcatttggagcggactttctggtttaccccggcgatcccatgatctaccacgcctcccacattgtaattttgcacgagcaacctgtaattaagcccctggaactgatagcaaaagttcgtctatcggtaattgtcaacaaaagctgcgttttcgcctacgagatggaaaataatgaggaagaaatacattaccaaacggtcgcatggtgcaatcttggaaaatga

SEQ ID NO: 31410 - protein, 258 aa, DROSOPHILA
MELRSKHRIMGAPVGTANTKGWSPNQSTLPVELSKFETQLLLDENIAKLVDKSKDLKAKPTAEKLEECKADFESRLLGQEEALKTEKLRETERYMDKILTGKRKKLLKQGKNELAAALTDKDVLLEMSVNFKFDRQNALLEVHCEHPTDHSAQIVTGPIVHTNSLKYRVFKDLWRRGKYVTSGDAFGADFLVYPGDPMIYHASHIVILHEQPVIKPLELIAKVRLSVIVNKSCVFAYEMENNEEEIHYQTVAWCNLGK

SEQ ID NO: 31411 - DNA, 2801 bp, DROSOPHILA
taatccaacagatgcaatgtgctcgacggactgtttgatttttcatttgtgcatttgtcaagtgcgaaaacgagaaattgcaagtggcaaccgacgggcagcggatggccaaacaaacaaacgttggggaaaatcggacggggaacagggaaaaccccaacagaagtttcatcaattttacacaattcacttaacttgaaaagccagggggcagtcactcacagaaaccaaaaagggaagaccttcatgcacaacaattctccatcttttccaatacatttgaacttaagttgggggcaatgaaattctgttgaaactgcaattaattaccggtcgatgaaagtttgacggaacatttaggggacacgaaaatcggataaaaaacacgatagctacagaataattttttacaatcaaattccatttttaagcattataaaagccacttcgctgctagtaagcatgtagactgacagaatggtaatacattccagatgatttcttttgctgggactcagaaacagtttcaccattgcagttactatataagagataataaagtgagtttgatcatatatgcatatgtatatatgtatatttataatcgctgcccaaggtggcaagtatagcattataaatcaaattgaaaactctagacctaaaagtcaaaaaccacttggcttggaaaatacaattgtaagcttcgagtgccgtatactaactattctttgttttattttattttaattttaaatttaataataataataataatataatttaatttatttgaacataatagagtttagaacacacttaacggaaataatcgtatttaaataccgtatgatcaataattagtttacaaaaaaaaaaatactattgacattgtggccggcgtttaaacttcaaatctctgaacacaagctattcggaactttcttgaatcagtcattttattttttgttgacccacctggccttttttatcgattattaagatgtcatcatccgaaaccgaatggtttgcagaggtagagttggacagtgaggagtctgaggaagaacgcactctatcgttcgcttcgggtgacctaaatgccaatgaaattctgggaagtacatcggattcagatacggatacggattcgttatcgctatcgttatcaaccaccacggtggatggcagtcaatcatcaggatccgaagtatccaaccatgatctcgataccggacttttcggcttgcgacctgtgcaaggtaccaccaacttgataccccatgccaccattacgtccacaccatcagcatcacaatcacctccattacccatatggcaagtaataaggagacgattgagctccgatccggaagtgatcaaccgtccttacggccgattccagccagagaacttcactcttatcgaacctatgggtcccctctcccctagcgagagacaggaaatgactcgactgatcacggaattcatggaggatctagaaaattctcgcccctcgcccgaagaagttcaaagacgccgtaatcgcatgcgggcagatggcatagctcgagctcatgcccgacttcatgctcgaaggatgagagccgcatccttacaccgagctgctttgagtaatgctgagcaatcgaatttggctcaaatcgctcaagatctgccgcgggcaaatagtgttagcgattgcagccagtgcagcagtgatgaggaacaggatcaaatcgatggcaagaatagaaagcctactgttccaagtcatctctccgaatggttgtatcccatttaagctgtaaaatgtgttatattaaattaagagtcattgttctgtcggactcacagaaagcatagtttattttcgtttaaagtataactatctggggatgaaaatattgggcaatgaatacaatttttactctttttctcagaatgatgaaaaagaattaagcaaatatatctaaagttatttaagtaaaaggctaagctcttgacttcgttcacttaagagctgtaatattcagcttgggaacttcataagatgttaagtcttctaaaattgataacaactggaagcaatttgctttcgagttgccgccactggacctgctacttgttgaaagtctttaaggtcttttcatctagcttttcctccattgtttttccctagatttccaagcagccactgccacttcatacggcaaagtgtttatatgcagctgcgggggtgggaagatgaaaataataatgaatttgcggcatgccacacaaacacttgctgcggccgcaacatgcgccagatttcagctcaggatatcagcagtagctacacatgcatcagctccggccacagtccaatctcacacagagagaaaatataggagacaactttccaaattgaaaactttattattataaataataattagtaatagatgcggttacccaaaggggattttaaaagaccatattcaagcccttctttgacagcctagaatttgtatgtttacgattacgattagtaaccattgtttgcttacagtgcatactcaatggtatcaacactacccaaccatcctagttctttctttaacccactgtgcggcatgtgtggcagctaatatgttggcttggcagtgtcgcctcttggagccgttgaaaaatgcactgacatgtgccacagctgctgctaacccccaaagtccctcgcctcgccgccttcggcctgcagacccccccccacccccttctgccattttcatcactccctctgtgaaacaaatgcacagggc

SEQ ID NO: 31412 - DNA, 801 bp, DROSOPHILA
atgtcatcatccgaaaccgaatggtttgcagaggtagagttggacagtgaggagtctgaggaagaacgcactctatcgttcgcttcgggtgacctaaatgccaatgaaattctgggaagtacatcggattcagatacggatacggattcgttatcgctatcgttatcaaccaccacggtggatggcagtcaatcatcaggatccgaagtatccaaccatgatctcgataccggacttttcggcttgcgacctgtgcaaggtaccaccaacttgataccccatgccaccattacgtccacaccatcagcatcacaatcacctccattacccatatggcaagtaataaggagacgattgagctccgatccggaagtgatcaaccgtccttacggccgattccagccagagaacttcactcttatcgaacctatgggtcccctctcccctagcgagagacaggaaatgactcgactgatcacggaattcatggaggatctagaaaattctcgcccctcgcccgaagaagttcaaagacgccgtaatcgcatgcgggcagatggcatagctcgagctcatgcccgacttcatgctcgaaggatgagagccgcatccttacaccgagctgctttgagtaatgctgagcaatcgaatttggctcaaatcgctcaagatctgccgcgggcaaatagtgttagcgattgcagccagtgcagcagtgatgaggaacaggatcaaatcgatggcaagaatagaaagcctactgttccaagtcatctctccgaatggttgtatcccatttaa

SEQ ID NO: 31413 - protein, 266 aa, DROSOPHILA
MSSSETEWFAEVELDSEESEEERTLSFASGDLNANEILGSTSDSDTDTDSLSLSLSTTTVDGSQSSGSEVSNHDLDTGLFGLRPVQGTTNLIPHATITSTPSASQSPPLPIWQVIRRRLSSDPEVINRPYGRFQPENFTLIEPMGPLSPSERQEMTRLITEFMEDLENSRPSPEEVQRRRNRMRADGIARAHARLHARRMRAASLHRAALSNAEQSNLAQIAQDLPRANSVSDCSQCSSDEEQDQIDGKNRKPTVPSHLSEWLYPI

SEQ ID NO: 31414 - DNA, 4742 bp, DROSOPHILA
tgctgaaaacagcagacagtcgccagtgttggccaacttcgcaaggcactcgccgagtatcgcatgtggaaatgaatggtgggatcaatcatattttccagtatttaagaagtgacacatgcaacacatttaatgacgggcaataataatttaatttcgtttattttaatgccatgttaattgctcaataaaatcggcacaaaacattgcacgaatatcgacaaccgtcgctttgcaacaccgcatgcgaacttgacaacactggcgcatgtactacacgatgattttgccatcatatgaaaatatatgcgcacaatacatgcatatgaccgcattgcacttttatctgattagtcagttatttatacggctcgttaatcgttttgcatgctcagcaagcaaaatttactgcgctgaaccctttccagcgcgtttatggcaagtcagccagccagctgtacacttgctggccaatttgtgcgtacatttcgggcttttgcactctttttgcgttacctttgcactaaatcctattgtttgtacactacggactaattctattttacatggttaagcacaaaactatgagagaaaatgcacatcacgtcgaaaaatgttaaaaataagttatgtatgtatgagggaaaattcgcgaaatgcaccagtgctgagcagcggcgcgaaatagtgctgaacatgtcgcgcagaaatcagggacaatcgatagtactgcgccaggaattaatcgaattcgaataatgtttacaaagaaatgttaattactaaattattaaataaaactttgcttaattcaatttttcacgttataggagatatattcacttaataggtaagacgtaatcaacagtacgctttaaattatatgaaagtcagcagattacaaaatacgtactcatagttttaatattctgtaaagttgtttattcgaaacatgttaattgatttaaatacgttgttaacaggctgttaccatgttgtctcaatgctctcgtttgtggggcggcacgtagacttgctgctgctgcgtctgacgatctccgcggtagcgtgaatgttgctgctgctgtagatgcggttgctgttgctgcagatgcggttgctgctgctgcgctgagttgctcagtggcctgttttgggcatcggtgatgggcaggatgtcgaccttcaatacctcctcatggtttccatagcccataaagaagaccacgcaagttttctccgacacgcccgtgatctcagcctcataatactggaaaataaagaaggaatgataagttaagttcaatagatcaatttgaatactttgtcctactacaattacgaatgtactttcagtttatcgacctaaactcacccttccatcgtcccaatacttggccatgcacaagtcgcccttctgccacatccacgcatcgcctggcaccatgccgaactgatcccgtggcgcagcctgtggcacagccactggagcaggttgcgcacgggaaacaggagcggaaacggggccaaaggacatgggtggcgattcctgctgttcctcctcctgttgtttttcgttgggcagtgtaacaccctggctctttagaaggttcatggcaaactcgttggcctccttgctctggaaacccatgatcttgctgggatcgtaagtgtagccattcgccaattgactgtagttcgcctgcgaattgtgcctgggattgtgatgcttttggttggtttgagccttctctggcttctgcgaatgcaactgtgctggctgctgctgctgcgttgtttctgtgcccgatcccgccaggcgattggcttgtcctccttgcttacgtcgattctctcgctttggcgcactgctcaccttgagattagctgtttcctcggttatcttactcaaacgggcgttgaaatcatcgccagcactatttgtcgatttcgctgcagaactcgccgaagttaagcttgctgccggcttgtttcgtctgttgccattggcgttgccgttctctgctcgattggagcctccacgattgctgcctcgttcgctgccacgtcggttgccagtgtggtccttcccattggttgtttcatgatctggcttaatctcggaattcggtttcaacgatacgttatccgagccattgcgatttgcggtttttacggttggcgtttctggtttgtaacgtccagctgcacgatcattgaacgctcctcgctctcgcggtggtctctcctctttcggcggtttttcttccctcggaggcctgtcttccctgtaggctcgctcctctcttggtggcctttcgtccctgccgccaccccggttacggccaccgcctcgcgacgaacccacatgtccaccacgatgtgcggcaaagctgctcgatacgttgttctcaaacctagaacgatctgcaaacttgccgcctccgcccatagctgaaggtttgctctcggaatcgctgaagcgcgagcttccatattgcttaaatggattgaagtgattggtagtgggtggggcagtcggagcggcagttggagcggcagcgaaggtttctgcattactagcggccggtgtttccttggcgggcagtttattggttaggaaatcaaacagcgtggtgttggcagccggcttgggtgcttcaacttcgtccttggcgctagctccacgctttccctctctgggcggacgatctccgcgtcccggacgacccacggattcgatcggacccacaccgccagcttcactgcgtctttttagattgtatagggcgcgctccaagttgtttcgggtagcagataaggcactgcgggcctcctcctcgctgaagcccttgtctaggatcttcttaacattgtgatcgataatgttctggccaccgccgccaaagatcttcttgccgccggccttggtggccacggcaatggcctctgtgcgcatggcattgaactcttcgttctcctttgccggcttgtccttgtcgccctcgcccaggctcttaaagttcatttcgctttcggcgttgctatcgatttttcggccaaatgccacccacgggggtggcgctgatgtcccattcaaggggcgcccactgcgcgcatatctcatcatggtcctggccagatcccatttctcgtagagtgcatccacacggccgccgagcagctgaatttcactggactttagcagcaggaatccctgcataagctgcagtttctcggccttgaaatagatcttgcttccgggagccacattgagattcagttggggaactggctccagctccaaggcctttatggaattctgcccatcactcagatccaactgaaggaggcgtggcgccgccttcgattcctcattcgccttgggagcggcaatatttcgcacacgctgaacctgcagcacaattttaccgggcaaagtggcatcttcgcgtttcgcgggcagtgcgccaccgccaatatcgcgcagatctcgctgcaaagtgtgagtaataggttataattaataattacacagaatgctgagcagccggttcgcctacaactcacattcagtgcatcattgactattttccggacatcctcgctgccgacggctgttgtcacgattttaaggccctcctctgtcaggtacctgcgtaaatcgttaagaagcattgtatgccacaatttaaaattgtacttaccacccgacttctcgtagtttcttgcctaattccattttttcatgaagacgatttttttgcaactccggactagggatgacaaaagtattagatgtgtgtactcgctagtgatgtgcttggcggcaactatcggctgacggtgcatactattatcgtttaagtttaggttgtttagtaatattaaatgctttcttaaaatctaaaaattttaatatttcttgcacacttattcaaattaaatataatatatatattatgtcccaagagataatgtcaaaattgggtgcaacacatatactagcatatatatttttgatagatgtacttatatatcgataattaaattttatcagttataaagaattggcattataaatcgatttaaagtcgtaatatctacatgtttagaacaaacaaaagagtaccctatacgcacagccactctaatgacagttctagtttaggtggtaaagcgaataaaatgcggtcacaccgcgccgcaatgaatgtataaaagggggctgccatccgcagagcgagtaaataacggttcgcgagcaacaacttttcatttcgagagcggagtaatttttccagccgaccgacaaacagtgattgaaaacccaaacgagatttatttcgaaacgcgacaagaaattgttacatcaaaggagctgcaacgactaaaatccgcgaagaaagtgcgagaaaataccttaaagagagaaaaaaccagtgacgcagtagcaacaacaacaaacagtcatcgaacgatttatagaatctaacgccgagtccaaagcatgaatctatcattcgctggctgcggattcctgggcatctaccacgtcggagtggccgtctgcttcaagaagtatgcaccgcatctgttgctggagaagatcggaggcgcttcggccggttccctggccgcctgctgtctcctctgcgatttgccattgggtaagtctcttcccacttgcttacatgggtgggtctagagagggaagctttcggaatcattaagatctgcca

SEQ ID NO: 31415 - DNA, 2511 bp, DROSOPHILA
atggaattaggcaagaaactacgagaagtcgggtggtacctgacagaggagggccttaaaatcgtgacaacagccgtcggcagcgaggatgtccggaaaatagtcaatgatgcactgaatcgagatctgcgcgatattggcggtggcgcactgcccgcgaaacgcgaagatgccactttgcccggtaaaattgtgctgcaggttcagcgtgtgcgaaatattgccgctcccaaggcgaatgaggaatcgaaggcggcgccacgcctccttcagttggatctgagtgatgggcagaattccataaaggccttggagctggagccagttccccaactgaatctcaatgtggctcccggaagcaagatctatttcaaggccgagaaactgcagcttatgcagggattcctgctgctaaagtccagtgaaattcagctgctcggcggccgtgtggatgcactctacgagaaatgggatctggccaggaccatgatgagatatgcgcgcagtgggcgccccttgaatgggacatcagcgccacccccgtgggtggcatttggccgaaaaatcgatagcaacgccgaaagcgaaatgaactttaagagcctgggcgagggcgacaaggacaagccggcaaaggagaacgaagagttcaatgccatgcgcacagaggccattgccgtggccaccaaggccggcggcaagaagatctttggcggcggtggccagaacattatcgatcacaatgttaagaagatcctagacaagggcttcagcgaggaggaggcccgcagtgccttatctgctacccgaaacaacttggagcgcgccctatacaatctaaaaagacgcagtgaagctggcggtgtgggtccgatcgaatccgtgggtcgtccgggacgcggagatcgtccgcccagagagggaaagcgtggagctagcgccaaggacgaagttgaagcacccaagccggctgccaacaccacgctgtttgatttcctaaccaataaactgcccgccaaggaaacaccggccgctagtaatgcagaaaccttcgctgccgctccaactgccgctccgactgccccacccactaccaatcacttcaatccatttaagcaatatggaagctcgcgcttcagcgattccgagagcaaaccttcagctatgggcggaggcggcaagtttgcagatcgttctaggtttgagaacaacgtatcgagcagctttgccgcacatcgtggtggacatgtgggttcgtcgcgaggcggtggccgtaaccggggtggcggcagggacgaaaggccaccaagagaggagcgagcctacagggaagacaggcctccgagggaagaaaaaccgccgaaagaggagagaccaccgcgagagcgaggagcgttcaatgatcgtgcagctggacgttacaaaccagaaacgccaaccgtaaaaaccgcaaatcgcaatggctcggataacgtatcgttgaaaccgaattccgagattaagccagatcatgaaacaaccaatgggaaggaccacactggcaaccgacgtggcagcgaacgaggcagcaatcgtggaggctccaatcgagcagagaacggcaacgccaatggcaacagacgaaacaagccggcagcaagcttaacttcggcgagttctgcagcgaaatcgacaaatagtgctggcgatgatttcaacgcccgtttgagtaagataaccgaggaaacagctaatctcaaggtgagcagtgcgccaaagcgagagaatcgacgtaagcaaggaggacaagccaatcgcctggcgggatcgggcacagaaacaacgcagcagcagcagccagcacagttgcattcgcagaagccagagaaggctcaaaccaaccaaaagcatcacaatcccaggcacaattcgcaggcgaactacagtcaattggcgaatggctacacttacgatcccagcaagatcatgggtttccagagcaaggaggccaacgagtttgccatgaaccttctaaagagccagggtgttacactgcccaacgaaaaacaacaggaggaggaacagcaggaatcgccacccatgtcctttggccccgtttccgctcctgtttcccgtgcgcaacctgctccagtggctgtgccacaggctgcgccacgggatcagttcggcatggtgccaggcgatgcgtggatgtggcagaagggcgacttgtgcatggccaagtattgggacgatggaaggtattatgaggctgagatcacgggcgtgtcggagaaaacttgcgtggtcttctttatgggctatggaaaccatgaggaggtattgaaggtcgacatcctgcccatcaccgatgcccaaaacaggccactgagcaactcagcgcagcagcagcaaccgcatctgcagcaacagcaaccgcatctacagcagcagcaacattcacgctaccgcggagatcgtcagacgcagcagcagcaagtctacgtgccgccccacaaacgagagcattga

SEQ ID NO: 31416 - protein, 836 aa, DROSOPHILA
MELGKKLREVGWYLTEEGLKIVTTAVGSEDVRKIVNDALNRDLRDIGGGALPAKREDATLPGKIVLQVQRVRNIAAPKANEESKAAPRLLQLDLSDGQNSIKALELEPVPQLNLNVAPGSKIYFKAEKLQLMQGFLLLKSSEIQLLGGRVDALYEKWDLARTMMRYARSGRPLNGTSAPPPWVAFGRKIDSNAESEMNFKSLGEGDKDKPAKENEEFNAMRTEAIAVATKAGGKKIFGGGGQNIIDHNVKKILDKGFSEEEARSALSATRNNLERALYNLKRRSEAGGVGPIESVGRPGRGDRPPREGKRGASAKDEVEAPKPAANTTLFDFLTNKLPAKETPAASNAETFAAAPTAAPTAPPTTNHFNPFKQYGSSRFSDSESKPSAMGGGGKFADRSRFENNVSSSFAAHRGGHVGSSRGGGRNRGGGRDERPPREERAYREDRPPREEKPPKEERPPRERGAFNDRAAGRYKPETPTVKTANRNGSDNVSLKPNSEIKPDHETTNGKDHTGNRRGSERGSNRGGSNRAENGNANGNRRNKPAASLTSASSAAKSTNSAGDDFNARLSKITEETANLKVSSAPKRENRRKQGGQANRLAGSGTETTQQQQPAQLHSQKPEKAQTNQKHHNPRHNSQANYSQLANGYTYDPSKIMGFQSKEANEFAMNLLKSQGVTLPNEKQQEEEQQESPPMSFGPVSAPVSRAQPAPVAVPQAAPRDQFGMVPGDAWMWQKGDLCMAKYWDDGRYYEAEITGVSEKTCVVFFMGYGNHEEVLKVDILPITDAQNRPLSNSAQQQQPHLQQQQPHLQQQQHSRYRGDRQTQQQQVYVPPHKREH

SEQ ID NO: 31417 - DNA, 2274 bp, DROSOPHILA
atatgaattaggcttgcatgtttctaaaggaaaatgctccccaattaattttctaatttctaaacaataatttctaaattgcatttcacaagcttattctctgtcctcttgataaaatctaatttgaaaagtatttttagacacgtgttcggtgacaatttataagttttaataaatgtcgtagtctattgtcatgaattatgattttatcagggaattgacttcaatctaatcgttgattgtcaaaagatgttatgatttcataattcaccccctatcaggtaattaaacttttggccagcatcactgctaaaatatagaccactctgttcacaccacacatcgggcactgagccgtgcgggccgggcttaattaatctaattgaaataatggcagcgacaggcgagagtcgcacatatggccggcttacgggcactaacaatggcttaggacaatgccggctccctataaagtagatcccagattgcactggcatgaggactctgagcaacaaaaggctctttgtattcagcgaggcgggtgcgggacttgaagtgtgacttgaactgttttagatagccagggtggaatctacttaattgggaatctcgttaacggcgccacttaaagtggcagcggttaaggtcaacgccacgcactctgctcacagatttaattaaaaaatctatttggttgtgaaaaatttcattggcgaagagaaaatagatcaaatgactaaaacctaatataattggcttttacgaaatgttaaataggaaatggtatattattttaaagtacttttcaatttgaaaaggaaattgaggcttaaaattgaaagcctaatataaaagtactgaaatgctgttattataggaagagtataggaaagacatttgtttatcacaacccattgtcaaaactttttcacacactttaatttcgatcaatactgcatgatgataaccagactaaaagacccccaaggatgtaaatgttttagcgttccaatttcggcacggtagctgaactagcacctccctctttcgacttgtgctccttggagtcctccaccttgcccacaaacttctccaccgtgctgacgaccctttcgacattgccgcccacgaactggattagtgtcactcggtttttgatgatcagaaatgtgggcatgctgttgacttcgtactgaacggccagatcttcgttctcatcaacgtcaatcttaaggaccaacatccgtccgaagtaatccgatgccagttgctccaagcggggaccaatcatcgcgcaaggaccacaccaggtggcgaagaactcgacaagtacgtatttgttggttcccgcatcatcgatgagcttatcaaagtaactcttcgaatccacaatgatgaccttcttctgcatggcagccatcggaaaccgtcgttttcgaaacttgtttcaaaatgttacccacaattttacacacataaaatttagagtttttgggcgctgtaggttgagtgacaattggttcttagctagttgccctttattttctgctaatggatgtgcttttgttttcagtcggtgggcgttttccggcttgcacgtgtttatgttgttgttgaggcttttcttcttagtcctagttgcactttttagtggcttgaaggtctaactactaactttttttttttttttttttttttaaatttttattatttattgaatcttccctttgtgttaagagactaacaataagtgttcaaatcttaatctaacttaattaactttcacttagtgatagtttttttttttcattaatgccctaataagtttattgctgggctgggaggtcgttgcggtgcagccggctttgactgcatactcggattagttttcttgcgaggggatttgtatgggtggtcagcttttcgttatacttcgtttttttctcagctattacttcgattactaatttgatttttaggtctctgtgtatgttttcgttccgaaggtaccacggcgctccagtgataattctcagaatccttgactgtgctcgctgaataatgtctatgttacttctggatgcgttgccccacagctcggagccataagtccagataggttttaagacggagttgtatgcgttgaacaacaggcagatgtgaagaatagcacactttgggagttcaatgagcattcttggagttattaggtcgtagccaggcgattttcttgggttcagttgctctttgataacctttgctagttcacatggg

SEQ ID NO: 31418 - DNA, 420 bp, DROSOPHILA
atggctgccatgcagaagaaggtcatcattgtggattcgaagagttactttgataagctcatcgatgatgcgggaaccaacaaatacgtacttgtcgagttcttcgccacctggtgtggtccttgcgcgatgattggtccccgcttggagcaactggcatcggattacttcggacggatgttggtccttaagattgacgttgatgagaacgaagatctggccgttcagtacgaagtcaacagcatgcccacatttctgatcatcaaaaaccgagtgacactaatccagttcgtgggcggcaatgtcgaaagggtcgtcagcacggtggagaagtttgtgggcaaggtggaggactccaaggagcacaagtcgaaagagggaggtgctagttcagctaccgtgccgaaattggaacgctaa

SEQ ID NO: 31419 - protein, 139 aa, DROSOPHILA
MAAMQKKVIIVDSKSYFDKLIDDAGTNKYVLVEFFATWCGPCAMIGPRLEQLASDYFGRMLVLKIDVDENEDLAVQYEVNSMPTFLIIKNRVTLIQFVGGNVERVVSTVEKFVGKVEDSKEHKSKEGGASSATVPKLER

SEQ ID NO: 31420 - DNA, 2447 bp, DROSOPHILA
gatcgcccacagactccaaaaattctaagtctttgattattaaaacttgttcatctaacgaaaagctacagaacagtattgcggagctggaaaaggaaataggaatcttgcgtaaagaactaaataaattcccgaaatgctgtaaaaaaatcgacgaccttatcgtgcatatgggaaaactagaaaatatgattaataaaatgaaccaaacttacaatgatcatctaaaagccaactcaaatcaacttaattctataaaagagggcatagataagtccttaagaaatttgggccataaccatgatgacgatgataataaaaaacttcaggagcaggcaagaaaacttaaaaaagatcttataaaagctagtttgaccttgagcattctaaaagaacgacaagatgacttattgaaagataataataaaattcaaacttcactatactctcctgatgagatggatggtttaaaaaaggagctatatgagcttagacaggacattgagggaaagttaaaggacttagctttaaagaagcaaagcaaaatggacgctgttaaacatctcgatacattcaataaagaagtaattcagaatctagataaagctaaaacaagtacccttgaacacaaggaactagatatgcggatcaaggatcagacagagaatcaaatcaagcaaacaaatgaaatgcttcattgttcaaaaaagtgtttgaaaattaacatgatgaacgatcttatggaccaagtggaagacatggaacgaattgtaaagataaacaaatagtgttctacatctatttctgatctatgatgtataagacgatattgttgaataaagcaattcaaatagccaattttttttattttttttttaaaataatgttttaaaaattatgttgaataaatttaattaataaaaacttactacaaaaatgattttaagatatcgggctttctgattcttttgtcagagctgtactgagttaaatataaatcatgctactacaagcggaatttacaaaaatcgacgatgcccttgacatctgtagctccatggaggaggatctgaacgagtgtctgaatatcgtaggggccatgatcgagaagtacaatgctcccggacgctacatcatatccatggatccattcgctgaggattttcaactgagcaatagcgagtccacggacttggatgggtcgtctataggaagttgtgactccgagctggacatgctaagccaactctacggagccagaagtgcccaggagttggatgaatcttacgtcgatgtgcgctataagtttatcaagctgaagcggttcttcgagggtacctttacccattttctaaggatcgttgactgtgctgatcgtcaaaataagatttcacatcgcatttttatgaactcgcaggataccaaggggaagcggtgcaggcactaggaatgcaaatttcctccaactattccatcaaacttgcgcgcgtgtgtaaactgcaaattgtgtcgacacttggcaggttttattaaaaattactgtcaccattagtcgagttgcccgatgactttcagcgaaaaaaagtggtgcagggatgaactttccaaaactcatttggcctgacatgaaaatgaggcaaagttttttatcagagcctcagtttttcttgcgacacaagttgcgcctgacgttaagcacgacgacgatgatgacgtcgatgttggtgggacagtaacaagtcagctgcatgtttatgagcacgacaatgggtaaatacaaatacggacatgcgagagaatatgttgggggaaaacatgagaaattgccagcgcaaaacttgagataatgtaatgcaaaagtggcccaggaccagaggaaacttttccataacgctttgccaacttggctctgtgtttgtacttggtaatatatttgtgagcattattttatttcgtatacctgttactcgtgaacgggtatattagactcgccatgtagtaaataatatgcaatattcgttagtccgctcgccaatacattcatataaactttgagttaacatgctaattcttttaacgaccataaagtttatatttttgctgcatgtgcatcaacatcttgcttgcacattctttagaggggtatgcgatagtctaggctctagactacaacgttctcgcttgttttttgtttttattttctcggactttctcgaaaggggaatggcatccccacacttcgttagtgaaacaagtagctgggacaaggaccaggaccaggacccctggccggcaaactggacagctgcaaggacataaaacagtgaagttttgcatatttaaagtaatatcaagggggaaaacaaacttttctttttcattttcattattattataattttgttctttttcttggtttattaccccaagggtcatgaagtgtgtgc

SEQ ID NO: 31421 - DNA, 447 bp, DROSOPHILA
atgctactacaagcggaatttacaaaaatcgacgatgcccttgacatctgtagctccatggaggaggatctgaacgagtgtctgaatatcgtaggggccatgatcgagaagtacaatgctcccggacgctacatcatatccatggatccattcgctgaggattttcaactgagcaatagcgagtccacggacttggatgggtcgtctataggaagttgtgactccgagctggacatgctaagccaactctacggagccagaagtgcccaggagttggatgaatcttacgtcgatgtgcgctataagtttatcaagctgaagcggttcttcgagggtacctttacccattttctaaggatcgttgactgtgctgatcgtcaaaataagatttcacatcgcatttttatgaactcgcaggataccaaggggaagcggtgcaggcactag

SEQ ID NO: 31422 - protein, 148 aa, DROSOPHILA
MLLQAEFTKIDDALDICSSMEEDLNECLNIVGAMIEKYNAPGRYIISMDPFAEDFQLSNSESTDLDGSSIGSCDSELDMLSQLYGARSAQELDESYVDVRYKFIKLKRFFEGTFTHFLRIVDCADRQNKISHRIFMNSQDTKGKRCRH

SEQ ID NO: 31423 - DNA, 5702 bp, DROSOPHILA
aatataattcgttggccgtcggtgggttaacaatcctccggcccaccgacgggcacataataatattaaaatgttaattagcgtattaattcagttcggtgatgaaagtgtgagcggtacaaaacgtgatacatacatatatatgttggtatgctgtgctgggactcacatttctgaaaataatttataagataatctagaaaaaggtgtctttggtatatggttaaaaaaaatccttaaaatatagagtaattaaaaaataaaactatataggcatattctttacagttcgcgaattaataacatttcacatatttatgttatattacttaagtacagaattttgtattaaattaattacaaacaaacatttaaaaaaagtgttgaaatacttctactttaacctatagtttctcgtttacatttatagctctcatttatcgccagcgcaatttttaattatttaaatgaataagtccaacgaaaaaagctgccagcttcgtctcaatatttatagctttttaaacaaataaacggaattcgcagtcgacaaaaaggccacccacaatccagcgacccagggaaaaagccatgaaaatgcactcagcctcaaggaaacagttggccagaaaaggacagatggtggtgcaagcgagacaaagcacaccaagagtgccaggataagttcccgtttcagtcccaggctccaatccgaatccgaaatagttgattttaatgatgtacataataaaattcccattcgttttgtgccaatgccactgcgttccagtctgcatttcatgtttacactgattgtggaacactcttgtgggcgagaaagagacacatcgatatgggggagcaagacaaccatatacgactctctccctcgcgcgctctagagatgatgctgcgagtggaagtggaatcggaatgcggagggttgaaagccgtacccccaaccaaaaaccgaaactgaaattgaaactgagattgtgcgactgagggccagtcgagtcaatttcgaaatcattcgttagtcgtaggcctaaacaagcggacacgcgcgggtcttcattcactacgatattttccggccacggagttacccatatagcctgatctcgttcaaatcgattatgccaagtgtagtttcttaaaatctaagaacgatttgaacaataaacgttttcgtgctcaaccgtttgacaaaatcggtttcgtgcttgtgctaaaaaggattcaagatcatttgatcatttgatcttgaatatatagatttacgtgttttaatcgtatcgtgatcggaaaatattaaaaaccctatataaatataaatactgcgtacatcggaaactgaagtgctgacattataattgaaaacaattcaagcaaaatacgtagttaaacaaaatttccaaaaaattattaaggaactcaataagttttataagcataaagcaggatatccccttaaataatttttttggtcttaattacatagaagtaattaatcaaaaatatttgaacaaaaagctgctattgcttaaatactatttataaccaaactgaaaagcctaaatcgttaagattcgatcttctccgcgtgaatacctatccgtagaccgatcccaagctgggtagtccattcctgagcattacgccggcgggtggcagcagcaatccctcgcccacgcctccaccgccagacgccaaggtggcggccaagcagctggcccagagcttccagctgtccgccaattccgcctttaacttggcccttccgccggcattttaccgagcaccaccgcagcagcacccggagtgcctggactacggccacgaagcgcccgagatggatctgataaatccgtatatgcgccatcatagttttgcggccgccgcccagggaagtcccccgtcggcggctcaacgtcatcatttggcggcggccatgagcaatggcttcgcggatgtccatgcccatgcgatggcggcggcggactatcaacaacagttggccgattaccacagtgcagcggcggcagcggccgtttatgccaacaacaataataataataacaataatagcagtaacaacaacaacagcagtccgctaatgttgctaaaggcggcacatggcggaggtctcaaggattcggactcgccatcgacgacaccgccacccgcctcttctagactccattctgactcctcgccatctccgcgatacgaacacaattccagtcccggtgtggacagtgccaagtcgtatgccttgagccagaggagcagcggagcggaggatccatgccagaccagcgaatccgccagtccaccgccgcagggccagaacgactacagtcccgagaatctcagcagccagagggcaaagttccagcaccatcatggagtgaacccactggctttgcacaatgccaaccatgccggaaaccccggatgtcacaacaacaataaccacatggaccacaagctcccactgagttttctcggtcccccgctggccgctcttcactcgatgaccacggaaatgaagggtcaaggagtcggtggatcgtcggcgtcggcaaatggcttgtcctatagccacagcccgaattcgcatttgatcagtgatcgcggatccggtggcagctcatcgtcgtcctccaccacgactacgaacaccaacagccagggtgcacccaatccgcacggcatcgataccatcctctccaaaccaccgccggtgacatcggcgggtctaagtgctttaacaggaggtgagtaaaggaatggatttaatatgggttgggtttattatatattataccctgttattttataccaattatattaaggaagaaagtgtataaggccatgatttggggacttttaataaatttcgaacttcttaaagatgtttgttaaaacacacattttaataatgcataaaataaaatacataaacaatggttcttgtttttacaattttattgacataaatctaaatttggaaaaatcaaaatattccatttaaatttaagcgctttccaaaaagttgctatatgtgttgcttaatgctgaagaactttgctctaatttgaacgcataactattaaacttaattgcataataaaaatgaaataataatacgctacctgtttatttacaattgtctctcccaattcaatgcacctagtcattatgcaacactgaaatatgtgtatatatgtacatatgtatcagacacgaatcaatagatattttgtatgcaccgaactcaaaaagccaaagaaaaaaagagatatattttaaatgcttcaaaaactcgtttcgcaaaccaaacagaaaaataaaaaggcaatctcgtcgaacaaaaacgaccgaaaattgttgttttgtttacgaatccggtttggcatgattccatatgattccatgattcaataaaagccattccccagcccacaacccccctgtcattacgccccctggtcgctttacctaatcagggcaattttggatattgagcacaccgttttctacgaaacccaaaatggttataatatccaattgcaaaattaccacataacgtaatgagatacgcgttttaacgttaaaatttgcagcaattagttgtcaaattgtttgtaattaaatcaaaatgacacacaaaaaacgtggtctatatggaaaataaatggtggaggggatctgaatctgtgacgctgtcgtttcactaaaatgatttggtttttcagccactctgcgtcgcattttttgtactttttcactcaaatgtagaccaattgtgtgacatgacagtggtttgaaaggagggggcgcggttgacagggtgatgacaatttgccataacatttttaattatttttaacgagggcgtttatgtgatttgattcgtttatttgggtttttctttaaacgattcggtcaccagaaacgtaactcattctttgacaaattatttaatggtctttaattaattcgaacaaattccgtattgtgtgtttgagttcgccatgagtgggcagaaaaattggctggctgagaacaaattgcgcgaaattctcatgaaagggaaataaactttggagaggattagttaatggggtgggcttattaaaatgattatgcaattcactacacagtattttgaacatacatatagaaaaatattacatcagggataacaatatttatattaatatgcgaactactttaaaatggtttgaagtttacgggaagctaatcgttctcacttaagtaaattgttacttaagaaaactgtcatctatccttttcaaactcaaattatcatctttaaaaatcattttattccttgttttaaaaatgaaatacatggactagtgtgccacagtcatttttgtttttgtttaaataaatttatttaacagtcctaacaaactcgtttctgatcatggtttccccatccatttatttaccctcagctggcattccccgcttctcgatcgccgccgcagcagcgggaatggcccagtatctatcgcagagccaaggggcgccactgaagacccacgccggacacatagtggaccgcacgcacctgtactggccaggattacagggactggtggccaatcccatcgcgtggcgcgaacggctctccaacacgagtaagtatattgcagcttgttagcaaacaatcattaatttgcgattgatcggtgaatcgggcgcgtaatttggtatcaattgtaagtggcgggcacacctcgttgcgatttccacttcctgttcaggaggcggtcatcgaatcggattggattgaatggggggatctgcggagctggcgatctggggacccggggaaaccgttaacaaagcgcagcgaatgcccaactaatgatcacggtgatcaggcaatgggcttctcaagtgattaccaatgtggcttacaacgggggcaagttgcattgtccgactcattaataagtgttgaggaaccactttaacacgatcagcgggctcggagagctctctttcggaatgactccacacaaaagtcgataatgatggcgatgatgatgccgggatgggacatggtatgccaatccacccttcttggccatatgaaatattaatttactgaacgggcgagcaaccgatttctgatttctgatctggttacttcattattacatctatttataggcatcgctaagctcattaagtaatgtgccaccagttcgaaactcgttttccttttccaacatccaattgtttatttgtttaaaggcccctcttcctcgtcattatcactatcgtcatcgggttcgcattggcaattgatttgatttagtgctgtgggctactgctgctgctgctgctgttcgccttttaattgcggccatgactgtgcactaaaatcttggcccacaactcggaaatcgttcacaattttcttacattcatgcgatcgtggaaaggagcacagatacagatacagattcgtggcacagactctatgtttatgtttggcttgtgttcgatttgatttctgaagtgtgtcgttaggtgtcgtggaattttcacgcttttggtagctctgtgggcaacattaagcaaatattgatttaattgatttgctaaacagagcagcgaatggttgggtagctggattggacaaggagactgga

SEQ ID NO: 31424 - DNA, 1992 bp, DROSOPHILA
actgagggccagtcgagtcaatttcgaaatcattcgttagtcgtaggcctaaacaagcggacacgcgcgggtcttcattcactacgatattttccggccacggagttacccatatagcctgatctcgttcaaatcgattatgccaagtgtagtttcttaaaatctaagaacgatttgaacaataaacgttttcgtgctcaaccgtttgacaaaatcggtttcgtgcttgtgctaaaaaggattcaagatcatttgatcatttgatcttgaatatatagatttacgtgttttaatcgtatcgtgatcggaaaatattaaaaaccctatataaatataaatactgcgtacatcggaaactgaagtgctgacattataattgaaaacaattcaagcaaaatacgtagttaaacaaaatttccaaaaaattattaaggaactcaataagttttataagcataaagcaggatatccccttaaataatttttttggtcttaattacatagaagtaattaatcaaaaatatttgaacaaaaagctgctattgcttaaatactatttataaccaaactgaaaagcctaaatcgttaagattcgatcttctccgcgtgaatacctatccgtagaccgatcccaagctgggtagtccattcctgagcattacgccggcgggtggcagcagcaatccctcgcccacgcctccaccgccagacgccaaggtggcggccaagcagctggcccagagcttccagctgtccgccaattccgcctttaacttggcccttccgccggcattttaccgagcaccaccgcagcagcacccggagtgcctggactacggccacgaagcgcccgagatggatctgataaatccgtatatgcgccatcatagttttgcggccgccgcccagggaagtcccccgtcggcggctcaacgtcatcatttggcggcggccatgagcaatggcttcgcggatgtccatgcccatgcgatggcggcggcggactatcaacaacagttggccgattaccacagtgcagcggcggcagcggccgtttatgccaacaacaataataataataacaataatagcagtaacaacaacaacagcagtccgctaatgttgctaaaggcggcacatggcggaggtctcaaggattcggactcgccatcgacgacaccgccacccgcctcttctagactccattctgactcctcgccatctccgcgatacgaacacaattccagtcccggtgtggacagtgccaagtcgtatgccttgagccagaggagcagcggagcggaggatccatgccagaccagcgaatccgccagtccaccgccgcagggccagaacgactacagtcccgagaatctcagcagccagagggcaaagttccagcaccatcatggagtgaacccactggctttgcacaatgccaaccatgccggaaaccccggatgtcacaacaacaataaccacatggaccacaagctcccactgagttttctcggtcccccgctggccgctcttcactcgatgaccacggaaatgaagggtcaaggagtcggtggatcgtcggcgtcggcaaatggcttgtcctatagccacagcccgaattcgcatttgatcagtgatcgcggatccggtggcagctcatcgtcgtcctccaccacgactacgaacaccaacagccagggtgcacccaatccgcacggcatcgataccatcctctccaaaccaccgccggtgacatcggcgggtctaagtgctttaacaggagctggcattccccgcttctcgatcgccgccgcagcagcgggaatggcccagtatctatcgcagagccaaggggcgccactgaagacccacgccggacacatagtggaccgcacgcacctgtactggccaggattacagggactggtggccaatcccatcgcgtggcgcgaacggctctccaacacgagtaagtatattgcagcttgttag

SEQ ID NO: 31425 - protein, 378 aa, DROSOPHILA
MDLINPYMRHHSFAAAAQGSPPSAAQRHHLAAAMSNGFADVHAHAMAAADYQQQLADYHSAAAAAAVYANNNNNNNNNSSNNNNSSPLMLLKAAHGGGLKDSDSPSTTPPPASSRLHSDSSPSPRYEHNSSPGVDSAKSYALSQRSSGAEDPCQTSESASPPPQGQNDYSPENLSSQRAKFQHHHGVNPLALHNANHAGNPGCHNNNNHMDHKLPLSFLGPPLAALHSMTTEMKGQGVGGSSASANGLSYSHSPNSHLISDRGSGGSSSSSSTTTTNTNSQGAPNPHGIDTILSKPPPVTSAGLSALTGAGIPRFSIAAAAAGMAQYLSQSQGAPLKTHAGHIVDRTHLYWPGLQGLVANPIAWRERLSNTSKYIAAC

SEQ ID NO: 31426 - DNA, 2499 bp, DROSOPHILA
ctttcaaaaattcaaaagccaattaaaaagcttcatttgaaattgaactccattgaaatgtatctccgtcgtattttattccggatcgaactttatctttatctgcatctctcccccatccaaactgactttaggcacgcgaacgtcacttacgcttactcccactcgaaaaatgcgacgtaaactggatttgtagcacggcgcagactttctgaggaatcccgatccgcaaccgtaaccgaaaccgaaccgcacgtggcgactgacaagcggcaactgagctcaaccgcagctggagaaccgtcgccaaggcaaaagcactcggagtgagtatgaaaaagcagtggaatgagtgccaattgccgattaccggcgaaagagcggagcaaaacaaacccaccgatgagtgagtttgctttgagtgagagagcagagagcctgagtcaacaggttgttttgctggttgggtcacttaacctcgttactctttgtattcctctgtgggtcacacggggcgtatgtgcaatatggctcactcggtgcgtatgtgtggcgtatatggctcaagtttgccgacaaatcgccgacaaattgtttaggaacatggatgctggctacgcacacgacttggattaccagttgggattgtctttaacccaggctgtgggttgtcacagtgcgtatacgtgattttgtcttgacttttctgcaggacaatttgtgcggatgttggcgtgcttttctcttttctttctgttcataattttgtatttttatggtcatcctaagttttttcgtttcaagggttttaacatttcgaacgtcttagaaactttcccacaactataaactgaagaaagagacaatgggttttgtcatttcaccatgcaaatttaattgaatcgataaaaaatataaaacatttgtagccctgaccaccttattattccttttaaatgtgtgaggtggaattgacaacgcattaaattaagacgttagtaatcgaattggtgcggtcttggatcctatttaaaatggttactggtcttctgttatgtttatatcaatagaatccggcacatcttttggatattgctgattaaaatcagacgctgcaagactacggtcattcagaacttctgtctcgtcggaactcggatccaagtcgagaaacgccttggagatcattttgggatttagttcggcatccaggtcgttgttctcaactattttaatcaaaatttccaggagcaattcacaacacttcttttcgtagcccataacattggaaatggcattatggattgtgtccttcatttttaacagctcttgattcaagttttcgatatcaactagagctttctgggaactggccaaagaaacagcaatgcgacgtcccagatcctcgtgctccaggcgcatattggtggcattttcccgaagacattgcagccaaatagaacgcttggccattcccctcatgttcattgtgagcgtacaaaatatacagattttatttgaatttattttatgtgtgaatatctgattactttcagggcgtcaatagtactgggaaacctattttagatccatagaaatgacacagaggcaactgggaatgagtagcctgcttgggtggcgctacaataagatgactgacatcaattatattaattatcagagtaagccgattagctggctaatgaattaaacatcatgggaatttcccggcccatcctgaaggcgacaaatcaatgtcacttaaaacatataattatcatcattagccgcccaaaagcatcgcactcctcatgaacctaacttttattacagactattttgccaagctgatggtgctcggtgttgcattcataattgattgtcctgtgggcaaacgtgtcctttgcctttgcgtccttcgcaagataagcacttaagctaaatgaaagcagatgtcttaattttcatttaagttgctgacaaagagatttctaagctgctctgtcaatgcctttatctgcgaccttcctggttaattttttatttcgaatgtgcgaacgtaaatgaaaaaacgcttggtaattggtcaaagctcttgattccggtccaaagcaaaggatttcatttttaatgagaagcaaatatgttcagccctaattggattaatgggaagtcctgcgggatctaaacggcttgcggtctaggtcagagtcaatgcgataggggcgttttttgagtgaaaatgttcgctttgttaacaatttaacaactttgttgggaatggcttaaaattttgttggagaagaaggattaaatcatctatatgtgatgatgaaaagcctatttatatatatattatgttatactcgcattcaagagatttaaacactaaaagatcatatctctatattctaagagcttttcatgaattttgatttttataattaaaaaggcgcaactcgttgtgaacattgttgtaggcaaatgaaaagtcctttt

SEQ ID NO: 31427 - DNA, 395 bp, DROSOPHILA
gtacgctcacaatgaacatgaggggaatggccaagcgttctatttggctgcaatgtcttcgggaaaatgccaccaatatgcgcctggagcacgaggatctgggacgtcgcattgctgtttctttggccagttcccagaaagctctagttgatatcgaaaacttgaatcaagagctgttaaaaatgaaggacacaatccataatgccatttccaatgttatgggctacgaaaagaagtgttgtgaattgctcctggaaattttgattaaaatagttgagaacaacgacctggatgccgaactaaatcccaaaagatgtgccggattctattgatataaacataacagaagaccagtaaccattttaaataggatccaagaccgcaccaattcgatt

SEQ ID NO: 31428 - protein, 106 aa, DROSOPHILA
MNMRGMAKRSIWLQCLRENATNMRLEHEDLGRRIAVSLASSQKALVDIENLNQELLKMKDTIHNAISNVMGYEKKCCELLLEILIKIVENNDLDAELNPKRCAGFY

SEQ ID NO: 31429 - DNA, 2490 bp, DROSOPHILA
cgaatttatcttggcactgagtgcagttctgcagccattttgcccactcaggcacccattcattcaaccaagtgagttcactcagtcaactcggttatcacacacattgcgtagtcacaacattgaggcaaagtttacttaagcatgaagctgggagttgtgacacaaaggcgactgtaagccactggaaatgtgaggactacggctacggactttgacaaactgctacaggattctaggagtagcaaagggaatccgaggagcagctgcaacatggcgtagttgcaccagttggagtgataaacacgctgaacaattgctgccgtcgagatttagcagctgacaaaatgcttgtgacatttttgcaagttaacaataaaaatatttcatataatttaatgccgctgcaacggcattttatggcaaattatgtttggcttcatttccactgataagtatcggacttcagctttctgtcgaaatttatcgcatataatacgttttgccaatatctcgagcggcagacgacgaacttgaagaatgtcctttcttatttattgcttttaacatatttgtttggctccaaggcaattcgtctttctatgtgaatgtggcgaaaggcaaatgcaaatttcagtctcaaattttccgactttgcaaagttttcgacaaaacaaaaggccccctgacaatatgcagctgctcgaaattgcttggggtaacatttttgaagggcggtcaatgaaaagtttattatgcgccgaaaagaagtccacaaagtttgtggaccgaatgaaagcaagtttggcaattgtgtgtggagggccactaataaattgcaaatatcgttgaaaatagtttagattatggcgataagggcagtatacaatgtattgcttttgctcattgctcagtttattatatgcgcttagttttcgaatccttggcttgtgttaatgcataattttttaacaattaactcgggtctgtttgtgatttgttaaatgggcttcaataacaataacaataaataaatacaataaatttatacatttttgaaaatgagaaatataaaaatgttcttatatcattggttggtggtttcgttttcttgttcgacgttttcaaatcgcattggattatcgcctccagccaactggtcggcgttttcgccaacaggtacggatggaattcgagcatggagcttcctcttcatctggaccacggcagagttggccatgctaatgcgattaatgattcggttcagacgctcctgaatgttcgagaatacctgctcggagaagcgagcgtcctcagaggtatcgagaggccccactgcagttgcttcgtcactattgttttggctaccttctgtatagggctcgtagctttcaaggtcttggaatatatcagatccgtcgtccgacattttgacaaaaaaaatatatttcagaaatttcaatagttattcaggagctgtgaactagaacagacttaagtgcaaacagatcaaagacagaatttatactgacaacaaaatcgagagcagcatgtttgatatagtaactctatacaataaacaatagtattaatccaaactccataaatatgagtagatggtcacaacgttgaaacatttttaattaagcgacacatcaaactatattttttatttaaaaccaacgttttaattatcttcaaaattaagaatagacggatttaaaacctcttaagaaatcgcaacccacttggcatgtaatcatgtgtgaaatgtgttcagcagggtcataaaatcagaaatcaattaaagcaatttaagagcgaggagagcaaacgatacggatatggatgtcgagagtcgaaagttgccagggcacaaggcaaataaatctctgaaacgactctgccaaaaaggacgcactttgggtggcagtgaggataaaagtttccccacagctgaacgaggcgaacgaaatcaaagtctataacttaacgactgcaatgagaatgatgctgatgacgatgtcgacgatgtgaaacgccctcaaggtccaccccattccgtccacccgttccacccacagcccgccaccattcgaggaaaatccgtacgcagaaaaagagagacaaaagccgaaaagggaggaaatgcagcattcattctctcgccattttccccttaaccctccccttttcccatggctctttgccatcattctttcagtgagtttttcgcctccatgtgctaaatatttgccagccatttctttatttttctctggcctttgtcgccaaactggattcccatcttgatacccatcgctctgccacatcgtaataaagcaataaatctgctgaggaactgctcctcataaattccgttacgcataaaaacacttacaaatgactttttgttcaatggaataaatggcatggcactacacacatactaagatgtatatatggagctgtagctgcgaatgcatgttc

SEQ ID NO: 31430 - DNA, 490 bp, DROSOPHILA
gttctagttcacagctcctgaataactattgaaatttctgaaatatattttttttgtcaaaatgtcggacgacggatctgatatattccaagaccttgaaagctacgagccctatacagaaggtagccaaaacaatagtgacgaagcaactgcagtggggcctctcgatacctctgaggacgctcgcttctccgagcaggtattctcgaacattcaggagcgtctgaaccgaatcattaatcgcattagcatggccaactctgccgtggtccagatgaagaggaagctccatgctcgaattccatccgtacctgttggcgaaaacgccgaccagttggctggaggcgataatccaatgcgatttgaaaacgtcgaacaagaaaacgaaaccaccaaccaatgatataagaacatttttatatttctcattttcaaaaatgtataaatttattgtatttatttattgttattgttattgaagcccatttaa

SEQ ID NO: 31431 - protein, 113 aa, DROSOPHILA
MSDDGSDIFQDLESYEPYTEGSQNNSDEATAVGPLDTSEDARFSEQVFSNIQERLNRIINRISMANSAVVQMKRKLHARIPSVPVGENADQLAGGDNPMRFENVEQENETTNQ

SEQ ID NO: 31432 - DNA, 4139 bp, DROSOPHILA
aaatgctctattaaattttgaagtaaaattgtgtcgttggtttaaaaaaaaacattttaaaaacaaagcccagcttagtgggaagcgactgttgaaagcttttatgaaatttccctgctataatagtaaagacgtcaaccgaaacctaaaatcggtaccatacaaatttaaaaaaaaaaataaagatatttagggtcatttagtgtgtgtttagtatttgccaaagaaaacaaaaataactacaataaaacataggtctaaataagtctcaccattgtatgatgaaaaatgcatttttaaaataaaaaggcgagaaagctaacctcctgtgctataatgggtctcagaaaataactattaaatgaaactcaataatttatattataacatttatcatttgatttctgtttaatgtaattaattttctttaattattgttttcttttaacaaatatattcacagatgtagagatgaaataaagacaaaggcagtaaaaacacttgaataaatacaattaaagttaaactgtacataattagagtgacaaatttttgcgaaactatgtacagaaaatatgtaaaactgttaaaatcgtgaaaaacaaaacttaaacacagtctttccgtttacagaactctcaaaaacaattgctgctagttatttgctacgactaaaaataaatttaagaagtaattacaacaaaacatgacgtttgtatatacattctaatctactttacatccagtcagcataaatttgttaatttattttaattggtttagctcttttttgattgcttcacaggactaggctgctgatgctggctcatcagggataaaggatatacatatatatgtatacagatatgtgtagaaacctaagcatattttacattaattttacttaatggttcagttcttagctattttagttgtatttgatacaaaacgcctgagggtaggcactgtttttcggatcagttttctaaagcacccattatcagaaaacccgatcgctgagtcttagactgagtggagttttgggtgccagcaggaactcgaactccgtttccagtggcttcacaaagctcacatcaaaggctaggaccatctgataaagataaatttggttgttttagtcagtgatcctagaaatacgatccctggggcttatggattatactcaccttagctagcagcagcaccacctccatttccacaaaacgctttcctggacacgatcttcgacccacgccgaagggcaccacaatactggcattatccacgttcaccgtgaaattctccgtggcaggatcaatccaacgctctggggtaaactgcttggccccttggaagttgctatccttgtggcaggctatcatattctgacatagcaccacagtctaaagatcggaaacaaattattgataggagaaactaatatttatttccaaaaataaaatataaaatagtaaattccaaaagcttggaaataaaagtgagagtgatcgaaaactaagctttaacttacccctgcattaagcgagtagcccgagagctccatgtcctcctccaggattctggccaggcaaaaggctgtgggcctcagtctgtaggactcctgtatacaggcctttgtgtatgtggcattcgttagtgcatcctgcaggatattcgtgtcccgatactcgcagaattcacttaggattcgtggcatagcaccgggatctccagtaacagaactcagtacaaacaacaaagtgttggctaactaaaaattaaaaattgtttaacatgaattccatttgaaatactaccaaacacccaccgtttctatgccagcggcaataaagtctatgatcgctgactttttgtccctgatatccagatccttgagctccagaatattcagaaagatacttcgtaatccagcagcctcgtcatcctcgcaggcagccgactttttgagttcctccagctcatgatcgatgatctcggagatcacactggattgagagcgatttaagttagatgggaatagaaatgggagcccaaccttctgtgtacctactcatagatcaagtcctcggcgcgggcaaagtccctgtacgttttggtgggaaagtatttccacagacctagaccgtagtacgagtccctttgggagatgaaaagctgtttaacagcagctgccagttggctgatcttttgcggctgcttggtatcgatagccaggaaacccatccttctgcccaacattaaagtgcacacagcttccagacccatcagattggccagctcttcgaaattgggaaccaccagtgtatccggatcccgcctggctcgcagtagttcgataaaatcatcacaaaccgcattcaaggctggcaggaaattctgcaggaccctgggagaagtaatgctggaggtcagggaagatcgtaggcgctgccacattggtccttgctcgttcacaattccaacacttgcatagcgatccggtcgggattgacggtacatcacgatgatctcagtgggaggtcggaatgggtatttgctggggtacttcagcaccttctccagatcatcgcgattgtacaggtgcactattggcacattggagggcatcacctccagcactatgtcgccatattgtctgttcaaatctagaatgtacatttaagataatagaaatagattattaaaatacttgagttactaactcagaactacaataatagaatttatattaagttatagagctaagaaataaaacccattttcaagacgtatttttaatagagaactttgaaagggagagattttaataactatcttaactaaataatgtcttacccgcatatacctcgtgcagcttggtcatcttgtaccgtcgaaagaagagcaggaatatccacttagtgcccaggaagggaatcctctttggcccgggtatgtcccagatgccgcgcctccgcctctttggcgcctcgggctggatcagctcggcatggtagaagtcctcaaggagcgtgttcttcaggagcggccggaggtagatatccgccaatttgtgccgatggagagcgcagtagcagccaagtacgagtgccagggccagcaacagtatcacggccattaccatggggcgctgcaattagaattctgggtcttactgtgttgatccgctttggaggcacttatgctaattcccgccagcaattctaggtctttaattgaagtctggcctttcgtttcgaatcgatgccaaccggtcgactaatttgtatttgactttatacagcttttttggtcacaacaactgatcatcgattttgcattattattggcaacacgcgataacactttgttctcggttcttggttcttgggtttttggctattctgcaaggcaaatggctggcagaaaagaaacaagctttttgggttttcacactagataagataatgtcccaacaagcgtgataaagttcaaggttaatagccaaaaaaaaaaatatgtgtaacgattgtgttgcgaatttcaaaagattgcaaaagcctctaattgtgatgtttattggggattataaatgtttataaagtcaacaaattccgcaagaccaagtcaattattctatgcacgattaaataggcacacaaagagccattaaaatagagtgcgttaaggtcttttttcttctctgccgttaaattaaaatttaaaatttaattaatctaaaatggaaattaatcttgttttaaaatcaaaagtagacaaatgcctaacctaccctataaaattgttgagtgttcagctagttatatcagaaatgcgagatgataatcttttgagggtctgccagacaatgaacactaagtggagaggagaggatttatttttcttattggtcttttttaggtggagttttttccttgttcttataagaccattccgtcgaaaccttttttctattcctattgccaaccggatataaaatactatataaataagatgaaaatcgattaaaacttcaagggggctacctgctcaaagtgattaatgaactacccggttaaatacaagaaacaaaatcagaaaccacggatagatgatcgattctaatatttgccctagcc

SEQ ID NO: 31433 - DNA, 1623 bp, DROSOPHILA
atggccgtgatactgttgctggccctggcactcgtacttggctgctactgcgctctccatcggcacaaattggcggatatctacctccggccgctcctgaagaacacgctccttgaggacttctaccatgccgagctgatccagcccgaggcgccaaagaggcggaggcgcggcatctgggacatacccgggccaaagaggattcccttcctgggcactaagtggatattcctgctcttctttcgacggtacaagatgaccaagctgcacgaggtatatgcggatttgaacagacaatatggcgacatagtgctggaggtgatgccctccaatgtgccaatagtgcacctgtacaatcgcgatgatctggagaaggtgctgaagtaccccagcaaatacccattccgacctcccactgagatcatcgtgatgtaccgtcaatcccgaccggatcgctatgcaagtgttggaattgtgaacgagcaaggaccaatgtggcagcgcctacgatcttccctgacctccagcattacttctcccagggtcctgcagaatttcctgccagccttgaatgcggtttgtgatgattttatcgaactactgcgagccaggcgggatccggatacactggtggttcccaatttcgaagagctggccaatctgatgggtctggaagctgtgtgcactttaatgttgggcagaaggatgggtttcctggctatcgataccaagcagccgcaaaagatcagccaactggcagctgctgttaaacagcttttcatctcccaaagggactcgtactacggtctaggtctgtggaaatactttcccaccaaaacgtacagggactttgcccgcgccgaggacttgatctatgatgtgatctccgagatcatcgatcatgagctggaggaactcaaaaagtcggctgcctgcgaggatgacgaggctgctggattacgaagtatctttctgaatattctggagctcaaggatctggatatcagggacaaaaagtcagcgatcatagactttattgccgctggcatagaaacgttagccaacactttgttgtttgtactgagttctgttactggagatcccggtgctatgccacgaatcctaagtgaattctgcgagtatcgggacacgaatatcctgcaggatgcactaacgaatgccacatacacaaaggcctgtatacaggagtcctacagactgaggcccacagccttttgcctggccagaatcctggaggaggacatggagctctcgggctactcgcttaatgcagggactgtggtgctatgtcagaatatgatagcctgccacaaggatagcaacttccaaggggccaagcagtttaccccagagcgttggattgatcctgccacggagaatttcacggtgaacgtggataatgccagtattgtggtgcccttcggcgtgggtcgaagatcgtgtccaggaaagcgttttgtggaaatggaggtggtgctgctgctagctaagatggtcctagcctttgatgtgagctttgtgaagccactggaaacggagttcgagttcctgctggcacccaaaactccactcagtctaagactcagcgatcgggttttctga

SEQ ID NO: 31434 - protein, 540 aa, DROSOPHILA
MAVILLLALALVLGCYCALHRHKLADIYLRPLLKNTLLEDFYHAELIQPEAPKRRRRGIWDIPGPKRIPFLGTKWIFLLFFRRYKMTKLHEVYADLNRQYGDIVLEVMPSNVPIVHLYNRDDLEKVLKYPSKYPFRPPTEIIVMYRQSRPDRYASVGIVNEQGPMWQRLRSSLTSSITSPRVLQNFLPALNAVCDDFIELLRARRDPDTLVVPNFEELANLMGLEAVCTLMLGRRMGFLAIDTKQPQKISQLAAAVKQLFISQRDSYYGLGLWKYFPTKTYRDFARAEDLIYDVISEIIDHELEELKKSAACEDDEAAGLRSIFLNILELKDLDIRDKKSAIIDFIAAGIETLANTLLFVLSSVTGDPGAMPRILSEFCEYRDTNILQDALTNATYTKACIQESYRLRPTAFCLARILEEDMELSGYSLNAGTVVLCQNMIACHKDSNFQGAKQFTPERWIDPATENFTVNVDNASIVVPFGVGRRSCPGKRFVEMEVVLLLAKMVLAFDVSFVKPLETEFEFLLAPKTPLSLRLSDRVF

SEQ ID NO: 31435 - DNA, 2252 bp, DROSOPHILA
cattatttgccaatgagcccgaaggtccccaatgcaaaaaggtagcaaaatccaaacttaaatcaaacgtaaaatagtaataaaaatgtatacctattgatggcgtaacacatgtaaagattataaaaatgaatttttattgttgaccaaagaacatcagcagggcaactgttgccctgtccccaaattttacctcatggcgaatttttaaaatcaaaaattgacgattatgcaaaaatacgatacatctttatagccgggaaagagagaggctgaggtagcgcacacatgatttggattcggtcctgagtatgacatttgttttatgcctcgttcaggttgcggcagcataaaaaccgcaaaagaaatccgcaacagaaggcaacctcggaaggccgccaacatgaatttggcctaaaacacataagcgaagcgaaactgccacgcgataaaagttaaatatgcaaagatgaaaatctataattttttattagccctgatccccgggcaagtgcgtccttatgcggcttttccttttatgccgcactggctaatttgcccttttggcccaatttgttgcggttctttccacgacgccacgggaatttttgcgaaatttttacgatttgcgatttgcacgaattatgccaatgttcttgcatactttttttatagttttacaatatggcgtcacagttgcggtatcaacattgcattttctcgtatttcttattcaattaaggttacacttggcaggttaagggacgaagtttataaaatcttttacatactgcgaaggattaaataattctatcgaaaaaggggataaggtgacacaaataagaagttttttttatatatttcccacttctcagaatcagctgcaaacaacacgaaataattcaatttttaatttaatttgaattttttttacaattgatttgttcacaacgactttccactatccatatttcatcagcacttggatcgacaacaggtcatgcaagcacaacagcaggatcgcccgagatcgggagccagccatgagaaccaggaaggatccagacaggactcacaccacggaccacagcaggtttcggggaatatcccacagcaggaggataagcaggcggcacagccattcgagcatgacccacatggtccgcagcaggacccggatttgcagcaggattcggatgtgcagcaggatctgggactacagcgaggtggtggagtgcagaaggttctgtagcgagatccgggctttcgacaagatctggttgcaccggtcttacaacgggaactggaaactggaactcgacatccaaaccgtggaacttgcatgcacatggtccacagatatttttgagactcgttggtggaaggaagtgtaacagcggagcttatacacaattttttattctaaaagatatcccgaagaaactgtatattttcgccttatacattcatcgctgattgtccaggcctaagtggttatcaacttatctaatcggaagatttttggcagattatgaagtttatgacttacatgaaaatacacaaacgaaaatagctagcttcgtcgggttttcggaacactttcgcaacgataagttgatggagagtcaaaatatatttcaaattactaaactatatttaaatactttagtttactaattaaaaatactgaaacagaaaacgtagaaaaaaacttattttcataatatttaaacgaaatcattcaactgatgatcgttacaaatcatttaatattttaaaaatactgtcatgttgtatgaaatttttgtgactcctaaaacgggttatttaacactttgcctgactttacaaccctcgaatggaagaccactttagttaatggtaaagcacataaatgaaatcataaataaaagtcgcaactttgatttacttgcgttgacaacagcacaacattaaattaagtgcagtaaaccgaccaaaaaaagcaaggaggatgaagtcaaagctggagaagcccaatggataaccccatggtacccttcccttgggtctaacgaagcgtgaattaattgggatgggtaagtggaaattgcgcattagcctcgcctgccggtggatgcaaccaaagcgaaagcacacagatactcaggatacgcaccattccaaagacgacagggaacaggacaaacaaggaatcgaaactagccattctagctggaaatcgaattttgtcactgcaagtggttggagat

SEQ ID NO: 31436 - DNA, 252 bp, DROSOPHILA
atgcaagcacaacagcaggatcgcccgagatcgggagccagccatgagaaccaggaaggatccagacaggactcacaccacggaccacagcaggtttcggggaatatcccacagcaggaggataagcaggcggcacagccattcgagcatgacccacatggtccgcagcaggacccggatttgcagcaggattcggatgtgcagcaggatctgggactacagcgaggtggtggagtgcagaaggttctgtag

SEQ ID NO: 31437 - protein, 83 aa, DROSOPHILA
MQAQQQDRPRSGASHENQEGSRQDSHHGPQQVSGNIPQQEDKQAAQPFEHDPHGPQQDPDLQQDSDVQQDLGLQRGGGVQKVL

SEQ ID NO: 31438 - DNA, 2462 bp, DROSOPHILA
aaatgaggagctcttaagaacaacagaaagcaaggggcgtcgcaactgaaaataccctgggaaatcgactaaatgctaagaagcttttacaaaataagttttgtcatctatatactaaataagataaaaaattgtttaactgccctgtttgtgtcttagaaaaaaaaagcaaaattatatatacatcaaaaactaaatgtacccatgtaaattgaagggacaaagctaataagaaataagatatgtaattttggggaattcatttaaagaaagcattgcctctagaatttcttagaaaagtacaagctatctaagcacattcgggtcaaacatgaatttcctaatcataccctatagggatagcatttcataggtcccaagaactcccacgacagcaacaaattcgcgtcaaggaaaagaaaagtggacgatatttgcatatgattaatttcatacgcttccctgctaatcagcgagcaatttgtacaagtggcgagcggagaaaaggggttgcaatgtttcgtggttcgggcattttccggctgcgagttttccccccccacacatataaagaaggagcgtttggggagcccgtctcagtttcaagtgcacgtcacgtttatctctgggcaggattaataaactcgagttcggaagggaagagcgagttaagcgagtgaaaatttatgacacttgttgccattgtctggagggaaaaaggaaaagtgtgtggaaaacgtagagacgcttattaatacgcactcgtatttatttagcgacgtgtgtaacggcttagaaaatgcgaacgacaaacgttttataattattttatggacttcaaagttgctggctggtgggtgctagtggtggtggtttcggtggtgggcttacggatcgagtggctatataagcagggctgcagggcgccaaacaacgcagttggccgagaggattaagacggctaaaaccgctggagaagatggcaaagatagtcctgtgtatggtgctcctggcctttggccgtcaagtctatggagccagcctggtgccggcaccgatttctgaacaggatcccgagttggcaacctgtgagctgcagctctccaagtaccgcaggttcatcctgcaggccatactgagctttgaggatgtctgcgacgcgtacagctccaggcccggtggccaggattcggactcggagggatggcccttccggcactacgccccaccacccacatctcagcgtggcgagatctgggccttcttccgcctgctaatggcccagttcggtgacaaggagttctcgcccatcatccgggatgcggtgattgaaaggtgccgcatcaaatcccagctgcagcgcgacgagaagcgcaactccgtcgtgctgggcaagaagcagcgattccactcgtggggcggcaaaaggtcaccggaaccaccgatcctgccggactactaattccggagattccactcccatcgtttttcccatccaagtgtatgaacagccaaagttgaagtcctctaattaatatcagtgtctaaataaacccgatgattgcaaaccgagaagcgacaaaacgagtgttttatttggttaaattcgaaaaaagcttaccattttagtgctgtctttatttgttggggattttctaatctaatgtttttaatttttgcttgctgaagctatcgacaactaatgtttttgtaatcggaaggcattatttgttcccagctatcggtgactatcgatattcaatatcggaaatcgttgtttattctcaggggtgaaatcttaataatcttatttttctatctaaaatacacttaaatacattttagaagttctaagaaagagaaagacttttcaaatataagtggctagtagccattggctacacttaggcaagcgttgccagacagtttataacacttgacattacattttacatgtaaatttggaattctcttttttatgggcgccaacgaaaagggaatttgaattttgttaggaatttttatggatcggttgacaatgtgaagttatatttatatttatattatatatttagatttgagataactatcttaattttttattagtaagtaatgaatctttaatttattaagtcctaaatgaattaaattaaaatatcatgtatgcactcatattccatttcttctgtctcttaaatggaatgccataatgccttcatattttgtttatgccaacacattgtctgtcattgtccattatctaagcaaatgtttggcgcttatcaggcgatcgggagctgaacgcccaccaaaacacacccctttgaacccatgtcggacccacctgaaccgccctatcgccacgattgaaatcttgccgatcccaacagtttttggagcaacattcgaggccttcttctagtagtcagagtccggcggggattgtaatcccagattggagg

SEQ ID NO: 31439 - DNA, 462 bp, DROSOPHILA
atggtgctcctggcctttggccgtcaagtctatggagccagcctggtgccggcaccgatttctgaacaggatcccgagttggcaacctgtgagctgcagctctccaagtaccgcaggttcatcctgcaggccatactgagctttgaggatgtctgcgacgcgtacagctccaggcccggtggccaggattcggactcggagggatggcccttccggcactacgccccaccacccacatctcagcgtggcgagatctgggccttcttccgcctgctaatggcccagttcggtgacaaggagttctcgcccatcatccgggatgcggtgattgaaaggtgccgcatcaaatcccagctgcagcgcgacgagaagcgcaactccgtcgtgctgggcaagaagcagcgattccactcgtggggcggcaaaaggtcaccggaaccaccgatcctgccggactactaa

SEQ ID NO: 31440 - protein, 153 aa, DROSOPHILA
MVLLAFGRQVYGASLVPAPISEQDPELATCELQLSKYRRFILQAILSFEDVCDAYSSRPGGQDSDSEGWPFRHYAPPPTSQRGEIWAFFRLLMAQFGDKEFSPIIRDAVIERCRIKSQLQRDEKRNSVVLGKKQRFHSWGGKRSPEPPILPDY

SEQ ID NO: 31441 - DNA, 2523 bp, DROSOPHILA
ttttgcttacctggaactagaataaaatatttaataaaaataatacgggataatgtagttcaaaatcaaatggaaatattgttgtttaaaaatatagtattcgtgatttatacgggaataatgttatggtgtttgtttaatccagaattgtaattataaatctattgattgattgggtctgtaacatagtcaaaggaaaataatgtggggtaattacttttatcatataaaattataaaacgtacaatgtattttcttatttcaagcttgtaatatttttttgctgtgttacatcactatccccccagaaagtacagtgcttagtttagattttattttggccttttcaccgtacacatgtgtttcaaatgcttttgtttttgtctgtgagttttcctttttcaatgtttttcatgcctttttgcggtttctatgggagagtatttagaaaacaagtgtaatcaaaattatatgggcgtggatttctcgttgcgactcgtaaatttcaaggcttacggccatgtgtttcaagtgtttggcgggtgggtggtgtacaaaaagtcgtgcaacttggccagcgggtgttggcaagttatgattgaattctagctgcttttgtggccatggtttgtctgcccgcttacatgtgtagttgcttctaatgggaaaagttgtatccccacaaaatggaggtgagaagaatcgggatttttcgagagctcttagaggtgaatgggtgaatagaaggtaactttatttcgaaaaatggctgttggctgttgaaacctgaagacttggctaaaaattgtcgtaaatatacatcatcagaaacttgtaagggttgcttgaaaagttctccaaaattatatgtttggaaattcacttcaaatttaaaaacaacttttttatcacacattctatgaattcaactgcttgacaactaaaagtaacaacctagcaatccgacttgcaagaaagatttttgtcatcacaatacacaatgtcgtcgaacagctcggagtccctaaacaagatgaagtctcttgtggggaagatgatcttcatgcaagtcaccgaacatcttttcctaagggcgcagcagttgctggattctgatgtcagcatagaagaacgtgtgcgcagaatggaggtccttaacaacaacatgaagtggttcaattccgagcgtacacgcatcctagagcagttgcagctgaatatattcggtcagatttcggtggagcatcataatgcgatgaatatgagtgagaatctgtatgagctgcgcgagggactagacggactcagccgtaggatggaaagtatgcaagaggacattacctgttcgatttgcctctcaccctggtcttccaatggcagacatcgagtggtctctctccgatgtggacacctattcgggaatagctgcatcagaactgccatccgcagatcacatcggtgcccgatatgcaggcgtagggctctacacgctgatgtgcgcaggatattcagtcgacgaataagtcattaacactggaaaccactgcgttctagttcaatgtttatatattcaaaacgtttcaattacttattgaacaaatagctgcgattaaaaattaaacagcaaaagcgatactcgaaatgatccataaaaagaaaacgcctttctaagacttgttcatcttatagcttgaatgaaattatagtatttatatccacaaaaaaaaaaaaaaattataattagaaactaaattacaaaacattaactttgtctaaatttttttaatatctagtaaaggaaaagctctacaaattatttatatatgaaagaatgcaatgtcgcttacgatgaaagcttacaaatgaaaaaattaaattaaatcttgaaggtccttaattctcaaataacttaagtaattgaaaaaccgctaaaaggttgcgttggtcaacaccagcaattgcataagcatggactgggaatccaattaaaaacacttcatatttcagtctttaacaataaaataaagttttatttttgcattttccgtttgtgtgtttgccattgaatgcttcaatgatgttctgcatgtttttatttgttttatacacttataattgttcgcttgccgctgggcattcgctatgttacaccgactatcgataattgctataattaatatgcatttccatcagcttaaatgctacacaaatctggcttggacataatttcacgtattactagtgccaatttaaattgaggactcaattaaatgcgcagaaaacaaatgctcaacagttggcaaacatcgcatcctttcttcctttcggtgatttctcatgtgtctacaaatatttaaatggcagtttcaactcttatttagttggggtgaagggaaaaatttccataaagtggcaacaaaattttgcgtgttttgtttgtttgttcgcttaagtgctatgactacaacgtcatttaaaaattgaattaaaaattattccattacgcgtttagaattaattagt

SEQ ID NO: 31442 - DNA, 453 bp, DROSOPHILA
atgtcgtcgaacagctcggagtccctaaacaagatgaagtctcttgtggggaagatgatcttcatgcaagtcaccgaacatcttttcctaagggcgcagcagttgctggattctgatgtcagcatagaagaacgtgtgcgcagaatggaggtccttaacaacaacatgaagtggttcaattccgagcgtacacgcatcctagagcagttgcagctgaatatattcggtcagatttcggtggagcatcataatgcgatgaatatgagtgagaatctgtatgagctgcgcgagggactagacggactcagccacatcgagtggtctctctccgatgtggacacctattcgggaatagctgcatcagaactgccatccgcagatcacatcggtgcccgatatgcaggcgtagggctctacacgctgatgtgcgcaggatattcagtcgacgaataa

SEQ ID NO: 31443 - protein, 150 aa, DROSOPHILA
MSSNSSESLNKMKSLVGKMIFMQVTEHLFLRAQQLLDSDVSIEERVRRMEVLNNNMKWFNSERTRILEQLQLNIFGQISVEHHNAMNMSENLYELREGLDGLSHIEWSLSDVDTYSGIAASELPSADHIGARYAGVGLYTLMCAGYSVDE

SEQ ID NO: 31444 - DNA, 2309 bp, DROSOPHILA
tctaaattatgtgtagggtattttcctaccaccaaatcattttccttatttttcctgtttttttagtttttacctttggggcgtttcggcgtctgtcgcttgacttaatggcaacatgttttacaacattattagacaggccaaaatggaagcggttttttcggatttctggtcgacaactggcaaattttaattaccaatattttccaggtgtcgatacccatacgacctacgccgggggcagcattttatattttatgacaggccacataacccacagacaaatatatacgggtattgagagacccactctatatggtagctgctgtctaattagcgttttgtgacaaccgcagaaaaataaaagcgtttcgaaatgggtttgtaattggcaaacattttgtttgacccacccgaagcgaatctaagccgtactaaaattatatttaatttcatttgtatttatcggcttacaaacttgttttcgtgggtggtcttgttttgtgtttgtggttgccaataatcttcttattggattagaatttcttgaattattaagttttaaaattattcttgattcctttggctttaaaatcagctttatatgtatagagaatcgttcaattacgttttggtgaaatctttgcgtcatgtcaatcaagataagattagttgttattttatactttatcgtatggacatttgttaactaagtgcgcagtacacgtatttttggaatgcagaaatccattacgagtacatacatatataaaaaattctacatgaattatcatcgtacttcttaatttatttatttttactttccccaaggaaactagcattcaaaaatgtctttgtataagtctaagtggttttaatgatttttttggttttgttttttgtacactttatgtaataaattaaattcgcttataaacactttcattatttcgccacctgatggctgtggtttttaagaccttccttccattccattgtactagcagtgatgatgatgatgtccatggtgaggaccatgatgatggtcaaagtggctgccgtggtgatgatgatgatgatcgtagtggggcggcggtggcggaggtccgtagtggtggtggtggtgcggcgggggtccgtggtggtgcattggaggtccgtggtggtgatggtggtgcaccggaggcggtgggtgatagtggtgcaccggaggcggtggatgatggtggtggtgatgatgtccacctccacccaaattcaggccaaggtggattccaaacaggcgattttcgtgatgtggcggcgacattttgaatgttttactttttttaatccttatcaaactgatatattcctttcgaaaactgctctcgttgcttgttgaatgctaactgcctttccatccgctgatatgaccagtttatatacacatcccacttgaacagcttgacaattcagatagtattattgttgtgctgctttatcttatcgaagggggtgtgtattcgactgactcactggggattcacttcgattctattgctaatactcaaagtgggctataaagatagcaatgtttttgtgcaatcatggatcgggaattactcaccggactaattcataacatttaagcgcttttattcttttcattcttaacgaatgtaatgacagtaatagtaatagcagatgtaagaaaaaacaaaaagtatttcgcagacaaaacatcaatttgatattgcaaaaaaaaggatgctgacaaatagatatgtaaaaggtaaaataaaactttaagaccccgccaacaataatttccgccttgtttgccagacgtagtcctaaacaaaaaataagaaaatacagtacgaaagaagaaaagcgaggaaaaccaaaaaggcactaaagacacccaacacaagcacagagaaagtgcgagcaggaaggcaataaccagaaagcttttgcatgaagattggcatgggtggaggtgtttatataccccctttcgaccatttcaataaaaaaaattgcacagaaagaaacaatctcttgatataatttcttcttatcaacacttgcataatattttcgtctttagcttgacaatcttatcagtgtattgagtatgagttatttaccatgaagaggatatctctcaaaataggtacatgattttagggattccctgtaaactaatgttaacttttcataatgttgctaaaataaagtagcttttttaactgatcttattaatagaatatttgatatttactgtaagactagagcctgcgtactgatgtaatataattttg

SEQ ID NO: 31445 - DNA, 309 bp, DROSOPHILA
atgtcgccgccacatcacgaaaatcgcctgtttggaatccaccttggcctgaatttgggtggaggtggacatcatcaccaccaccatcatccaccgcctccggtgcaccactatcacccaccgcctccggtgcaccaccatcaccaccacggacctccaatgcaccaccacggacccccgccgcaccaccaccaccactacggacctccgccaccgccgccccactacgatcatcatcatcatcaccacggcagccactttgaccatcatcatggtcctcaccatggacatcatcatcatcactgctag

SEQ ID NO: 31446 - protein, 102 aa, DROSOPHILA
MSPPHHENRLFGIHLGLNLGGGGHHHHHHHPPPPVHHYHPPPPVHHHHHHGPPMHHHGPPPHHHHHYGPPPPPPHYDHHHHHHGSHFDHHHGPHHGHHHHHC

SEQ ID NO: 31447 - DNA, 2561 bp, DROSOPHILA
gaatccacactaattcccaattgggtgcaaatcaaatcaaattgtaatccaaaacgctctcgacaccagagacaagccaaaaacgagggaatcgaggattggggaggccaggatgacgaggaggttggtgatgatgatgatgatgtgttaacaacataattatagcccagagccaagtgtttggttcggtttgaaaaaggggagcgcagtgcacaacccctcggccagcagcaaccactcaaaacaaaacggaaatgaagcaaaacaaccctctgatgtgcttagtacccgttaacattcacattcacattttcattcccattcccattgcgacaatcttccatcgaccaccagaagaactggcaactggtgtagcaatgaaaaacgtattgcaaatcaaataaaattaaattgagaccgtttcggtttgcagtacgggggaggcgcagctggggttgttttccgccttagccacaattagttggtcaaataaagccgcaaaagtgttaagcaatttgcactaatcagaaggttaagcactccagttttctgcggttgatttcgctcaaattaagtggcataaggtggcgttggaggagatcaggggctaaggttatggtttccatggcacctttagatgttattcaataagaatcagttaccggttatctgtttttgatttttttttttgcttggttacatatcagtatgttttgacaatgatcattaaacagctttgggtgacgtctaagaatatgaatatttaaatgatgtcaaagaaatggaaatattataagtattttaagtatagcaattcattagattttttaaaagattttttaaaaagattaaagggtctttgggattatgtatttgaacagctaagaaatctgtttagttcttttgaacattaattcaaaatattaattaatattaatttaaaatcgagctaaatatccatgtccttgcccctcattcacaggccaccctctccggtcagatggacaagttcgccctggagcgcagctcgtatctgagcaactcctcgcaggcgagtgcctacagcgcctacttggaccccagtgtgctgaccaaggcgtatttcgactccaagatgtaccaggatcgggcggccaactatgccttcgacatatccaagatttatggtgcccagcaacatgcagcagcccaccaccagcagcaacagcagcagcagcagcaacagcagcagcagcagcaacagttgctgctcagcggtggtgggggcagcggcgggggcggcagtgccagctcgcacaacaacaacagcagcagtgggctggatgaccgcgatgccacaccccaattggaggcggttgagtccaagccgcatctgcattcgcccagtgatgtgggtctggactacgcccaatatgcccagcaatatggcggtcaattggcagcggcagcgggtggtgcagtgggtggtggggccgcaggtgcagccgggggctcggcgggcggtgggagtggtggcgccaccgccgcggactttcgacgaccgctaacggtgatcttctgaccaccatcttccaatggcagcgaggagttgaacttgtccatgacctaggaacaagaaaggggatcgcttcttttccgttcgcaattctgatcgcgtttattcgaaccgctcaaaagtgtcatgcgttttcccgaaagttttaaatctttctctttttctttaaatttattatttgagcaacttcaagcgatttttgagatcagaatttgctacgcgaaacgagttgaaaaattcccaaaaggatataacgaaaagggtaaaacgaatataaccgaaaaagcgagattaaagttaaacgtagccaacatttacatttaagtctccagttgtaaactatacttaagctttgttaaaatagagcaagcaggaaaatggagaagtgaccgaaagatacataggttatgaaaatcggttcagagtggcaaaatcacttaggaaaaacaaggagaaaatttcaaacaaattgaaacaacaacgagcggtgcaattttttatgttttaaacgcagatcgaagtgcatagcataaatttaaaattaaatttaaatgtatttaaattctacactaaacacacacaaaacaaagcaaaatacacacaaaatatatacatcagaaaccagaaaaaataaaaaatcaaaaaaataaaagacgcattgtcatcagcagcaaaatgtgtagtttttcaaatgggttataatttgagaacaaagcaattcataaacgcacaaataaaatattttctagatttactgttcaagtccacccaagtatattggtaattaaattgaattgcaaacagtttaagttaaattaattaattgcactttgtgtgtgggtggatagggatggcaggcaagagtcaagagcgctaaacgcctccaaatgacggcaacttctagccaatcaggttgacaaaatgcagcggagcaaacttaattgctcaagcaggcgcagcaacttaacgctcaagtttgaaccctggtacgaaattaccgttggcc

SEQ ID NO: 31448 - DNA, 561 bp, DROSOPHILA
atggacaagttcgccctggagcgcagctcgtatctgagcaactcctcgcaggcgagtgcctacagcgcctacttggaccccagtgtgctgaccaaggcgtatttcgactccaagatgtaccaggatcgggcggccaactatgccttcgacatatccaagatttatggtgcccagcaacatgcagcagcccaccaccagcagcaacagcagcagcagcagcaacagcagcagcagcagcaacagttgctgctcagcggtggtgggggcagcggcgggggcggcagtgccagctcgcacaacaacaacagcagcagtgggctggatgaccgcgatgccacaccccaattggaggcggttgagtccaagccgcatctgcattcgcccagtgatgtgggtctggactacgcccaatatgcccagcaatatggcggtcaattggcagcggcagcgggtggtgcagtgggtggtggggccgcaggtgcagccgggggctcggcgggcggtgggagtggtggcgccaccgccgcggactttcgacgaccgctaacggtgatcttctga

SEQ ID NO: 31449 - protein, 186 aa, DROSOPHILA
MDKFALERSSYLSNSSQASAYSAYLDPSVLTKAYFDSKMYQDRAANYAFDISKIYGAQQHAAAHHQQQQQQQQQQQQQQQQLLLSGGGGSGGGGSASSHNNNSSSGLDDRDATPQLEAVESKPHLHSPSDVGLDYAQYAQQYGGQLAAAAGGAVGGGAAGAAGGSAGGGSGGATAADFRRPLTVIF

SEQ ID NO: 31450 - DNA, 2456 bp, DROSOPHILA
ctcctccccctggatcctgtaatccccgggatccggatcctccgccgccgatggcgtcctcgatggtcgccgcttggagcgcagtgctaagggacagcgagagggtaccccatacagtccggcaaagggcacgcgtgcgttccgggcaacttgaaagttgctctttgattccgttgaagatatccaaagcggctgctgcctgtttctctgctatcgaacgctcagaacaactggccaatcgaaagtgactattttccgggcgtgtgttttcttatttttggttgccttttttgttttttgtttaatttatttattttttttttttgttttgaaagtaagtgtaaaaagtgctgtgttccaaaattttgataatttaatttacttctttctgacaatgtaagcaaaaacacaatttgttgctactgttgttgctgttgttgttgctggtggtgcaacggcggcactcacacaggcacacagccactagcactcacacacacacacacctacagcaagacacggatgcaggcacacaaacacagacaaaggaccagatttcgatgaaaggctcctgcggcaggcgacgcctcttgtgctttgtttgcaggtttttccgagcgagggacgtgcgaattgcttgcaatttgccttacacaccgcattagactcggtctgtgggcgataagtgtgggaaccgagagcaactgcagttaaatgcactttattttgccgaccgaccgcacgacaaccgcgctacacgaatattcgggacagtgtgaccgaactgggtctgcgcacggaaaccaaagactggcgggaaaacaccctaaatgtgccgaaaactgcgcttagcaaagttttaagccagttgatttaattaatatgcatttttgtggtaattgccaacggtcgcacttaaaataaaaaaacatttgttttacatttcggatccaaggaaataagccattattggcttaaataagctttaacgactgcaatcatgagcacccctcgcaagaactataacaacctgccgccctactgcccacaaggcggccagtacccatcgcagtccgcggattacagagcgcagcaattcggtggccagcagaagccacaaaatccaaacgttggcttctacgaggacaaacagggccagcaaaatgttcctcatttctaccagaacaaatccccacaggagccgcagcgccatcggccctacggtcagggcaggaatttcggacgcggcggcagcttcaatcgcaggaaccaacagaactgggatcatccgaggagccaccagaacagggaacaaaaccagagcggcagctccttcggccagtactttcatccctccatgctggaggatccttggcgggagctaatggaacggcacgaggccatccacggacccagtactagccgaacttcaccgaaagaggtggcggcttcctaaaatgtagaatacaacactaagagctagttaagccctgtaggataatttccccaaagcaaagaaagaattttaattttagctttccgatattaaacaaaagaatgtgtaaacataaaaatggtttcatcatgagatccgagcctgcttttgagtggcacattacgtgctgaaaaccgctccgatgccttcaagaaagaactatggctaaggttgtaacattttatacatttaagcaacagtttcacgtgaatgaaacccgtgtgtatacttaaaaatttaagactaccgtaatggaacacccctcagtgcaatggggctccccgagtgagctgctaatagtgctgctgttgatgccgcttcttctccagatacttctcccagtcgacggcaacgcgattgtagatacccatggcggcacgtgcatcctccacggaattatgctcgcccgtttggatctcctgacccagaacggcctttgtcaggcgttttaagctgggcgtgtgggtattagagatgagtttgcacagcggcttataatgcgacgtatcacgaatgtcatggaacggatggcggatgcccagtacggcaagatcgttgcgcaggccgtgtcccaccagaatgcggccatgtatcagcttcatcacttcgttttgcacggcggcaaagtcctcaccgttagcgatgtcctgcggccgaatgccggacacgctggtgcggtagtcggtgacctcctttcgcggcttcacatacttgtccagcagcacgtgtcccatgcgattcacgatggacacgcgtgccagcatgtcgtcccgtgtgttgtgtcccacgcccaccatctcgcagtccatggccaaaatgcgattgcggtgtgccttctttttcatgcgcatgcgtgccgatttgcttagtggtgctgactccgtcgccttggcatcctggttttcacttccagctgctgctgctgctccaccgccagcagcggccatccagttggagccgg

SEQ ID NO: 31451 - DNA, 456 bp, DROSOPHILA
atgagcacccctcgcaagaactataacaacctgccgccctactgcccacaaggcggccagtacccatcgcagtccgcggattacagagcgcagcaattcggtggccagcagaagccacaaaatccaaacgttggcttctacgaggacaaacagggccagcaaaatgttcctcatttctaccagaacaaatccccacaggagccgcagcgccatcggccctacggtcagggcaggaatttcggacgcggcggcagcttcaatcgcaggaaccaacagaactgggatcatccgaggagccaccagaacagggaacaaaaccagagcggcagctccttcggccagtactttcatccctccatgctggaggatccttggcgggagctaatggaacggcacgaggccatccacggacccagtactagccgaacttcaccgaaagaggtggcggcttcctaa

SEQ ID NO: 31452 - protein, 151 aa, DROSOPHILA
MSTPRKNYNNLPPYCPQGGQYPSQSADYRAQQFGGQQKPQNPNVGFYEDKQGQQNVPHFYQNKSPQEPQRHRPYGQGRNFGRGGSFNRRNQQNWDHPRSHQNREQNQSGSSFGQYFHPSMLEDPWRELMERHEAIHGPSTSRTSPKEVAAS

SEQ ID NO: 31453 - DNA, 2285 bp, DROSOPHILA
ttcagcacatacatatgtatatatggtagtttccattcagatcccattccactgtgccctgcttggggagttgtgcaagccggagcggagaacagaacgggactgaatcgagttgaactggggagaggcgcagatacaaactcagagatactcacaaacaccagcgaacactcacgtttccacaagtgtgtgtgtgtggctgacaaaaattcaagcgaacaagtcgccgcacactcgatgaggtcatcaatcacatgcaacaaatgcgagggcggaaaaaaacgggctggggcaggaagccaatccttaagcttctttctatataccagctactacattcgccaagcaaactcaatttttcaaatggatttttgaacataaacaaacatttcttctagtgtattaaaaaatatcaccgattcagaagagggggtgtatttgtttctaaacattcgattcgactattaaagcttaacagcgtgaaaaagatttttccagatagatttgtattctagaaccatttacgcatttccatttatttatttaaatttatttcttgataccaagctgatcacccaaaatagcttactcgttcataaacagaaatgtatattaaaatcgtatgttatacaaaatatatgtatgaaacatattgtaagctaataaatgaaaggaattttatttgccaaaaactatgcaatgctttttggaaagggattgctagttaattaattctacaaggcgttatttttaaacttggcagaaaggaattatattttttaaatctttgaagtataaatgtatatttgaaatatatttctttgagactttcctgtcatttaggatttgaatggtacatggagcgtaaaataggtaaaaataaataaataaatttgtatatctaaaatttagcaaattataatgaatttaatgaaagtataaaattgttctttaagccatattttaatacctaagttttttttttgtcatggtattcggattaacttaccagcactttggcgaatcgtcggtccagctcatctgtggtgggcatgggttgctggctccggctccgcaggctcggctgcctgacatgttggtactgggaactgcagccgatgtcgtagcgcagatcctgtttctgcagcgtgccgctagagatggaaccgttgtgctggtggccattgcgcatcgagtgatggtgcgcatgcgaatggggatgctgcagctgctcatcggcgtccacatcagcgctggtgatggttcgcgatttgacggcgcccattatggtggcaaagcgaccagagcccgaaaccgagccggagacggagccgcctcctcctcctcctccgccgcctcctccccctggatcctgtaatccccgggatccggatcctccgccgccgatggcgtcctcgatggtcgccgcttggagcgcagtgctaagggacagcgagagggtaccccatacagtccggcaaagggcacgcgtgcgttccgggcaacttgaaagttgctctttgattccgttgaagatatccaaagcggctgctgcctgtttctctgctatcgaacgctcagaacaactggccaatcgaaagtgactattttccgggcgtgtgttttcttatttttggttgccttttttgttttttgtttaatttatttattttttttttttgttttgaaagtaagtgtaaaaagtgctgtgttccaaaattttgataatttaatttacttctttctgacaatgtaagcaaaaacacaatttgttgctactgttgttgctgttgttgttgctggtggtgcaacggcggcactcacacaggcacacagccactagcactcacacacacacacacctacagcaagacacggatgcaggcacacaaacacagacaaaggaccagatttcgatgaaaggctcctgcggcaggcgacgcctcttgtgctttgtttgcaggtttttccgagcgagggacgtgcgaattgcttgcaatttgccttacacaccgcattagactcggtctgtgggcgataagtgtgggaaccgagagcaactgcagttaaatgcactttattttgccgaccgaccgcacgacaaccgcgctacacgaatattcgggacagtgtgaccgaactgggtctgcgcacggaaaccaaagactggcgggaaaacaccctaaatgtgccgaaaactgcgcttagcaaagttttaagccagttgatttaattaatatgcatttttgtggtaattgccaacggtcgcacttaaaataaaaaaa

SEQ ID NO: 31454 - DNA, 285 bp, DROSOPHILA
atgggcgccgtcaaatcgcgaaccatcaccagcgctgatgtggacgccgatgagcagctgcagcatccccattcgcatgcgcaccatcactcgatgcgcaatggccaccagcacaacggttccatctctagcggcacgctgcagaaacaggatctgcgctacgacatcggctgcagttcccagtaccaacatgtcaggcagccgagcctgcggagccggagccagcaacccatgcccaccacagatgagctggaccgacgattcgccaaagtgctggtaagttaa

SEQ ID NO: 31455 - protein, 94 aa, DROSOPHILA
MGAVKSRTITSADVDADEQLQHPHSHAHHHSMRNGHQHNGSISSGTLQKQDLRYDIGCSSQYQHVRQPSLRSRSQQPMPTTDELDRRFAKVLVS

SEQ ID NO: 31456 - DNA, 4159 bp, DROSOPHILA
ataaacgattttcgagaagcgtggcctctggttaggtcaataatccaattttctgtaacttctttttgtttattttgtactcgctacgctaagaaaatacatttataatgttcatacgagcttacgtctagattccctcctcacgatcataatgcgttctgttctatatagtgtaagtatgtatgtatatatgcttaggaaacgggctgctgcaatgaagtagtcggtggcagcagcccggaggagctaactacggttaaagaagagcttgtcattatcattatcattagctttaagaacgactgctatgtacagtttattgttatggttgtcgtctaatgttcgcttagaaaccggtatacatatatatatatgtatcgtatctttatatatatatatatatatatgcatcatatactgcatcgtaaacactttgaaatatttcacccttaaatgcaaatgttcaactgctgttgtgtctgaggagcactaatccggattagcttatgtggttaactctaaccaagtcctacgaatacactcgacttgtgcggaagactacagtcttggttcacctactacgtgaccatagctaatagtggtttgaattcagtttgaagtcattcaaaatgtcccattatacatatgtagttagtataacccgctgatttggatgctgcaaccgctgctctacaaaatatatgtggtatagagcagggcgagctgttcggtttttcgattttctatctcatagggggaacagttggcagtgccgcttacaaggtaaaacatcatccaaaaatttacaatatacataaatactcgtattcgtacgtacaaaacgtgcctgctcatcctggccatcatctcttaatgcttctgtaactctcgattcggttttgttttgtttgaatatatcacaatttagtctttttaaatctttaaatatttgttagcttgacgattattgatttgagatttagcagtgctcgtatagatcctaactggcgtaggatcttcgcacgggaactggtggaggaatcttcgattttcgctgctgctgctgttgctgttgttgctgtgtctgctgacccggtgacctttgctgtggcgattgcggcgagggggaggagggcgagggcgagcaggaggaggacatcgaggaggacgaggacaccgacgaatggatgctcgttggaattctggtgggctgcgccttgggcaggcaactctttggcggctccgttgacttcgctgccttctggaaatcgaaatccaaaatcgtatattattcataatagcattaatttatgaaacccttacctttttgggcgagacagccaccggtggatgaaccggtgatgttaccctcttccagccattgctcctgcgccaggagctggccgtcggaggcgtggaagcctgtctcagcagcatccgctccttcagcttggtaaccattccaggcgccggtggcaccacctctttggccaacttgttcatcatggcacagctgatgctatcgctacacaccacggtggactccagttcgcggcgttgattgtgtctgaggatgcaactgggttcctggtcttctagcaccgatttcgatttcaccaggacgtgcggcggtcgacgtagttcactcttgatgatctgagcaatacactgctgctcatccagtggtttcattggcgtgctgctgacaatcatgggcacatcctcaatttcaatgtcgctaaccctccgccggcactcgtcgataaccgcgtagtccggttcctcatccttcttagcctggctggcggaaagttcgtctgtttcgcttgaggagcagctggtcaactgggcccttcccgcctcactgggcgtgggactgattctgccagcgggacccacctggctctctgagatactggaatcctccccatcgtcgtcgtcctcatcctcgtcatccgtctcaccctctaaatatgagtaaagactgcgcgaggaattcgaacggatgttaaccagtttgtagaagtcgttggtaaagtccgtgcaggccacctcctcgtcctcggagtagacaatctaaaatttgggacagtttttagaagttacccagaagaactagaaatgtatgtctccttaccttctgctgcagcagctgggtaatgccatcggccactgaatccgtttccacggtggtggagttaataaagtcgctcgatggccacagccagtcgtgatccctcttcctccgctgctgctggagatgagggtgatgtggatcccgctcgtcgtcgaacgtcatcactgccagttcctcctgcgacatgctccagtcctccatttctgtggagcagggttcggcaggcaagagccactgttccggttcctcgggcagatcttccagatgcccattcgacggctgcggctgcccactgctcatggtgcagtagccttcatccctgcccttcaccggactggcggacagagcagcattttgcgcctccagatctcgaacccggcccttcagcatgctcacctcctcacggagattatcttctgccacaatggcgtccaccaccttgcgcatcacatcatccaggcagtgctcatactgacggattcgtgtgagcaaggatcgattctcctgctgcatcgattggagcaggctctcctgtcgggcaaagcgcgtctgcaagggaatcaatggccaaaataatctttagttatgcggtactgatgcagtgtttaccccgattaaatctgtatctcgtctaaatggcatatgttgatctgatttataatctgtttggttttcccgaagataacatacatgaaaatgaaacctatatgaaagcttctttttttttatctatgaataggtgttagttttagataagatgtaaatgtaaccatatggagttgtaacaccattattacaatagaagtgtgatatagaaatataaattcttattataatgatgcaattgatactatcgagacatacacaaacttggaaaaacgatctatccagtgggggatagaaacctgtgttgagaaagggccaactgattagatcgagtatttatcaagtgctgggggcaaccttcgccccatgacagctgccctgatgagggtcagtcgctggctagcacggctcctcatccatcaaacggctctttttgttttttttttttgtgtatgtaagtgctaagtgagcagtagttacaagaccccctccatcccggctggtaacaaatatccaatctcgatcaaagccaacttgttaactggcccgaaggtcacatgcttagacgttggacgtgaaaaccttgggcttcattagcggtgccatacaagattggtcgagattttggctggcggggcaaatgagattgccagaagttggcggcgaaagggaaagcattttcctcttcccccctccgcaacggaaaatggtaatgaaaagctgccactagggcgcagtgaagcgtctctaatgctgacgctcaatcaattcgggcaaaaaatgtaatgtgccgggccagaagcattctccaacaaagtcttgtcgaagacgacttcggtactccggtactccggttactccgtccggataaaagacaatttgtatgcgccggaatggcagcgaggggagagattgttcttaaaaatgaatttatgcgtttatttatgacttgactcggagggaactccctcctgctttcctccgaacttcccccctccgcgaggaaactctcgctgtgcaaattgattttccacatgctgtgcggctccgtgcggaaaagcccctccccaccgccaccaacctcagcccatttccatccgatacatacctgcagtgccttgtgatcccgacatgtctgcatttgcttgcgttctttggatttcataatgcgattcatgctgcggattgcaaaggaaaaacgaaaaaaaagaggacaaatatagaaatgcataaatgaaaacgagttgcgaaaaatcatcgcaaacgcagggtgcttgccgcagagagtttcgagtattgattacttatttgactgactgaatggcagaaatgattctatttgttgtgccaccaataccaaaataaacagtgaaattgctaaaagatagcaaacaaatcataaataaaaatgtatgt

SEQ ID NO: 31457 - DNA, 1608 bp, DROSOPHILA
atgaggagccgtgctagccagcgactgaccctcatcagggcagctacgcgctttgcccgacaggagagcctgctccaatcgatgcagcaggagaatcgatccttgctcacacgaatccgtcagtatgagcactgcctggatgatgtgatgcgcaaggtggtggacgccattgtggcagaagataatctccgtgaggaggtgagcatgctgaagggccgggttcgagatctggaggcgcaaaatgctgctctgtccgccagtccggtgaagggcagggatgaaggctactgcaccatgagcagtgggcagccgcagccgtcgaatgggcatctggaagatctgcccgaggaaccggaacagtggctcttgcctgccgaaccctgctccacagaaatggaggactggagcatgtcgcaggaggaactggcagtgatgacgttcgacgacgagcgggatccacatcaccctcatctccagcagcagcggaggaagagggatcacgactggctgtggccatcgagcgactttattaactccaccaccgtggaaacggattcagtggccgatggcattacccagctgctgcagcagaagattgtctactccgaggacgaggaggtggcctgcacggactttaccaacgacttctacaaactggttaacatccgttcgaattcctcgcgcagtctttactcatatttagagggtgagacggatgacgaggatgaggacgacgacgatggggaggattccagtatctcagagagccaggtgggtcccgctggcagaatcagtcccacgcccagtgaggcgggaagggcccagttgaccagctgctcctcaagcgaaacagacgaactttccgccagccaggctaagaaggatgaggaaccggactacgcggttatcgacgagtgccggcggagggttagcgacattgaaattgaggatgtgcccatgattgtcagcagcacgccaatgaaaccactggatgagcagcagtgtattgctcagatcatcaagagtgaactacgtcgaccgccgcacgtcctggtgaaatcgaaatcggtgctagaagaccaggaacccagttgcatcctcagacacaatcaacgccgcgaactggagtccaccgtggtgtgtagcgatagcatcagctgtgccatgatgaacaagttggccaaagaggtggtgccaccggcgcctggaatggttaccaagctgaaggagcggatgctgctgagacaggcttccacgcctccgacggccagctcctggcgcaggagcaatggctggaagagggtaacatcaccggttcatccaccggtggctgtctcgcccaaaaagaaggcagcgaagtcaacggagccgccaaagagttgcctgcccaaggcgcagcccaccagaattccaacgagcatccattcgtcggtgtcctcgtcctcctcgatgtcctcctcctgctcgccctcgccctcctccccctcgccgcaatcgccacagcaaaggtcaccgggtcagcagacacagcaacaacagcaacagcagcagcagcgaaaatcgaagattcctccaccagttcccgtgcgaagatcctacgccagttag

SEQ ID NO: 31458 - protein, 535 aa, DROSOPHILA
MRSRASQRLTLIRAATRFARQESLLQSMQQENRSLLTRIRQYEHCLDDVMRKVVDAIVAEDNLREEVSMLKGRVRDLEAQNAALSASPVKGRDEGYCTMSSGQPQPSNGHLEDLPEEPEQWLLPAEPCSTEMEDWSMSQEELAVMTFDDERDPHHPHLQQQRRKRDHDWLWPSSDFINSTTVETDSVADGITQLLQQKIVYSEDEEVACTDFTNDFYKLVNIRSNSSRSLYSYLEGETDDEDEDDDDGEDSSISESQVGPAGRISPTPSEAGRAQLTSCSSSETDELSASQAKKDEEPDYAVIDECRRRVSDIEIEDVPMIVSSTPMKPLDEQQCIAQIIKSELRRPPHVLVKSKSVLEDQEPSCILRHNQRRELESTVVCSDSISCAMMNKLAKEVVPPAPGMVTKLKERMLLRQASTPPTASSWRRSNGWKRVTSPVHPPVAVSPKKKAAKSTEPPKSCLPKAQPTRIPTSIHSSVSSSSSMSSSCSPSPSSPSPQSPQQRSPGQQTQQQQQQQQQRKSKIPPPVPVRRSYAS

SEQ ID NO: 31459 - DNA, 2871 bp, DROSOPHILA; identical to SEQ ID NO: 27520

SEQ ID NO: 31460 - DNA, 273 bp, DROSOPHILA; identical to SEQ ID NO: 27521

SEQ ID NO: 31461 - protein, 90 aa, DROSOPHILA; identical to SEQ ID NO: 27522

SEQ ID NO: 31462 - DNA, 3531 bp, DROSOPHILA
tattcttaatatcaattcaaattttggaatctattttataagtaaatctcttacttggcatctcaaagtcatattttttctaactgaaaaacgggcagaacacaaatggacacaaatgccacaagccaatcccttaagacatcagtcaacttaatgaattccgcactttagagctgacaagccattttcgttctcattgccactgccgttcgaattcatcagcagtcgcagtcgaatgaattcgctggaagcttatggcctcgaagggtttaacaaaatgcggccacttatcaaatcaatgcgctctgcgggtccttggatccttgggtccttgggaaatgcaactgcaagtgcaaatgcagcttgcgcaataaatgcgttcatttaacatgaaatgcaagtcgcaagctgcaagtattgaaatgaaatgtggcctgcttcagaacgcttaaaagcgacaaattcgctttgtgtcagcggagtaagtcaagtcagcacggagctcctcgccgaatgttgctcatacgccacgttgcacttatttcgttcagctgcatacacatctgagactgtctggcaggatctggtcttgggtcttaggtattgggtaatgcactacacacacacacacacacttgcccagcatccttgcagtcctgcatcctctcccccaagtcagcgacttagcgcgttgacttaacttggcagggatttacgacaacgctccacggagctcgaataacatggagccttgtcagcttgctgcctcgtccttcgtccttttgctccttaatacctcccctttttatcccttccgttcatccacctcctcttttattaagttgaaatagacgcaggctaaataaatccatgtcgcttaagtcgaagctctgacgttgtcatgtgtgtgtgcgaatgtgtgtgtcgccggaaaatgctgggaaaactgctgagcgtatgtgtgttattcatgtatttcattgcctggcatttaagttgaatgctgatgcatcgtgcagtgtgcataattaaaacgaacagtgcactggagcctggcaaaataataaaaaagatagaacgaatggcggagagagatagtcagtcggctaattaaagccatcactgcaggaaaatttcaaacgcattaaataataatacttaaattatttcaaagctttagcattcatccttgaaataggtttctttctgcttgaggttgaataatcttgtacgattaaccatattttaataagtaaaacatgaatgttagttgttcttaaaatattcctattcttgcattttccagagcctttgtggacaacacgcacctacaaacgctccacctgaacaacaatccccagctgagcgacataccgatgcgcctgttccagggaaaccccaacattcttgaggtctacatgcagagcaacagcctgcagaccttgtactcggctcagttcccggtggatcagctgcagaagctctacctcggggacaacccgctgcagtgcaactgctcgttgctgtggctctggcgattggtaaccggcaacttcgagggagtcgatccgggcatggagcacgcagccggtggtgctgtggctgctctggccaaggaagccgacgacgaggagctggcggatgaggcaaccgctgtggcatccacggacgacggagtggccgctttggctgcctacatagccgagcagcatatagtgaatgccctgcacaccaccgaacccagtgcctatgagctggccacgtcctcctcgaacagaaactccggtatcctgcgaatggatcgacagcagatcggctgcgacatctggcgggataaggtgcgtacgaggaggaagctcttgaccatgagcgagggcgagatcacctgtcccgcccacattgttactgtggtgtgtgcggtgatcacatgcctgctggtggccatgattggaatcagcgtgctgtactacctgcgctttgtcaagcggcggaggaaattgctccacgaacggggtcccatgcggaccagcaagagcatcatcaacgttcacgatcgcatcctgcagggtcacaatcccggtggcctcggcctgggcatgagcatgaccctgggtggcggtaatcatgttaatggattgggcatgaccctcaattatccgcatcatgcacaaaccctgcaggcccaccatcactaccatcaggccatgccactgcagtcccatgggggcaatggtaaccacgagtaccagcagacgactctgccacaactggacaaactggaactggagcgctacctggcggcccagaccatagccaatgaataccgggccctgaagccctgggaactgcccgtcaaggaggcggatgatgaaccggagcatctttacgagcggttcgatcactacgagtatccggacactcacaccatgagcaagctgaagcaggctgcgtccttgaaccactccaactcctcggcaggtccttcgcccgttccaccctcatcgggaaaaccgcatgtggtctacgtatgacgtgggcgtggcacgggcgagcgggtctcccagattaatacggatatagaaatggtcgggctgaaccacctccacctccaccaccaccaccacaacaacaataacaactatcggggctgtgtacagagcgccaaggccagtggccagttctgagttggatgaatcaagggggtttacacaagcaaaaacagggaaagtgagaggttagtttaaggcgagtttaggagaggatgtagccactaaaactggtagctattagtgggaaatttcgatgagattttagttagcgatctttgatcaaatgcgaatggtttttaagaaatcataagcagatgggaggctattgtatctgacccaaggtaagtgtctaaacttcaagtaaacttctgcatcgtcgagattttccactaatgcgactccatggtgatttacctttgttaactttttttttcgaataaaccacaaagtttaacaagcgtcaaatgaaacaagggatatgtctacgtgtataggaagcatacaaatactcttaactacctacggataacagatatattagaaatgtatactaaccgctaaactaagagacgaatacgatttcaaagaaaccattttgctggccccaaactaagctaagctgcattcaaatctcactcactctttctctcccactcatagttaaaatggcatttagcattcgaataatctagatagcatttagccaataagaacttacaagtgaatttaaatatatatatatgaatatatattaggtatagcgatggagcaggttgcaagctaaaggagttaatggaattttcttgatttgattcatgaatttactgaatatgtcttcaacatttgggatatacggagagaatgacacacactttggcagaccaataaactaatggggaccaaatagtccagtccagtccagcctagaactaactgaatgaatccaactgccaaagaggtttattggcatccattatcctgc

SEQ ID NO: 31463 - DNA, 1245 bp, DROSOPHILA
atgctgatgcatcgtgcagtagcctttgtggacaacacgcacctacaaacgctccacctgaacaacaatccccagctgagcgacataccgatgcgcctgttccagggaaaccccaacattcttgaggtctacatgcagagcaacagcctgcagaccttgtactcggctcagttcccggtggatcagctgcagaagctctacctcggggacaacccgctgcagtgcaactgctcgttgctgtggctctggcgattggtaaccggcaacttcgagggagtcgatccgggcatggagcacgcagccggtggtgctgtggctgctctggccaaggaagccgacgacgaggagctggcggatgaggcaaccgctgtggcatccacggacgacggagtggccgctttggctgcctacatagccgagcagcatatagtgaatgccctgcacaccaccgaacccagtgcctatgagctggccacgtcctcctcgaacagaaactccggtatcctgcgaatggatcgacagcagatcggctgcgacatctggcgggataaggtgcgtacgaggaggaagctcttgaccatgagcgagggcgagatcacctgtcccgcccacattgttactgtggtgtgtgcggtgatcacatgcctgctggtggccatgattggaatcagcgtgctgtactacctgcgctttgtcaagcggcggaggaaattgctccacgaacggggtcccatgcggaccagcaagagcatcatcaacgttcacgatcgcatcctgcagggtcacaatcccggtggcctcggcctgggcatgagcatgaccctgggtggcggtaatcatgttaatggattgggcatgaccctcaattatccgcatcatgcacaaaccctgcaggcccaccatcactaccatcaggccatgccactgcagtcccatgggggcaatggtaaccacgagtaccagcagacgactctgccacaactggacaaactggaactggagcgctacctggcggcccagaccatagccaatgaataccgggccctgaagccctgggaactgcccgtcaaggaggcggatgatgaaccggagcatctttacgagcggttcgatcactacgagtatccggacactcacaccatgagcaagctgaagcaggctgcgtccttgaaccactccaactcctcggcaggtccttcgcccgttccaccctcatcgggaaaaccgcatgtggtctacgtatga

SEQ ID NO: 31464 - protein, 414 aa, DROSOPHILA
MLMHRAVAFVDNTHLQTLHLNNNPQLSDIPMRLFQGNPNILEVYMQSNSLQTLYSAQFPVDQLQKLYLGDNPLQCNCSLLWLWRLVTGNFEGVDPGMEHAAGGAVAALAKEADDEELADEATAVASTDDGVAALAAYIAEQHIVNALHTTEPSAYELATSSSNRNSGILRMDRQQIGCDIWRDKVRTRRKLLTMSEGEITCPAHIVTVVCAVITCLLVAMIGISVLYYLRFVKRRRKLLHERGPMRTSKSIINVHDRILQGHNPGGLGLGMSMTLGGGNHVNGLGMTLNYPHHAQTLQAHHHYHQAMPLQSHGGNGNHEYQQTTLPQLDKLELERYLAAQTIANEYRALKPWELPVKEADDEPEHLYERFDHYEYPDTHTMSKLKQAASLNHSNSSAGPSPVPPSSGKPHVVYV

SEQ ID NO: 31465 - DNA, 2778 bp, DROSOPHILA
ataaaaacgctttaaatccctggaaatcgcaaaaactacgctaataacattgtcatatggcgggggtgatggtgatttttttatttccctttttttttggatttttgcactaaacttcgcttatcaaagttgaaattgcagttcgttgctgagcgcagcgcattggggatttgtcggccactcgaaaactccaaatgcgaggcatttattgtggggcagggatagaggatttcatttgaaactctgatacgaacaatcggcgttttatttgccattttggcgctcagagtttcatcatcgtacgccactgacccagttcaagcatttatcacaacggcacacacacggatacaggcgattgtcctgagggtctgaccccagcacaatgaatgaccccccatatcgcatcctcaacctcttcccccattccctaccccttctcttccactgcccgtcacactgctgactaagtggacttttatttcactgctattacggcccaagcagcgtatacgcaatgaatagtttcgctgtcaagctttcgcctttttctgccgcactcgctggccatcttcagttgctaagcgatttagatttgggcacatatctcaccgctttgggtgggttatttgctctctgtgagagataaagagccagtggctaaaactcttcagacgcttgcctgaatcgaaatcattgttaaatgcagataactactgtctggcccccggcggcgtccattcataaatttaagtccaataaacctcctcctatcacttatctgccggttcttcacctacgaaacgtcattgacttgatgacgtcatgtgtcatctttatgaaattataaataatttatttcctttggacaagcgccaaccttcaacatggaaatttcagatagataagactatctacgacttgctctgtttcccagtttattgagtattgagtagagtatgttcagtagacgaacgcctttcgagggaacaagtcggccatgagctatcagaatttactaggttttctactcgtggtgggtatcgaatatacacgaaacatcgttaaattaaaacatacaactgtacatttaaaatcagaacaaaagctttacagcaataaatcatccaacatgtgtagcttggttaattaacattttataacactcaattcatactaactatggcttgaatataaatgctttcatattattccagctgaccccttctttgatcaatacctatggagatcgaagtcgctatcggttgtatttgcaatcagattacgctctgcaaacaatcagcactcagctagtttcccaggcaatcgagctggtggactatgtggtggaagatctgatcgtcttggactcgcagaactccattctgttgggctacttggatcgcttcgatgccttcactgccgtaaatgcgaataaaacggagcagaagctaaatgccttctatggcgtgattgaggactatctagattcggataccacgggagatccactgagaacttccagtatcgagacccagttgattgcgctttgcttgcagcgcaacggattcgatcgatggaagcgcacggttcagacccggacatcccagcttcagaagctgatataccggaagttgaggaagcacctggagtccatagacagggaggatcgtttggctgtggagcgcaggtggaggaaaatcttgactcgtggcggaccccgaagattggagaagctgagggaattcgtcaaatggctgggaaatttcagagattagagtgcggcggcccgggtgaacgaattgttaggcaatacgatatgccgtttagtgataagaagagttataaacattatttatgggtgggtggagcaagagaatgtttgtggtttaaatataaccggccatgaccttgaggtattatcaatgaaagcaatataagaacgaagtttgaatttgcattaagaatgtattttagtaatatttattattgctatgttaagcagttccttggctagaaagtggatgttctttataaaagaaaacgtattcatagcatttgtaaattgaacatgtaccaacgcctggcagtaagaaagtgcatcgaagctattatccttttgtgtccttgcacttactccccctcgataaatgcaattttagcacagcacgtccccttcctcatcactcggatcatgtatgagggcattgtttaatgcacttcacagctggaggaaactttttccaggccctgtgtcgacggcaatgaaaactttgtcatgcctggcaaagaggatgataaacttgggtaaaaattatgaaactgaatatggaagcgttggcgaaattgagacagcaaaacaacagagccaacagacaggcaaaagacatacgagacttttagccaagcgaggactaaaactgaaactaaaactgatactttttatggatggcaagtgaaaaatgtagacagttgcagaacgactttccgggcgggggccaaaggcaggaggtgaacgggatttgctgggatgaaagaaaaatggcaactgcatttcctgtctgagagctgacaaagtgctgagtgcatttacgacttggacttgggcgagtgttttgtgtctttcctgcagctgcaggagatgccaggaatttatgcactcagtccatagtccacagtccgcagagaaagctctggaaattcctgacctgaggcattttctgtagggcctgggctattttctttgggccatctgataatcggccccagctgtggcta

SEQ ID NO: 31466 - DNA, 597 bp, DROSOPHILA
atgagctatcagaatttactaggttttctactcgtgctgaccccttctttgatcaatacctatggagatcgaagtcgctatcggttgtatttgcaatcagattacgctctgcaaacaatcagcactcagctagtttcccaggcaatcgagctggtggactatgtggtggaagatctgatcgtcttggactcgcagaactccattctgttgggctacttggatcgcttcgatgccttcactgccgtaaatgcgaataaaacggagcagaagctaaatgccttctatggcgtgattgaggactatctagattcggataccacgggagatccactgagaacttccagtatcgagacccagttgattgcgctttgcttgcagcgcaacggattcgatcgatggaagcgcacggttcagacccggacatcccagcttcagaagctgatataccggaagttgaggaagcacctggagtccatagacagggaggatcgtttggctgtggagcgcaggtggaggaaaatcttgactcgtggcggaccccgaagattggagaagctgagggaattcgtcaaatggctgggaaatttcagagattag

SEQ ID NO: 31467 - protein, 198 aa, DROSOPHILA
MSYQNLLGFLLVLTPSLINTYGDRSRYRLYLQSDYALQTISTQLVSQAIELVDYVVEDLIVLDSQNSILLGYLDRFDAFTAVNANKTEQKLNAFYGVIEDYLDSDTTGDPLRTSSIETQLIALCLQRNGFDRWKRTVQTRTSQLQKLIYRKLRKHLESIDREDRLAVERRWRKILTRGGPRRLEKLREFVKWLGNFRD

SEQ ID NO: 31468 - DNA, 2531 bp, DROSOPHILA
tgcatacgcttaaaaaatcatagagataaaagtgtttaaaaaaatatattaaatacgttttcgaacatttagcatatggattcaaaaaaaaaaaaagcatcattaaacagggctttgtgtttaattatgttaaaatgaattgtgaaatgttggccgcgcactttcaaaaaaaaagacgcaacaaaagccactcagatcggcgcagaaatcatcttaatatctgtgccatccaattaccaattaatcgcaatctcttcaacgtcagccactcgtgaatgaaaatccttaactaacttaatgctcggccacaatttcatgatgatgctgctgatgataatgatgatgaggctgtagccaaaggaataaatccgatccccattcaacttgaatacactcacgcgcattgattgcattttgtgtcatcccatagacttactctcgccgaactgcgtccaccatcaggcataatttacagcgcattaaaacctccgatgatgatttattgttgtcctgcctggctggctggctggctggctggttggccatgtcctgcgacctgccgatgcaccgcaaaaacatatttaaagcggcatatttatattttaatgaacctggagtggtgatataaaatcagagcttaaccatgttacaatgctcacggggcggacaaattatgaagtttttcccgtaatcagtgtgcgaatgtccgtggatgtgcgtgggtttttcgagccacacgtttaaagcctgcactgcagtgtagtattaagcaggggacatcgacaggcgattactgtagcgttttccccgatgtcgggttttggcagcaccgcgtgggaaaatcgagtttatgttatataggtttctatgtgggaagcataatatgagtagctactttttaaagaaaacttattacaactttttatctattatacacttcaacccatttactttcaaaacctgcagcaataaatcccatcttgcagaagcgcccaaggatatgcaaccgcgaatcgacgacagctcaccgtcagcggcggcaaggacactgacatcctcgtcgagcaggagcagctgggcggagaacgaaggatccgcatccggcagcgactcgctgctgacgtcgtcgacagcttcgctgctgccgccgcaggataataataggaggttgggtccaggtcctggattgctgatttttcccggcaccggtcaaagacatcagcataatccaaatggcagcacgggcagcaaaacaattgcaaaagctaatgacgggaacgcggccattaatcagccaggacccgccaggagcattcgctcctttcgtcgtcctccactgtggcagccaccgccacaggatcacgcgcaggatgggcaggaaatggaggtcctggatcggcaaaagcgaaaggattgccgtcctgcctgtttggttaaagggcaggccttcataatcgagttcctgcagggctcctccatacacggattcatttatttggccaagctcggcctgagtttcgtcgaacggtgagttttgatttgtaatccgccaatggattccattgggtaatggaattggacacacaatggagactctattcccatcggcttttaaatgaagaacagagcggactgaaactcatattgtaaatattactagaactaaagtaggaatattatgtattccttaacccgcatgcattggacaaatatttggtgtgagaatatttccactcaattaatttacaagggaaattaaagctaaacctcattacggccagaaagtagcagagaccgcagcttaactttggcacaggataaccaaagttcgccgcttagaaaccgtaaagtgccaactaaaacgataccaaactataagtcggggtcttaaaaaggactatccagcgagcgtggccacgtgcagagattccggatcggattcataacgtggctgtttcaaagggggaagtgcgtcgtgccgagcccccacatgaaagttctccaagcgaaatacatttttctacatatcttccgttttatgcggtcgatgtgggaaggtggatcttgtggtctgaagtaatatttctgctgctggaatttgtatttttgtgcggtgcaataaatccttaaaactgacatgacatgacaaacaggattacacacacactagctgtgagggtcgtggggggggggggaaattctccgccgctttcgctacctttcccttttccgtttggcaacactccaccaaagtagtcgagtggatggggctcaggatgcggatgcggtggttcgtgggaaatctgtcaggactgccggctgagggttaattagtggataacagccaggccaaggacagggccaaacaggcactgagagaataacctatatactattttaattattaaatattttattttcaatatacaattatgtgaaaaaactttatcgactaggtacgtttagttgagtttatattcatttcatgactattaacatatttttattaaataacacatcttcgtattctt

SEQ ID NO: 31469 - DNA, 531 bp, DROSOPHILA
atgcaaccgcgaatcgacgacagctcaccgtcagcggcggcaaggacactgacatcctcgtcgagcaggagcagctgggcggagaacgaaggatccgcatccggcagcgactcgctgctgacgtcgtcgacagcttcgctgctgccgccgcaggataataataggaggttgggtccaggtcctggattgctgatttttcccggcaccggtcaaagacatcagcataatccaaatggcagcacgggcagcaaaacaattgcaaaagctaatgacgggaacgcggccattaatcagccaggacccgccaggagcattcgctcctttcgtcgtcctccactgtggcagccaccgccacaggatcacgcgcaggatgggcaggaaatggaggtcctggatcggcaaaagcgaaaggattgccgtcctgcctgtttggttaaagggcaggccttcataatcgagttcctgcagggctcctccatacacggattcatttatttggccaagctcggcctgagtttcgtcgaacggtga

SEQ ID NO: 31470 - protein, 176 aa, DROSOPHILA
MQPRIDDSSPSAAARTLTSSSSRSSWAENEGSASGSDSLLTSSTASLLPPQDNNRRLGPGPGLLIFPGTGQRHQHNPNGSTGSKTIAKANDGNAAINQPGPARSIRSFRRPPLWQPPPQDHAQDGQEMEVLDRQKRKDCRPACLVKGQAFIIEFLQGSSIHGFIYLAKLGLSFVER

SEQ ID NO: 31471 - DNA, 3467 bp, DROSOPHILA
acacacacatttcagctgcatacctcagccagaaactatgtgggcattctagaatccaccaatccacaaaaaagtatgaaagcaacccttgatgctcgaattaccaacgagatattttcgacatccaacatgcatcactcggcctcattcacgcacacattttatgcatatgagtgtcgagatgatgaaacaaagcaaatacataaattgcaggccagaccgacacgagatggaaaatggcagttgcgaggggggaaatgggaaaatgggcggggaaatgggtgcgggcatgacaatgagtctgtcatatgcgatgtccgaaaggaattttgtggtgttagacaaagtacagcactcagctgtcagagaggaaaattccaacaacaaaaagaaagcggacgagaaaagagcgaaaagctgcacacaaaaataataaggagctggaaaatgtttgggaaaattaaaagccaagtagccgagtgtttgtgtgtgagcgcactgaaagctttatgagccattgctggcatcaaaatgtcattgtagaaggcattcgcctgaaatgggaaattcagcaaaggattttcggcgacttctgtctgtgtccttgccactttgtttgtggcgattcgagccgaatgggaaaactgaaagaaaagccagtaaagggttgcaaaagcgttgatgcgttcattgactcctccttcgagttggccataattctttcgccgcgaatatttcgcataatgcgaacagaaaaaatttacacgcaatagatttttatgtcctttcgccacaatgcacactcaacagcagtgcgaattattcgtcagattccatatatcatttcagagtgtgacgcatttttgcgaattttcactacgatttttatagaatttatttcacattttttagcgttctctggctggcgttcatctgcgtggcattgttcagtatcatttcgctgagcaaacgcacttggcatcgctttcagacctcgccaatggttatatccatggatcggaataagctggtctggaacaccagctttccatcgctcacagtctgtccgcataagcggatcgatgagttgaaagtggaggagtacatactgtgagttaaaaattcagtttcctaaatatgtggtataccacatttaagtgcattttttccccaatgcacccgtacagcgcccatcccgaccaattcctgtccgaggaggatcaagaggatttccgcgattttattgtgaaacttgccagcctcacttacgacaacttggagacactgccgctgaacaagtcgtatggaataccgagcaccaagtacttggaactgctctacgaattgaaatgggccttcgagccggaaatcagcagcggcgccgccgtcaaaatgttcatctacgaaacgcaaacggagtttggcatttgccattcagtcaactcgatggtggcgcgctacaattccttcgagtgagtaattgttgggcaggaagtgctcccgatttgattgccttctccttggccacttggcagctactggcgttccggcgactggagtctcatggaccacggcgaccgggtgactgttcatccgctggatggcgagatctacgcgcagattattaacctatcgaccgcctacgatgtttactttcacggtgccggcgatgttccgagtatttcgaagcaaaggtacacattcccggaaagtgactacaccaccgtggagctcatcgccctggagatctttacgaatgaggaggcgagagcgtgagtttcaagattgctaaattttaggctcaaaatatatttctttttcaatatacatatttatttattggcagtttcagtacgaagcagcgaagctgccgcttcaactacgaggccgaggaaatgatgacggtgcccatctacagttttggcctctgtctctcggagtgcaggatgttctttgctctgcgggtctgcggctgcgttccgcacttctacaggaaccgctgtgggtataatcatattttcggtacacagagttgcacttaattggcccccattaaagttaacttttatgcgacgaacggggttgcatcggagctgtccagttttatggcgaaaactcggtcgtaaaatgcttaaatactcacagtttaagtggcaacttttgcactattatctgtcccgctccagtgcactccattcgtctctttcttcaatgttttccagtgcgaaatggccggcggttgcctgtttgcggactggagggcatcggatgcctggtcaaaattaaacgtgagtaatttccaccgcaccgggaacatgcaaatatttatcgtggcccggaaattcgatttacatttttcgtctgaataaaaaaatggactgaaatttcccagaacgtgaccataatttaattttccgtaggatggtcaaaagtcaaggttgaaatagacaacctgttgcgtaattgaaaagcgggaagtaatttgctggggagaccagattacggacaggttgacgttgataagctggataaatgttttgaacaaaaagcttgtgttctattagaatattaagtataatatctaaaaatataaatattatatggacgatgctttcactaaatagcagttgattaaagttacctatacctaaagcttaacataatataaattgttattaaccttttgttttttccttcaggcgaaataatctcattgaaatcggacaaatacaaaatcaattgcaactgcttggccaactgtgatgattccaatttctttgtgcaatcctatgtaagtacatcgcacataataataaaaataaatgaaaaaatggcaaatcccctattaaaaaatataaagtaaactttaactgtaaaaatgtttatggcgaacagaagcgccatctagcgctcgttaagtggcaactgcagacgccgctgcgtcgcgcatttcaagtggaaaaatgcccggaaaactggggaaaatccgccggagggagagagccgaagagccggagagcggggtcttgtgccttaaacaaacatcaaaattgtagtccggggctataaaaaataataagcgcagaagttgcaggaactgggagccttgaaatatgcaattattttggggatgaggcgtacgaaaaggggcggcaaaccaaaagttttgtttacctttttttcgcgctgtgtgcggcgaaagtttttacatttaataataatttttgcttacttgccttgttaccagaatactgatgatgttgttcccattgcgctttgttgctcttatcttatatatataccgtatcattatgtgttttccttatttcccctctatttcccgaattttccatagcgttcgcgtgtctggtttttgggagccaatttgcagtggggtattttggagcacccaaaaatgcaggtaaaggctaatcaataggatttgtaaattggttatgatatatgtt

SEQ ID NO: 31472 - DNA, 894 bp, DROSOPHILA
atggttatatccatggatcggaataagctggtctggaacaccagctttccatcgctcacagtctgtccgcataagcggatcgatgagttgaaagtggaggagtacatactcgcccatcccgaccaattcctgtccgaggaggatcaagaggatttccgcgattttattgtgaaacttgccagcctcacttacgacaacttggagacactgccgctgaacaagtcgtatggaataccgagcaccaagtacttggaactgctctacgaattgaaatgggccttcgagccggaaatcagcagcggcgccgccgtcaaaatgttcatctacgaaacgcaaacggagtttggcatttgccattcagtcaactcgatggtggcgcgctacaattccttcgactactggcgttccggcgactggagtctcatggaccacggcgaccgggtgactgttcatccgctggatggcgagatctacgcgcagattattaacctatcgaccgcctacgatgtttactttcacggtgccggcgatgttccgagtatttcgaagcaaaggtacacattcccggaaagtgactacaccaccgtggagctcatcgccctggagatctttacgaatgaggaggcgagagctacgaagcagcgaagctgccgcttcaactacgaggccgaggaaatgatgacggtgcccatctacagttttggcctctgtctctcggagtgcaggatgttctttgctctgcgggtctgcggctgcgttccgcacttctacaggaaccgcttgcgaaatggccggcggttgcctgtttgcggactggagggcatcggatgcctggtcaaaattaaacgatggtcaaaagtcaaggttgaaatagacaacctgttgcgtaattga

SEQ ID NO: 31473 - protein, 297 aa, DROSOPHILA
MVISMDRNKLVWNTSFPSLTVCPHKRIDELKVEEYILAHPDQFLSEEDQEDFRDFIVKLASLTYDNLETLPLNKSYGIPSTKYLELLYELKWAFEPEISSGAAVKMFIYETQTEFGICHSVNSMVARYNSFDYWRSGDWSLMDHGDRVTVHPLDGEIYAQIINLSTAYDVYFHGAGDVPSISKQRYTFPESDYTTVELIALEIFTNEEARATKQRSCRFNYEAEEMMTVPIYSFGLCLSECRMFFALRVCGCVPHFYRNRLRNGRRLPVCGLEGIGCLVKIKRWSKVKVEIDNLLRN

SEQ ID NO: 31474 - DNA, 3080 bp, DROSOPHILA
ttctggccgaaaacgatattctgcttttttaactgaagtatttgcttagctattttgagacacagcaagtttcctaaaaagtcgctcccttagtaaacaaatttagttattccaattagttaacaattaagttaacatttaactgacttttgacttgagctgagtttttaaaatcgacccaccattatctcgacacaaatttatctgagtgtatattccatatagtgtgtaaccacttacaacgaagtcagagcgagtgcaagaatgcaccagagattgttgtgtgattttatgtaatatgcttgaatttataattagtttctagttaacgcataggagatcgattcgatacaatacgcttcagcatcatcatttcgttgcggtagtttatgcataagcttacatttaaacaaactaccgactacctactaagataagcaaccaagaggtattttgataagaacaatccaaacacacgagctaaaaccacttgaaattgcaaaacgaaaaatagctgaataaatgaataatttttagataactactttgatttgctttttgataagtagaccgacgaacaacttttattttttacatttgaaccttcaatactctataaaactcattgtaccatacaacacgtgattcatatcaaaattcaagttaaccgttttataaacctattaatttataatttttaaaactgaaaatacaaattttttcatatataagtagttgttttattttattttaatttttttatttagttttgaagttatattttaattaagtaatattacatttaagcatgaacatacttttctacgttttataagaagataaataataatagctaaaaacccttgatgcaagtgagtcccactgttgcgttcgttgcgtgtcctttagaaagtccctggagtccttttagtttgctttaaaatcaactattatgttggattcaattctagctttagtttcgctttcaacgtccagaacaatgaatcaatactttttgctgcatacttactttcaagtgagccgcttgataggactctgcaatctgcactacgattcctcgaatcatcggttcatcctcaatcatgtgcccacagtggtttactgtgttatcctgaatgtggtctatctcttggtccttccatttgccctgttcgtgctaactggcaacatttaccattgtccagatgcgggcatgtttggagtggtctacaacgtggtggctctgaccaaactcctgaccatgctcttcctaatgagcagtgtttggatacagagacgtcgactgtataagttgggaaacgacttaatgaagatgttgcacaaattccgatttaaccttggaaacgattgcaggaatagatgcctgtgcaagggtctgctgaccagctctcgatttgtgctcctaacccagcagctgttgacccgggattcggtggttaattgcgagagtaactccagtttgagacaagctatggttccgtaccaaagtgctgccatagtgtatgccttaatcatgattctattaatgagctatgtggatatgacagtctatatggtcgaagtggctggcaattggctgctggtaaatatgacccagggggttcgggaaatggtccaagatctagaggtcttgcccgaacggaatggcattccgcgggagatgggactgatgcaaatccttgccgcctggcgaaaactttggagacgctgtcgccgtttggatgcgttgctcaagcagttcgttgacatcttccagtggcaggtgctcttcaacctgctaaccacttatatattcagcattgctgttttgtttcgattgtggatttatttggagttcgataaaaactttcatttatggaagggcatattgtatgcgattatttttctgacccatcacgtcgaaatcgtaatgcaattttccattttcgagatcaaccgctgtaagtggttgggacttttagaagatgtcggaaatctgtgggacatcaattattcgggaaggcaatgcattaaaagcagtggaacgattctgtcaagaaaggtaaatattttgtattgaattcatagtgcaaagataatgactaacgctttattttagttagagttttccctgctctacatgaatcgcaaacttcaactgaatccaaaacgtgtgagacgtctgcacatcgttggattgttcgatttgagtaatttaaccgttcacaacatgaccagaagtataataaccaatgtgttagttctgtgtcagattgcctataaaaaatatggttgaaaaataatgtgtgtaaagttatccaattaaatttcaatatcaagtaatttgacaaaatgtttttgggttcgaaggtctgctaaaatcttccaaattttatataaaacattatatatttaagctttatagaaaacaaggaacatatgtatgtatttatttctagctggccccaatacataactcttttggagacatcttaaaattatccgctatacaagaaagccacaaaatcatagctttcaattcgaatttgatatcctataaaactcccatgactgagagtcctgtaagctgcgagaaagctttctattttcgtgtaaagttctgaaagcttgattgatttacgtttatgtatcatatcaaggtaaaaaaaaaaaccgtgtataaatggtgaacatttaggtagatagatataagatatatgattttctttacacttttgttttgttcttcatcaaatggatgagatattgacgatcattgatgggttgtctttgccgtctcaaatcgaactgcatgaggataatgacgttgctcagaatggagccaatataactaaggcaagcgggtttgtccagctccacaattccgcatattttgtagaccaaccgattctgcctcagctgcatggtaaaaacatccaactaagtggaatattgtttagtatatattaaattttgtttgaggctgagcacactcacctccctttgcatctttggacccacttttggtagatcgctaagttgccttagttgctggccagtgttgttgcaggaggtcacca

SEQ ID NO: 31475 - DNA, 1080 bp, DROSOPHILA
atgaatcaatactttttgctgcatacttactttcaagtgagccgcttgataggactctgcaatctgcactacgattcctcgaatcatcggttcatcctcaatcatgtgcccacagtggtttactgtgttatcctgaatgtggtctatctcttggtccttccatttgccctgttcgtgctaactggcaacatttaccattgtccagatgcgggcatgtttggagtggtctacaacgtggtggctctgaccaaactcctgaccatgctcttcctaatgagcagtgtttggatacagagacgtcgactgtataagttgggaaacgacttaatgaagatgttgcacaaattccgatttaaccttggaaacgattgcaggaatagatgcctgtgcaagggtctgctgaccagctctcgatttgtgctcctaacccagcagctgttgacccgggattcggtggttaattgcgagagtaactccagtttgagacaagctatggttccgtaccaaagtgctgccatagtgtatgccttaatcatgattctattaatgagctatgtggatatgacagtctatatggtcgaagtggctggcaattggctgctggtaaatatgacccagggggttcgggaaatggtccaagatctagaggtcttgcccgaacggaatggcattccgcgggagatgggactgatgcaaatccttgccgcctggcgaaaactttggagacgctgtcgccgtttggatgcgttgctcaagcagttcgttgacatcttccagtggcaggtgctcttcaacctgctaaccacttatatattcagcattgctgttttgtttcgattgtggatttatttggagttcgataaaaactttcatttatggaagggcatattgtatgcgattatttttctgacccatcacgtcgaaatcgtaatgcaattttccattttcgagatcaaccgctgtaagtggttgggacttttagaagatgtcggaaatctgtgggacatcaattattcgggaaggcaatgcattaaaagcagtggaacgattctgtcaagaaaggtaaatattttgtattga

SEQ ID NO: 31476 - protein, 359 aa, DROSOPHILA
MNQYFLLHTYFQVSRLIGLCNLHYDSSNHRFILNHVPTVVYCVILNVVYLLVLPFALFVLTGNIYHCPDAGMFGVVYNVVALTKLLTMLFLMSSVWIQRRRLYKLGNDLMKMLHKFRFNLGNDCRNRCLCKGLLTSSRFVLLTQQLLTRDSVVNCESNSSLRQAMVPYQSAAIVYALIMILLMSYVDMTVYMVEVAGNWLLVNMTQGVREMVQDLEVLPERNGIPREMGLMQILAAWRKLWRRCRRLDALLKQFVDIFQWQVLFNLLTTYIFSIAVLFRLWIYLEFDKNFHLWKGILYAIIFLTHHVEIVMQFSIFEINRCKWLGLLEDVGNLWDINYSGRQCIKSSGTILSRKVNILY

SEQ ID NO: 31477 - DNA, 11367 bp, DROSOPHILA
ttaattcgcattactcacaactccctccagtttccggggactcgttgcgaatctttccagtaaccgcctacatgtcttgtggttattgtgtaatttgccattaaatcgttgtcaaccacttaattgttcgctataaatctaaaacgaaattgcttatcgctggtcggaccaaaaagtcggcaattaaaagcaaatcaaatggacttgcggcaacttttccgccacagaaagttgtcttttcattggttaccaatcttgatggcaatttttggacgacaaaactgtatttctcggcaggagtcgtctggattaagttgtgcgtttctacgttcctttgttatgccgaacgaatttcaatttgctttaaacttcactaaagcaacacacaacgcatcgccttctgcatttgcattttatttccaatggctgcgtttcgcaatttcttggcaacttttttcccttccattgttttttggcttctcgggaggagaggcaatttcacttttcaactttattcgagcgaaaaattgacgtggaaatagtggataggcaaaggggaaaatctgtctggcatatctcagcggagaaaggtcgtggaaagtggaaaggagttccaaggtagacaggcgttaaggctttcaaaaaagaccaaccaagtgtggacagggcataatgtaaaataaatagagaacttatacactgagaaagtcagatacaattactttgttttgcaattttccaaacggcattacataattatcaaaactcattttaaccaatccctttctttaagtaagctaagaagttgagaaccatttaaattgttcgatattttcgtttggtttatttacaaatcgttggtagatcgagcgatgagtccaagcgacccatcgcgctcagcacagcaatataattatataagcatactctatataaatctacttaactagatggcggaaatggaactggaactggatgggttttgttcttaggacatatcctacagtcgctgagttgagctgatcaaccaggcgacgatgagggtgagacccaatcccattccggacagtccgcccgctgaaccggtaagttcgatcgtgttgcaaccatccgtggaacacttattgcagtgatcctcattgtctatctcgcactccaattcgctggcacatccgcgccgcaggaggccgttgttaagagatgtcacacattcgtcattcgccgcgtaaattgggcacacggccaaactgctgggatgctgggcgcaaagtgggtcatcaatggagttgcagatgtagcagcgtcgtcgattgttggggaagatctcgacgttgcacttggctccggagcaagcggagcaggtgccatctgccacacagctgctgctttcggtagagctcacttcactcctgcatccacggtgcgtatgtccgttctccagacgagtgatacaatcggagttgggggcatgacaggtaatggtggtcaggacagctgtgggatcctgtgcacactccaaggtcttgctggaatcacaggatagacactctccttcggtgggcagtcggctcagttcgttgcattcgctgccctggcaggaatacaacagattgccctcctgccattgctccaagctggactcattctggctactggcacaacccatcagctccaccttaccatcagtggcatacttggcgaaacagtagtcattcgttttgtaggccaaacaggcttgggactggctgctcgaacaagtgtcatccaagcatgtgtggcaactaagtcgatcagcaggatacgagaaggtattacattctgcgccggagcaggtggcacagttagtaccactctcgtcggtggtgcaatcggagcggtcatacagctccttgtcgtccaagcaggatcgaatcaaatcctctccactcagagccaccaagcactgacccttgcaattgcgcttgctcaggtcagattcagtgggatcggtgacacagctcgatttgttggccgaattgcagaaagtacagctcacatactcctccgtggaccaggcgtcattgcactcgttcgacttgcaggtgaaacacaaagcgggattctttcggcaatagcgatcctcgtagtcatccacatcgtctgagcaacccctcctcctcaccgacacgccatcagcctcaaagacagtcttacaatcctgctcgagattcagcgaacaggtaaccgcaggtcccagcgaactcagacagtgttcgcccacacaagtgtggcacttcaggggcaaggactggtacaagccgtgctgaccatcgtccacccggttggccaaatcgatggcattgcactcgctgcctgaacaactgcggcagttgcggaagtcactggaatcgcactcgacgctgctgctgcaaccgcgggttgtaacatttccggaaagcagcgtcttgcaggtctcagtttcgctgacccacagacaggccaaggtgtacgagggatccgattcacaactggagtcatccgcagaggtgcaggagtagcacacttggcgatcagcagggaagatcttagaaatgggggaaaatatttttatctttctaagtttaaatgtggttttttgttgtttagttacctcacgattgcatccatcgaccgaacacacggtacagttggcatcgcttcctaaaagacacgcagcaaaatcagtctggtcgagatcgtacaggcagccacgttgggttgaaccatctaggaagaagtatatatggattgattaaggaaatctttgactgaaaaccttctttccaaacgtaccgttctccaatctggtgaagcatcctgtgtggggcaactgactgcaggtgctgaaggttccaatggcgtaggcatcggttgcgcaagagggatcctcacgagagtcgcagacggcacatcgcacgggggactggagttggggaacattgcagttggtgccattgcagacggaaatgcgcttcgtcttgataatggcctccagatcctggttgcggaaggagctcagacagccgagttgcttcagatcgttatcctcgtccacccagaggaagcagctatcctcgggcttatagatggtacaggtcttgggctgtggatcctcgcaatcgtcaccctcgcaggtgtaacagctgaggcggtcttcgggcaaactctggacattgcaggagtcaccgctgcaggcggcgcaggtggaatccgagccgttggcacagatcagctggtcagacgcctccttgtcatccaaacaggttcggatgagatccaggccagcatctgcgctgccatacagagcagtcatacattggccctggcactgacgagtcctgtggctggcacttgtgggttcccacaagcaggaggaatccttgtaggagtcgcagtaaatacaggtggtgtactgactcagggcagtggcattgttgcagttgttggacttgcaagaggggcagctgccggcattggtaccacaatatgtggagatggtggcatccgcttcgacctcatcctggcagccgcgtctggttactgttccatctgatccaaacactgtcaggcagtcctgctcgttgttgttctggcacttgatcgaggcaatctcctcctcctggcagccggtaccctcgcaggtaagacactccagaggcagatcctgccactttccaatattgtcatcggacttggcggccaaatcgatctcattgcatccatcgccctcgcagtagacacaagtcttggcattcgcctcgcaactaagcgaggaggcgcagttcctgtaggtcaccccattcctcagattggtcacacactggtcatctgcatcgtacagatagcacacggtaaggctactggggttgttttcacaattggcgtccgttgcggagttgcaaacgtggcaggatcggcgattacttggataaaccagttgattgcacttatttccctggcaggagttgcacgaggcagaggtgctgttgtaacacgagaggaactcgtcgtcctccaggctggagagacaacctctctctgtgctaccatcggacaggacacgggaatagcattcagggaagccacccagagtacaatctgtggaggaaacgacacttgagggacttatcgcacagttggcctcggtacgcgagctgcacagagtgcaagtctgagtttctggcacggattcaatggtgttgcaatcgttatcgctgcaggtcagcaatctcttggagcgcttcagcagatagatatcgtcgtggctcaattcactcagacagccgagtgaggtgatcgacctctcctcatcgaactgaatgtagcactcatcgtgctctctgtaattggagcaactgctagcctgtggactctggcactcatctccctggcataccaaacaactatgccggctggccactaagtcctcggaattgcacttggtgccttcacaagtggcgcagaacctcttgctaccggctgtgcaggcatcacgatcctccttttccaagtcatcatagcaattgcggattagcgcatagctgggatcctcagtttcgttgaagaggggcaggaaggcagagatacaacgttcatggcactggcgtgtcttcgtgatttgcgtgggatcactaacacaattcgagtccacactggaatcacaaacgatgcattcaacatatttatcctgggagtcggcagtgttgcagccattggaattacaacgggggcagtaggcgggattttcatcgcagtagtcggactcctcgaagacggactcagagcaacctctttgagtaactgaaccggaatcactgaacacggtcacacagttatcatatcccgagcacttcgttagggtacctccactagaagcacaatctgttcccgagcacaccagacactcaatggggacatcttgccaggctccgggaaagccatcctctccaattttctcaaggttaatggtgttgcaaccatcggcggaactgcagacgcggcacgtcctggaatcggagggatctgagcaggtgagtgatgaactgcatcctcggtgcgtaatgccattcaacaatgtggttacacaggactcgtcctgggaataaatggggcacacagtgctttcaagagtagctggtgaggcggcacagttggggtcactggtggaattgcactgataacacttcctacgatcggcggggaacacggacaagccgttgcaacgttctccagtgcaagtttcgcagagttttccatcgccagtgagacactcgtagaaatcgtctccacccaaactggacatgcatccacgaatggtgttaccctggctatcaatctgggtaacacactctgtgtacggaatctgggaacaaatatttgtagtggtcaactggttcggatttgtggcacatcgaggatcatccgtagatgtacattgcagacaagtgttgggatcgggtgtaatgctgtattcgttacacttttgtccggaacacagaagcaaacgttgctgggctaccagttccttgataacctgcacttcaaactcactagcgcagcccatggccaccacaccagagtcgtcgtaagccaaatagcattggtcattctcccggtaggccacacacttcgatgtcgtcgggtcttcacagaacggatctttgcaagtgtagcactccagtgggttcgcaatgacatcttcaccattgcagagcgatccagtgcaggcggtacaattggaatgagttcccgctgcgcaggatgttcgttccgcttcgttcaggtcgtccaggcatccgcgagtcggcagcagtgcggagtcccaggatgagctgcgaggatacaatcccgtcatgcactgaccctggcactttctggtactttctggcttctcccaagcgcagttcacatcatcctcggcatcacagaagtagcaatccacatacgagtcgaaggagacggcgttattgcatccatccgacttacactgtacgcacttgtcgccgttcaaatcgcagtagtccacattggcagccaagacagcgtcactgcatcctctggccaccacttgaccctcggaattgaaaaccgtggagcacgtctgcttgttgttaccctcacacttcgtgatctccgtacccactgttgcacaactggctgcatcgctacaaacgtgacagctcagcggaagatccgtccactttcctggctcaccaacgtagctcgactgaagatccacagtgttgcaattggcttcggagcacactcggcagctacccgcctgagatgcatcgcaattcagctccgattggcagccacgacgggtacgaccattggacagagaagtgacacaggcatcatcctcggaataggtacgacagtagctcgaatagcttgccggattcagggcacaatccgcatcgctggcggagtcgcaacgcaagcaagttagccaattcgagggatacacgtcgttgttgcaattattcgtgctgcaaatggtacagttggtgctgccatcgctggagcattcatcgaacagctcatcattggtgtccgcaagacaaccacgcagcaaaacgccgtcctcattcagataactataacactccggattgatgtagtgttcgcaaacagtagccaaggccgagttacctccaacacatccatcatcataagtagaattacagacattgcacgaaacgccattcaaattcagcttatccttggtattgcaatcgtcgccggagcagagatagaggtccctgcgattggttaacaggaacgaatcctgcaaatcggtggcacaacccatagccttgatactgagatcgcccacatgtatgtagcattgatctcccgatcgatatcccaaacaaagttgactggtaagcgtttcacaagcgtcatcctcacagacattgcagctgagacgatcctcgggaacatcagctttgttgcacgtggcgctcgagcaggaaacacagttctccagggttccggcagagcatgcctcacgatcatcgtaatcgaggtcatccaaacagccgcgagccagatcgtaaacaggattggcctccgatcgattgcggggatacagaccagttaagcagctgccctgacaggacacagttcgggttatatcgcccacttttcgcacacattcggcttcatcgcttccatcgcagaacaggcaatccacataggtgctcaactccttggcgttattacaaccgctggacttgcagaacttgcagttggcagagttttcatcgcagtattgaagaagctcagcatcctcgtatagtgtgtccgagcaaccccggaagatcaccgaaccggaggcatcaaaaacagtgccacaattctgttcatcattacccgtacacttgcgtaaggtgcccgagctgtctccctggcaatcggtgccgttgcaggtatagcaattgactggcggagttagccacttgctcggatatccaatgtaggagttgaacagatccgccacattgcaattgtccttgcctgagcataggcgacagtgctgtttgtccgaatcgtcgcaggtgaactcccgctggcaaccacgataggtttctccatccaccaacttggcactgcatccttcgtcttccagatagtagggacacacctccgccgcatcgggagcagatgagcatgtgggatcggtgactgagttgcagcgatgacaacgacgacgatccgcgggatatatttcggagttacaacgatcgccagtgcaaaccacacagtttcctgttccatcgaggcactcttgcaattgctcacgttctaagctgctcagacaactacgctgggttctgccacctatcagagacaaaagaggattacaccattaatttatattatatatagttttatatagtaagaaatactcacttatgatgcgtgtctgacagctggtatacggcaggactccacaatttccaattagtgtaatttttgaaggatccgtagcacagttgggatcttcggaagaatcgcagacgatacactcgtgtggtgttggtaggatatcaaagaagttgcagtcgttgtcatcgcagaagaggagagagtggaagttttcatccacatactcctcatccaaatctgacaggcagcccatgcctgtgatatctgcattatagtcaaagagaatatagcaacgatcatcgggactgtactggctgcactggctggccttcgggtcatcgcaatcggatcccgagcatttgtagcaggactgtgagatttcggatatattgtccacattgcaattggctccggagcaggctatgcaagccgcatcggtgccagcaatgcaggccgcctgatcctccggatccttgtcatccaaacatcctcgcacagtgtcgtaaatgaagttctcacttgatctcctgcgggaaccagtaaaacactggccattacaaaggcggcgggactttacatttgcggcattggtggcacaatcttcgttctcgtagtcgcagtagatgcattcggtgtagctgtccagagatctggcactgttgcatccattggagttgcaattgtggcagcttccggcattggcatcacagtaactggcccaggtctgctcaacctcctggctacaacccttagccgacacagatccattcgcactgaatactgtcacacaatagtccgaattacttgagcaagttgtattcgatagatcactggcggcacaactggcggcatccgaacagctctgacagctaaggggcaaatcctgtccccacagtcctggctggccatcttccaacctcttcaggtttccggtattacaatcatctccagagcagacctcacactttttggggttactggactcacactccacggatgcactgcatccacgttgagtattacccaagagatctataacagttatgcactgctgattgggtgtatgcagaagacagagggcagaggcggagggcgatccctcgcaggaggcatcttcaccggaatcgcaaatctgacagctcagtcgctccgtgggttggagctgcaatatatgaattaaatatatataaaaagctcataaaatatccaactccatttgaaacacaacccaccagctcgttgcacaactctcctgtgcatctgctgcacttggtgatattgctgtccttgaggcagtccaggtaatcctcaccctccaagctggtcaagcagcccctctccgtgtgtccattatccaggatccttgaatagcaatcggtgttcacgagactttcacactgtgtatttgtttccacattctcgggggccacggcgcaatcctcatccgtttgggagttgcacagcttgcatgtttgtggctttgccagagcagattccacattgcaattgtcaccagtacagtaccacaactgcttgttggtttccaagagggtaacatcgctcacattgtattgacttagacatcccatttcgtagatagctccggattcatcgaattcgatgaagcagctctctggcttatcaccagatgggacagctcggcaggttttcgattggggattgctgcagtctcctttgcagacattacagcttccacggacacccaaatccactgtgttacagcttgctgcactgcaagcaacacaattttcgagggatccttcggaacaggcctctcgatcgtccaaatccagatcatccagacaactgcgaaccaattccaagggagcaccctcttcactgtttgtggggtaaagtgctgtcatacattgttggttgcacttccttctctcggtcacaagttcaatgtcaaagacacagttatcatcgctctgggcatcgcaaaccacgcaatccagcaaattctcctggctattcaggaagttgcatccgtgggatcggcactcatagcaattatcgccgctttccgtgcaaacggatgctaaattatcgctacaccctctctcaatcacagcaccatcgctgttgaagatggccacacaactttggccatcgttatccagacattttcgcaggactccagatcctgcagagcactcatcgagtgtggaacactcgtagcaattgatgggacccgaatgccagttatgggttaaagcatctgccaatgatagatgattgtataaatatcattactacgttactatgctataacatgatcaataaccaagatatttctgagttcaaataagcctaatccacgcgcctctcatttcagcaagtaagccaaatcctagctggaaaatacgttgataaacgtataattaatgacactgcggcttgttacgtattaaagagtttatgggccacatgataatcgaatttcgtgttatttatgactaccgatgtctgaaggctgccgttaccacatcgttgcgatctttttctccgtaatcagcctataaattaataaattagtaattgctctctgatccataaaacggccaattcaataccgatcgccaaacacaatctactaagaaacgtgttcttctactatgaaaagagaaagttggtcatttcagttggtttacgattactatatcaaggcaaagtgggcattaattacatatattttatatacttatatgcatagattagttttagatgtagtatccatcaagaaaatgttttcaaaccacttatttggattcaacacgacaaagtccaaaagcaacttctaatcttttccttgaattaatccacctaaatcaaaatgaatggatttttaaggcacttgaaaatttcgattaagattgctggtgtttcgcaacgttatgaacacactaaaataactactacgaggaaaggcatactttgaacgaataagagttacatgcttatgtcacatcatggagtgcagtttttattggtagtagataaattttttatatacaccatataaaaaagcatggctatgagtcataaatgtcggcgcgattgacggacatacacttgttatattcattgtccgatagcgaataacacgagcagatacttttggtagattagatacgttaatcttcttttctattttttctttattgttcattttatttcccaaagaatatttcgtttctggtaagttgtactacatgtattatgtaagtaaattaagttaaaactatagcaatgtgtattgctacaatatgttgccatttgactgtttgcgtatccttcacgtcactatttttcatatatttcttttaaagaaagccgttgcatagaaaacaccaaatgtatctgcgtttatattattcgctgttttatatatatattcctttttttttattggtttagttttcggtagtt

SEQ ID NO: 31478 - DNA, 8796 bp, DROSOPHILA
atgtggcccataaactctttaatacatgctttaacccataactggcattcgggtcccatcaattgctacgagtgttccacactcgatgagtgctctgcaggatctggagtcctgcgaaaatgtctggataacgatggccaaagttgtgtggccatcttcaacagcgatggtgctgtgattgagagagggtgtagcgataatttagcatccgtttgcacggaaagcggcgataattgctatgagtgccgatcccacggatgcaacttcctgaatagccaggagaatttgctggattgcgtggtttgcgatgcccagagcgatgataactgtgtctttgacattgaacttgtgaccgagagaaggaagtgcaaccaacaatgtatgacagcactttaccccacaaacagtgaagagggtgctcccttggaattggttcgcagttgtctggatgatctggatttggacgatcgagaggcctgttccgaaggatccctcgaaaattgtgttgcttgcagtgcagcaagctgtaacacagtggatttgggtgtccgtggaagctgtaatgtctgcaaaggagactgcagcaatccccaatcgaaaacctgccgagctgtcccatctggtgataagccagagagctgcttcatcgaattcgatgaatccggagctatctacgaaatgggatgtctaagtcaatacaatgtgagcgatgttaccctcttggaaaccaacaagcagttgtggtactgtactggtgacaattgcaatgtggaatctgctctggcaaagccacaaacatgcaagctgtgcaactcccaaacggatgaggattgcgccgtggcccccgagaatgtggaaacaaatacacagtgtgaaagtctcgtgaacaccgattgctattcaaggatcctggataatggacacacggagaggggctgcttgaccagcttggagggtgaggattacctggactgcctcaaggacagcaatatcaccaagtgcagcagatgcacaggagagttgtgcaacgagctgcagtgcataactgttatagatctcttgggtaatactcaacgtggatgcagtgcatccgtggagtgtgagtccagtaaccccaaaaagtgtgaggtctgctctggagatgattgtaataccggaaacctgaagaggttggaagatggccagccaggactgtggggacaggatttgccccttagctgtcagagctgttcggatgccgccagttgtgccgccagtgatctatcgaatacaacttgctcaagtaattcggactattgtgtgacagtattcagtgcgaatggatctgtgtcggctaagggttgtagccaggaggttgagcagacctgggccagttactgtgatgccaatgccggaagctgccacaattgcaactccaatggatgcaacagtgccagatctctggacagctacaccgaatgcatctactgcgactacgagaacgaagattgtgccaccaatgccgcaaatgtaaagtcccgccgcctttgtaatggccagtgttttactggttcccgcaggagatcaagtgagaacttcatttacgacactgtgcgaggatgtttggatgacaaggatccggaggatcaggcggcctgcattgctggcaccgatgcggcttgcatagcctgctccggagccaattgcaatgtggacaatatatccgaaatctcacagtcctgctacaaatgctcgggatccgattgcgatgacccgaaggccagccagtgcagccagtacagtcccgatgatcgttgctatattctctttgactataatgcagatatcacaggcatgggctgcctgtcagatttggatgaggagtatgtggatgaaaacttccactctctcctcttctgcgatgacaacgactgcaacttctttgatatcctaccaacaccacacgagtgtatcgtctgcgattcttccgaagatcccaactgtgctacggatccttcaaaaattacactaattggaaattgtggagtcctgccgtataccagctgtcagacacgcatcataagtggcagaacccagcgtagttgtctgagcagcttagaacgtgagcaattgcaagagtgcctcgatggaacaggaaactgtgtggtttgcactggcgatcgttgtaactccgaaatatatcccgcggatcgtcgtcgttgtcatcgctgcaactcagtcaccgatcccacatgctcatctgctcccgatgcggcggaggtgtgtccctactatctggaagacgaaggatgcagtgccaagttggtggatggagaaacctatcgtggttgccagcgggagttcacctgcgacgattcggacaaacagcactgtcgcctatgctcaggcaaggacaattgcaatgtggcggatctgttcaactcctacattggatatccgagcaagtggctaactccgccagtcaattgctatacctgcaacggcaccgattgccagggagacagctcgggcaccttacgcaagtgtacgggtaatgatgaacagaattgtggcactgtttttgatgcctccggttcggtgatcttccggggttgctcggacacactatacgaggatgctgagcttcttcaatactgcgatgaaaactctgccaactgcaagttctgcaagtccagcggttgtaataacgccaaggagttgagcacctatgtggattgcctgttctgcgatggaagcgatgaagccgaatgtgtgcgaaaagtgggcgatataacccgaactgtgtcctgtcagggcagctgcttaactggtctgtatccccgcaatcgatcggaggccaatcctgtttacgatctggctcgcggctgtttggatgacctcgattacgatgatcgtgaggcatgctctgccggaaccctggagaactgtgtttcctgctcgagcgccacgtgcaacaaagctgatgttcccgaggatcgtctcagctgcaatgtctgtgaggatgacgcttgtgaaacgcttaccagtcaactttgtttgggatatcgatcgggagatcaatgctacatacatgtgggcgatctcagtatcaaggctatgggttgtgccaccgatttgcaggattcgttcctgttaaccaatcgcagggacctctatctctgctccggcgacgattgcaataccaaggataagctgaatttgaatggcgtttcgtgcaatgtctgtaattctacttatgatgatggatgtgttggaggtaactcggccttggctactgtttgcgaacactacatcaatccggagtgttatagttatctgaatgaggacggcgttttgctgcgtggttgtcttgcggacaccaatgatgagctgttcgatgaatgctccagcgatggcagcaccaactgtaccatttgcagcacgaataattgcaacaacgacgtgtatccctcgaattggctaacttgcttgcgttgcgactccgccagcgatgcggattgtgccctgaatccggcaagctattcgagctactgtcgtacctattccgaggatgatgcctgtgtcacttctctgtccaatggtcgtacccgtcgtggctgccaatcggagctgaattgcgatgcatctcaggcgggtagctgccgagtgtgctccgaagccaattgcaacactgtggatcttcagtcgagctacgttggtgagccaggaaagtggacggatcttccgctgagctgtcacgtttgtagcgatgcagccagttgtgcaacagtgggtacggagatcacgaagtgtgagggtaacaacaagcagacgtgctccacggttttcaattccgagggtcaagtggtggccagaggatgcagtgacgctgtcttggctgccaatgtggactactgcgatttgaacggcgacaagtgcgtacagtgtaagtcggatggatgcaataacgccgtctccttcgactcgtatgtggattgctacttctgtgatgccgaggatgatgtgaactgcgcttgggagaagccagaaagtaccagaaagtgccagggtcagtgcatgacgggattgtatcctcgcagctcatcctgggactccgcactgctgccgactcgcggatgcctggacgacctgaacgaagcggaacgaacatcctgcgcagcgggaactcattccaattgtaccgcctgcactggatcgctctgcaatggtgaagatgtcattgcgaacccactggagtgctacacttgcaaagatccgttctgtgaagacccgacgacatcgaagtgtgtggcctaccgggagaatgaccaatgctatttggcttacgacgactctggtgtggtggccatgggctgcgctagtgagtttgaagtgcaggttatcaaggaactggtagcccagcaacgtttgcttctgtgttccggacaaaagtgtaacgaatacagcattacacccgatcccaacacttgtctgcaatgtacatctacggatgatcctcgatgtgccacaaatccgaaccagttgaccactacaaatatttgttcccagattccgtacacagagtgtgttacccagattgatagccagggtaacaccattcgtggatgcatgtccagtttgggtggagacgatttctacgagtgtctcactggcgatggaaaactctgcgaaacttgcactggagaacgttgcaacggcttgtccgtgttccccgccgatcgtaggaagtgttatcagtgcaattccaccagtgaccccaactgtgccgcctcaccagctactcttgaaagcactgtgtgccccatttattcccaggacgagtcctgtgtaaccacattgttgaatggcattacgcaccgaggatgcagttcatcactcacctgctcagatccctccgattccaggacgtgccgcgtctgcagttccgccgatggttgcaacaccattaaccttgagaaaattggagaggatggctttcccggagcctggcaagatgtccccattgagtgtctggtgtgctcgggaacagattgtgcttctagtggaggtaccctaacgaagtgctcgggatatgataactgtgtgaccgtgttcagtgattccggttcagttactcaaagaggttgctctgagtccgtcttcgaggagtccgactactgcgatgaaaatcccgcctactgcccccgttgtaattccaatggctgcaacactgccgactcccaggataaatatgttgaatgcatcgtttgtgattccagtgtggactcgaattgtgttagtgatcccacgcaaatcacgaagacacgccagtgccatgaacgttgtatctctgccttcctgcccctcttcaacgaaactgaggatcccagctatgcgctaatccgcaattgctatgatgacttggaaaaggaggatcgtgatgcctgcacagccggtagcaagaggttctgcgccacttgtgaaggcaccaagtgcaattccgaggacttagtggccagccggcatagttgtttggtatgccagggagatgagtgccagagtccacaggctagcagttgctccaattacagagagcacgatgagtgctacattcagttcgatgaggagaggtcgatcacctcactcggctgtctgagtgaattgagccacgacgatatctatctgctgaagcgctccaagagattgctgacctgcagcgataacgattgcaacaccattgaatccgtgccagaaactcagacttgcactctgtgcagctcgcgtaccgaggccaactgtgcgataagtccctcaagtgtcgtttcctccacagattgtactctgggtggcttccctgaatgctattcccgtgtcctgtccgatggtagcacagagagaggttgtctctccagcctggaggacgacgagttcctctcgtgttacaacagcacctctgcctcgtgcaactcctgccagggaaataagtgcaatcaactggtttatccaagtaatcgccgatcctgccacgtttgcaactccgcaacggacgccaattgtgaaaacaaccccagtagccttaccgtgtgctatctgtacgatgcagatgaccagtgtgtgaccaatctgaggaatggggtgacctacaggaactgcgcctcctcgcttagttgcgaggcgaatgccaagacttgtgtctactgcgagggcgatggatgcaatgagatcgatttggccgccaagtccgatgacaatattggaaagtggcaggatctgcctctggagtgtcttacctgcgagggtaccggctgccaggaggaggagattgcctcgatcaagtgccagaacaacaacgagcaggactgcctgacagtgtttggatcagatggaacagtaaccagacgcggctgccaggatgaggtcgaagcggatgccaccatctccacatattgtggtaccaatgccggcagctgcccctcttgcaagtccaacaactgcaacaatgccactgccctgagtcagtacaccacctgtatttactgcgactcctacaaggattcctcctgcttgtgggaacccacaagtgccagccacaggactcgtcagtgccagggccaatgtatgactgctctgtatggcagcgcagatgctggcctggatctcatccgaacctgtttggatgacaaggaggcgtctgaccagctgatctgtgccaacggctcggattccacctgcgccgcctgcagcggtgactcctgcaatgtccagagtttgcccgaagaccgcctcagctgttacacctgcgagggtgacgattgcgaggatccacagcccaagacctgtaccatctataagcccgaggatagctgcttcctctgggtggacgaggataacgatctgaagcaactcggctgtctgagctccttccgcaaccaggatctggaggccattatcaagacgaagcgcatttccgtctgcaatggcaccaactgcaatgttccccaactccagtcccccgtgcgatgtgccgtctgcgactctcgtgaggatccctcttgcgcaaccgatgcctacgccattggaaccttcagcacctgcagtcagttgccccacacaggatgcttcaccagattggagaacgatggttcaacccaacgtggctgcctgtacgatctcgaccagactgattttgctgcgtgtcttttaggaagcgatgccaactgtaccgtgtgttcggtcgatggatgcaatcgtgagatcttccctgctgatcgccaagtgtgctactcctgcacctctgcggatgactccagttgtgaatcggatccctcgtacaccttggcctgtctgtgggtcagcgaaactgagacctgcaagacgctgctttccggaaatgttacaacccgcggttgcagcagcagcgtcgagtgcgattccagtgacttccgcaactgccgcagttgttcaggcagcgagtgcaatgccatcgatttggccaaccgggtggacgatggtcagcacggcttgtaccagtccttgcccctgaagtgccacacttgtgtgggcgaacactgtctgagttcgctgggacctgcggttacctgttcgctgaatctcgagcaggattgtaagactgtctttgaggctgatggcgtgtcggtgaggaggaggggttgctcagacgatgtggatgactacgaggatcgctattgccgaaagaatcccgctttgtgtttcacctgcaagtcgaacgagtgcaatgacgcctggtccacggaggagtatgtgagctgtactttctgcaattcggccaacaaatcgagctgtgtcaccgatcccactgaatctgacctgagcaagcgcaattgcaagggtcagtgcttggtggctctgagtggagaggatttgattcgatcctgcttggacgacaaggagctgtatgaccgctccgattgcaccaccgacgagagtggtactaactgtgccacctgctccggcgcagaatgtaataccttctcgtatcctgctgatcgacttagttgccacacatgcttggatgacacttgttcgagcagccagtcccaagcctgtttggcctacaaaacgaatgactactgtttcgccaagtatgccactgatggtaaggtggagctgatgggttgtgccagtagccagaatgagtccagcttggagcaatggcaggagggcaatctgttgtattcctgccagggcagcgaatgcaacgaactgagccgactgcccaccgaaggagagtgtctatcctgtgattccagcaagaccttggagtgtgcacaggatcccacagctgtcctgaccaccattacctgtcatgcccccaactccgattgtatcactcgtctggagaacggacatacgcaccgtggatgcaggagtgaagtgagctctaccgaaagcagcagctgtgtggcagatggcacctgctccgcttgctccggagccaagtgcaacgtcgagatcttccccaacaatcgacgacgctgctacatctgcaactccattgatgacccactttgcgcccagcatcccagcagtttggccgtgtgcccaatttacgcggcgaatgacgaatgtgtgacatctcttaacaacggcctcctgcggcgcggatgtgccagcgaattggagtgcgagatagacaatgaggatcactgcaataagtgttccacggatggttgcaacacgatcgaacttaccggttcagcgggcggactgtccggaatgggattgggtctcaccctcatcgtcgcctggttgatcagctcaactcagcgactgtag

SEQ ID NO: 31479 - protein, 2931 aa, DROSOPHILA
MWPINSLIHALTHNWHSGPINCYECSTLDECSAGSGVLRKCLDNDGQSCVAIFNSDGAVIERGCSDNLASVCTESGDNCYECRSHGCNFLNSQENLLDCVVCDAQSDDNCVFDIELVTERRKCNQQCMTALYPTNSEEGAPLELVRSCLDDLDLDDREACSEGSLENCVACSAASCNTVDLGVRGSCNVCKGDCSNPQSKTCRAVPSGDKPESCFIEFDESGAIYEMGCLSQYNVSDVTLLETNKQLWYCTGDNCNVESALAKPQTCKLCNSQTDEDCAVAPENVETNTQCESLVNTDCYSRILDNGHTERGCLTSLEGEDYLDCLKDSNITKCSRCTGELCNELQCITVIDLLGNTQRGCSASVECESSNPKKCEVCSGDDCNTGNLKRLEDGQPGLWGQDLPLSCQSCSDAASCAASDLSNTTCSSNSDYCVTVFSANGSVSAKGCSQEVEQTWASYCDANAGSCHNCNSNGCNSARSLDSYTECIYCDYENEDCATNAANVKSRRLCNGQCFTGSRRRSSENFIYDTVRGCLDDKDPEDQAACIAGTDAACIACSGANCNVDNISEISQSCYKCSGSDCDDPKASQCSQYSPDDRCYILFDYNADITGMGCLSDLDEEYVDENFHSLLFCDDNDCNFFDILPTPHECIVCDSSEDPNCATDPSKITLIGNCGVLPYTSCQTRIISGRTQRSCLSSLEREQLQECLDGTGNCVVCTGDRCNSEIYPADRRRCHRCNSVTDPTCSSAPDAAEVCPYYLEDEGCSAKLVDGETYRGCQREFTCDDSDKQHCRLCSGKDNCNVADLFNSYIGYPSKWLTPPVNCYTCNGTDCQGDSSGTLRKCTGNDEQNCGTVFDASGSVIFRGCSDTLYEDAELLQYCDENSANCKFCKSSGCNNAKELSTYVDCLFCDGSDEAECVRKVGDITRTVSCQGSCLTGLYPRNRSEANPVYDLARGCLDDLDYDDREACSAGTLENCVSCSSATCNKADVPEDRLSCNVCEDDACETLTSQLCLGYRSGDQCYIHVGDLSIKAMGCATDLQDSFLLTNRRDLYLCSGDDCNTKDKLNLNGVSCNVCNSTYDDGCVGGNSALATVCEHYINPECYSYLNEDGVLLRGCLADTNDELFDECSSDGSTNCTICSTNNCNNDVYPSNWLTCLRCDSASDADCALNPASYSSYCRTYSEDDACVTSLSNGRTRRGCQSELNCDASQAGSCRVCSEANCNTVDLQSSYVGEPGKWTDLPLSCHVCSDAASCATVGTEITKCEGNNKQTCSTVFNSEGQVVARGCSDAVLAANVDYCDLNGDKCVQCKSDGCNNAVSFDSYVDCYFCDAEDDVNCAWEKPESTRKCQGQCMTGLYPRSSSWDSALLPTRGCLDDLNEAERTSCAAGTHSNCTACTGSLCNGEDVIANPLECYTCKDPFCEDPTTSKCVAYRENDQCYLAYDDSGVVAMGCASEFEVQVIKELVAQQRLLLCSGQKCNEYSITPDPNTCLQCTSTDDPRCATNPNQLTTTNICSQIPYTECVTQIDSQGNTIRGCMSSLGGDDFYECLTGDGKLCETCTGERCNGLSVFPADRRKCYQCNSTSDPNCAASPATLESTVCPIYSQDESCVTTLLNGITHRGCSSSLTCSDPSDSRTCRVCSSADGCNTINLEKIGEDGFPGAWQDVPIECLVCSGTDCASSGGTLTKCSGYDNCVTVFSDSGSVTQRGCSESVFEESDYCDENPAYCPRCNSNGCNTADSQDKYVECIVCDSSVDSNCVSDPTQITKTRQCHERCISAFLPLFNETEDPSYALIRNCYDDLEKEDRDACTAGSKRFCATCEGTKCNSEDLVASRHSCLVCQGDECQSPQASSCSNYREHDECYIQFDEERSITSLGCLSELSHDDIYLLKRSKRLLTCSDNDCNTIESVPETQTCTLCSSRTEANCAISPSSVVSSTDCTLGGFPECYSRVLSDGSTERGCLSSLEDDEFLSCYNSTSASCNSCQGNKCNQLVYPSNRRSCHVCNSATDANCENNPSSLTVCYLYDADDQCVTNLRNGVTYRNCASSLSCEANAKTCVYCEGDGCNEIDLAAKSDDNIGKWQDLPLECLTCEGTGCQEEEIASIKCQNNNEQDCLTVFGSDGTVTRRGCQDEVEADATISTYCGTNAGSCPSCKSNNCNNATALSQYTTCIYCDSYKDSSCLWEPTSASHRTRQCQGQCMTALYGSADAGLDLIRTCLDDKEASDQLICANGSDSTCAACSGDSCNVQSLPEDRLSCYTCEGDDCEDPQPKTCTIYKPEDSCFLWVDEDNDLKQLGCLSSFRNQDLEAIIKTKRISVCNGTNCNVPQLQSPVRCAVCDSREDPSCATDAYAIGTFSTCSQLPHTGCFTRLENDGSTQRGCLYDLDQTDFAACLLGSDANCTVCSVDGCNREIFPADRQVCYSCTSADDSSCESDPSYTLACLWVSETETCKTLLSGNVTTRGCSSSVECDSSDFRNCRSCSGSECNAIDLANRVDDGQHGLYQSLPLKCHTCVGEHCLSSLGPAVTCSLNLEQDCKTVFEADGVSVRRRGCSDDVDDYEDRYCRKNPALCFTCKSNECNDAWSTEEYVSCTFCNSANKSSCVTDPTESDLSKRNCKGQCLVALSGEDLIRSCLDDKELYDRSDCTTDESGTNCATCSGAECNTFSYPADRLSCHTCLDDTCSSSQSQACLAYKTNDYCFAKYATDGKVELMGCASSQNESSLEQWQEGNLLYSCQGSECNELSRLPTEGECLSCDSSKTLECAQDPTAVLTTITCHAPNSDCITRLENGHTHRGCRSEVSSTESSSCVADGTCSACSGAKCNVEIFPNNRRRCYICNSIDDPLCAQHPSSLAVCPIYAANDECVTSLNNGLLRRGCASELECEIDNEDHCNKCSTDGCNTIELTGSAGGLSGMGLGLTLIVAWLISSTQRL

SEQ ID NO: 31480 - DNA, 3803 bp, DROSOPHILA
tcgtgtgctgctgtcagagcattttgtttatgattttgtagctgtcataaagttattaaaagtatgtgacatttttatgacattatgacgtcttgactcaaggtttctcctcttttgccaaccgaaaaatctgttttgggatttttcggaggagcggagccggcaaataagaggataccggcttttgttttcaacgctccagagttctgcgagtgggaccaaaccgatttgatccgtccggctgtcttgaaatatgatatcaaataaaaagcaaattaaagacgataaaaatcgtgtctcggctcacgctgagttatatatataaaaaaaaagcgcttattttttgcgcctcttgcaaatgcggtgcgaggtacaccacaaatccgaaatcccttcgaaatcaagtatcgtttaagtttcgctttggttctggttttggttttggtttcgttttcggttgcctgttgttcatcttgttatttggtggctcataaaacttgtaaacatccgactgattgtgcccctgtctggttttttcctttattttctggttatacgttttcggtttttgtgagttcgtgtgggtgctggccctcggttcgaattggtaagatatttccagatgatattacacttttgattggcctcggtaatggggcactgagggcgtgagagatcaaagagcgataagcgatttaattgcccatatgtccaaacttattgccttcgaagaagaccaacaaaagctataatgaaaggtttagatatgcccaatggaagatggttaaaggaatgggcctaaagttgaataaacaaaagatatggcagaggtgaatggtccgaagatgcgtaccgtaagttttaaataaaatcctctttaaagttactaaataacgtttaattgtttggtgcacaaatccacacagtcaagtatttgatttaacaaataataactcctagttgccttagatataccatacaattccaatgagtggcagactcaacgaggatttcgcttggagttgcgtagatcatagcgtcggctttttggcggttcaggagggttcctgtactgcaaatttttgtaaacataatcctcgtcatcctcgtcgaagtaatcctcttcctcgtcgtcgtcgtcatcatccaggtcatcgtattgcgaatcctgcaccttggtttcggtcgtttcttctatgacttgctcctcgaaatcagttccttcttcaagagtataggagatattttcgtcactaggctttaacttaacgttctttgggtttctagacttaaaaccttcatacacttcgtctggcttgaaatcttcgcattcgctggaactggaatgtacgggtttagcttggcgtttcgtgggtttggctttggttttggctcttggtttgggctttgctttaaacctggtgctggtctgtggaagttcctcctcttcgttaagattagaaccgccgcacaattcctgcatagcctgctccaagtccgagtcctccactaccttgcgacctgtagatttcatcttcgccgccgctgaggtggatggcatgaagtccaagtcgaggtccgatgaaatcggtggcagggcatcgtcttcatcatccgagtaattcatgccgattggcagattctgctggaaaccaatggacttattggtggcatccataactatttccttgtagccggtgattttgctaccatagcgcggcagatattcggagaagaactcgttgactttgaatagctcgacctggccataataaccggcataatcgggagcttggccaattccgatattaatcacagattcgtgcggctttacgaatttctcaaaggaaactttactgggcgctaagtctacgggggcgttattgatagacgaacgccccctcttcacattcagttgcgtcataatgttcttgttgaacatatcgtgattgttgcgatccttaaggacacccagatcggcttgatatcctagcagagtttggaaatgacatcgagccacttgcagagcagaacgggatgtgtagggagtggagcagagatctcctcgccgtaccatcctggaaatatgggcatagttcgggaggtgcagaggtggtcgtcgcggctccgccgttcccgggcttgaaatttcaggtattttctcacattcctgagccagtttatgcaatttgagtaactgacccttaacgaaatttggattccgatagatcagcgtgatgttggtggctgaggatttacgcacatccttcaatgaaacgcgttcgaatccgtgggccaatagagtgcccgtaaattgcaatgtatttcgacaatgaaacatggaacacccgctggacaaatgctcctgcataccctggtaatcgacctccagttcgcggccatttgccgaccacttgaggtagtgaatggagctattatcggtggccaggaacagtttcacgacgaatgcataatggagtagaggatggctttttggcgtttccgggatatggatacccaattgtcggtaaatccgcctgtgattctccgctgccttcttattgatgtcggaaacaggtttaactgccagatcgaggggctccttctgcaaaggatttctttcgaaatcttccagcggatcctcggagtccacaaaatccagaaactcggggctatccgctggcgtcctggactcctgctgttccaactcatttgtccaacttgttgctgcgtcttcttcatattcatcaccactttcattgacctgctgtgactggcccaaagtgtcttggttccccgacattatccttttgtatttacaaacttcgatgactttttagttctcaaacaaatattcgggcaaacgagcaagccggaaaaatatgaggactgacaaacgaaatgttggcccactttaagggttgccctgctgttgttttccattcggaaaaagtgttgctaagtttttctgttatcctttacagtttctatcgatgatttttaagaaaacacactctcatcggtgtactttaagcagtcacacttaatgttcaaaacttcttttttttacatgttaaataagccttgcattccactattattattctgctgccaaaaattcttattgataaattaaagttacacaatttagctttagtgaaagagtagacaggcgaaaaccaaacaaagctcctttcattttatttgaatgcacttcatgttttgtttgcaataaatctattgttatttataaccccaaaacccccagttttaaccctcccatttgtttccaagggcggcaaagttcaaaaaggaaagtaagggaagcctttcaattggggattcatgggctatatcaacaataatgcagaccaaagccgagacaacaaaaagccgccaacactggcactcaactggtctataaccagtcaatgagaaagagagggtgacactgtgccgaaagagatagctttaaattgacattcatatgaatatttaatacacatcctttaatcacgaatcatccatggcgaacacccccccaattattctgactgatgcacgatatttggatgaacaaactgctgagtttttggcacaggcgaaaaaaatcggactgacaagaattttatgcaataatctcacgtgtcaccaggagtaaattaaaaaaatgtcgtcagctgcttgaatctattgaatattataataccctgctctttatagcttctttagttattggtaaattactgatgtgaatagttcgtctagtgaatataattatgcatttcattgctcaatttctt

SEQ ID NO: 31481 - DNA, 1803 bp, DROSOPHILA
atgtcggggaaccaagacactttgggccagtcacagcaggtcaatgaaagtggtgatgaatatgaagaagacgcagcaacaagttggacaaatgagttggaacagcaggagtccaggacgccagcggatagccccgagtttctggattttgtggactccgaggatccgctggaagatttcgaaagaaatcctttgcagaaggagcccctcgatctggcagttaaacctgtttccgacatcaataagaaggcagcggagaatcacaggcggatttaccgacaattgggtatccatatcccggaaacgccaaaaagccatcctctactccattatgcattcgtcgtgaaactgttcctggccaccgataatagctccattcactacctcaagtggtcggcaaatggccgcgaactggaggtcgattaccagggtatgcaggagcatttgtccagcgggtgttccatgtttcattgtcgaaatacattgcaatttacgggcactctattggcccacggattcgaacgcgtttcattgaaggatgtgcgtaaatcctcagccaccaacatcacgctgatctatcggaatccaaatttcgttaagggtcagttactcaaattgcataaactggctcaggaatgtgagaaaatacctgaaatttcaagcccgggaacggcggagccgcgacgaccacctctgcacctcccgaactatgcccatatttccaggatggtacggcgaggagatctctgctccactccctacacatcccgttctgctctgcaagtggctcgatgtcatttccaaactctgctaggatatcaagccgatctgggtgtccttaaggatcgcaacaatcacgatatgttcaacaagaacattatgacgcaactgaatgtgaagagggggcgttcgtctatcaataacgcccccgtagacttagcgcccagtaaagtttcctttgagaaattcgtaaagccgcacgaatctgtgattaatatcggaattggccaagctcccgattatgccggttattatggccaggtcgagctattcaaagtcaacgagttcttctccgaatatctgccgcgctatggtagcaaaatcaccggctacaaggaaatagttatggatgccaccaataagtccattggtttccagcagaatctgccaatcggcatgaattactcggatgatgaagacgatgccctgccaccgatttcatcggacctcgacttggacttcatgccatccacctcagcggcggcgaagatgaaatctacaggtcgcaaggtagtggaggactcggacttggagcaggctatgcaggaattgtgcggcggttctaatcttaacgaagaggaggaacttccacagaccagcaccaggtttaaagcaaagcccaaaccaagagccaaaaccaaagccaaacccacgaaacgccaagctaaacccgtacattccagttccagcgaatgcgaagatttcaagccagacgaagtgtatgaaggttttaagtctagaaacccaaagaacgttaagttaaagcctagtgacgaaaatatctcctatactcttgaagaaggaactgatttcgaggagcaagtcatagaagaaacgaccgaaaccaaggtgcaggattcgcaatacgatgacctggatgatgacgacgacgacgaggaagaggattacttcgacgaggatgacgaggattatgtttacaaaaatttgcagtacaggaaccctcctgaaccgccaaaaagccgacgctatgatctacgcaactccaagcgaaatcctcgttga

SEQ ID NO: 31482 - protein, 600 aa, DROSOPHILA
MSGNQDTLGQSQQVNESGDEYEEDAATSWTNELEQQESRTPADSPEFLDFVDSEDPLEDFERNPLQKEPLDLAVKPVSDINKKAAENHRRIYRQLGIHIPETPKSHPLLHYAFVVKLFLATDNSSIHYLKWSANGRELEVDYQGMQEHLSSGCSMFHCRNTLQFTGTLLAHGFERVSLKDVRKSSATNITLIYRNPNFVKGQLLKLHKLAQECEKIPEISSPGTAEPRRPPLHLPNYAHISRMVRRGDLCSTPYTSRSALQVARCHFQTLLGYQADLGVLKDRNNHDMFNKNIMTQLNVKRGRSSINNAPVDLAPSKVSFEKFVKPHESVINIGIGQAPDYAGYYGQVELFKVNEFFSEYLPRYGSKITGYKEIVMDATNKSIGFQQNLPIGMNYSDDEDDALPPISSDLDLDFMPSTSAAAKMKSTGRKVVEDSDLEQAMQELCGGSNLNEEEELPQTSTRFKAKPKPRAKTKAKPTKRQAKPVHSSSSECEDFKPDEVYEGFKSRNPKNVKLKPSDENISYTLEEGTDFEEQVIEETTETKVQDSQYDDLDDDDDDEEEDYFDEDDEDYVYKNLQYRNPPEPPKSRRYDLRNSKRNPR

SEQ ID NO: 31483 - DNA, 2330 bp, DROSOPHILA
tttacatttgtcacactggcactttggccaaggattctctactggtagatgccacttgtccaggaatctggtaagtcctgacgtttctccttagaattatgtttggttaatgttatattgaacttcagtacatccttttccaattactctgccgtaatttggcaggaccgcattaatttgtcggcaaaataattcctttggacttcgattcatacaaaacatataattttattagcacaagtttcagttttaatgacagaatttcaacgacagtcagggttcccttcctataaactcgtcgcctcggcgtctacagcgaaaacagagaaaggacttcatacaaccaaaaaggacgagaacacccatacaagcacagcaggcagcaatgataagaaaaattacgacgaatatgaacaaaagtccccaagcacctaggttagtatccgggtgtccagtggttgtacggtacgccacagttgtcatgttaaagtctatatattcaatatcgtattcagatagggttgtagcatccaactcggccatagcttatgggaaataaattgcaaattttgttgctttcgataatagattgaaccctctaaatggaaggaaatatgtataaggaaaatcacattaaattaacgaatgcttctcaccgttccttgcatagcagcttaagaatttcgatgaccctgacccttcagaaattttattttgggtatagatttttttttaattttaagagtacagtcgcagcttactgaagtcgatatttttttgtactttaaatttgatttttggttgccatatattaagttaatagatatcatttcaaaattaagctagatttttttattttttatgaatagacaacaattttgccaatgagcatacggatgctcctaacgaatctgtacctgagcacattaaatttataggctttcgaatcgcatatcctagcactacgtacatattaatagaaacttgaattatcgccgaattaatcatcgtccaaggtgcagtccccacagccgtcgccacaatcgccacacccgccgccatcgccgcaacatccaccgccgtcatcgccgcaacatccaccgccgccgccttcaccacaacatccttcgtcgcaagcgaggcacgcggagcaggcgagtccgcaacagccgcacaggcagaggagcggcaggcagatgatgagcaggcagcagaggagcaccataacaacgatcaggacaataataccgacagccatgctacccgccttggcggcctctgtagtggtggtggtggcgatcgtggtgctccatgaggatgtttccgtcatcccgccttctaccgttgataatgtgtcatccatgattaatcacttgttgacggtattgaaatgtttaacgtttagcttattgtaaattagaataaattacaaaaattcagacagcaaagttgagtgtgtattcaaagactccttcagcacaattttcatatgtgcccactttcaatttagcatcatatttggttttaaatatattcaagttccccatctacgaaagacaaaagcaaagaagcttatgggcataggtgcattcgtcacgcttccacacgaagcgacttctaacgatcaatcgcacttaaaatcctttccacaaaagtactcattaaacccacgaacacaccacccgtcatacaatgcccattcgaattgtataataattaatgaaatgcattaacgaaagcattttgcgggtggaactgggattgggttggcagagaggggtggtcctcgaacggggatctggggagctgtccctgagctcctgtgtgtacctgcgctcgttagcgctccaaacacccactctgcgaaacacccccactttaactcatatgcaaaaaacacaccctcgcctcacgccatcattatcataatttgaatgtgatgcgagctttaaaatattcatgcgagtagaaagatttttttcaagtgtgcgcacgtgtgcgcctgggttcgttatagggagctgtttactgtaccaagaggtcgttgattataatgactgtattttgtgcgctgattactccacagagaaaattaagaaaatgagtcaacaacttaatgcaaaaaacaaaaggaagctcttcgataaacagcgaaatgaatatatattttttcagatatctatctgtttcgtgcataataaatataaactgcgttggacttcaaccataattaaacactgaacattgtgttaagtaactaaaggttgatcaaacaactcctgataatatactcaccgggaaagtaaaaatccacttctcgttctgaatca

SEQ ID NO: 31484 - DNA, 330 bp, DROSOPHILA
atgacggaaacatcctcatggagcaccacgatcgccaccaccaccactacagaggccgccaaggcgggtagcatggctgtcggtattattgtcctgatcgttgttatggtgctcctctgctgcctgctcatcatctgcctgccgctcctctgcctgtgcggctgttgcggactcgcctgctccgcgtgcctcgcttgcgacgaaggatgttgtggtgaaggcggcggcggtggatgttgcggcgatgacggcggtggatgttgcggcgatggcggcgggtgtggcgattgtggcgacggctgtggggactgcaccttggacgatgattaa

SEQ ID NO: 31485 - protein, 109 aa, DROSOPHILA
MTETSSWSTTIATTTTTEAAKAGSMAVGIIVLIVVMVLLCCLLIICLPLLCLCGCCGLACSACLACDEGCCGEGGGGGCCGDDGGGCCGDGGGCGDCGDGCGDCTLDDD

SEQ ID NO: 31486 - DNA, 3284 bp, DROSOPHILA
gctgtcgccgtttggatgcgttgctcaagcagttcgttgacatcttccagtggcaggtgctcttcaacctgctaaccacttatatattcagcattgctgttttgtttcgattgtggatttatttggagttcgataaaaactttcatttatggaagggcatattgtatgcgattatttttctgacccatcacgtcgaaatcgtaatgcaattttccattttcgagatcaaccgctgtaagtggttgggacttttagaagatgtcggaaatctgtgggacatcaattattcgggaaggcaatgcattaaaagcagtggaacgattctgtcaagaaaggtaaatattttgtattgaattcatagtgcaaagataatgactaacgctttattttagttagagttttccctgctctacatgaatcgcaaacttcaactgaatccaaaacgtgtgagacgtctgcacatcgttggattgttcgatttgagtaatttaaccgttcacaacatgaccagaagtataataaccaatgtgttagttctgtgtcagattgcctataaaaaatatggttgaaaaataatgtgtgtaaagttatccaattaaatttcaatatcaagtaatttgacaaaatgtttttgggttcgaaggtctgctaaaatcttccaaattttatataaaacattatatatttaagctttatagaaaacaaggaacatatgtatgtatttatttctagctggccccaatacataactcttttggagacatcttaaaattatccgctatacaagaaagccacaaaatcatagctttcaattcgaatttgatatcctataaaactcccatgactgagagtcctgtaagctgcgagaaagctttctattttcgtgtaaagttctgaaagcttgattgatttacgtttatgtatcatatcaaggtaaaaaaaaaaaccgtgtataaatggtgaacatttaggtagatagatataagatatatgattttctttacacttttgttttgttcttcatcaaatggatgagatattgacgatcattgatgggttgtctttgccgtctcaaatcgaactgcatgaggataatgacgttgctcagaatggagccaatataactaaggcaagcgggtttgtccagctccacaattccgcatattttgtagaccaaccgattctgcctcagctgcatggtaaaaacatccaactaagtggaatattgtttagtatatattaaattttgtttgaggctgagcacactcacctccctttgcatctttggacccacttttggtagatcgctaagttgccttagttgctggccagtgttgttgcaggaggtcaccacactatccagcatttccatcagcgccatggtgccccagaagttgaaaacgatcaatccgttgccaaataagatgccccaaccatttgacttgatgctgctattgctgtactggacggcatgataaaggatattaatagcggtcataaacatgttgataaacaccgtggcattagcgatgtcaaacatgtcaaagatccttctggctaatcgaagggttttcagatgcatggcggctacggaacgcagagctttccatttcttccgggctttcctaccatgaagagcgtttatggccagatggattaccaaaaattgatgattcagtagaaccagtaccccgaagaaacccattttcacgcacaagaagtgcagaaagtgcgtgagccgggcacagaaagccaggaaaatctgtgggttaatcacactgagcaattgatactgcaacacagtggagcacagaaaagcactatagagtaatattattttccggatcattattctggccaaggactcttgtaggtcaaggagttctttcttgtccactatggccctcgttatgtgtccgaacctcttccaatatatcagcgagtatttatagagctgaatgattttgtggcgctttagccacagggttccatagcagctcaccacagcgatggctctaaggaagagcatcacaaagaagttccactgcaggactatgttgtacttcatgtagccatcttccatgatccgaggcaccatgaagtacaagtttagaaacaggaatatgcccacaaagaaactgtagatggtgtaagttcgcgagaccttttccaagcgtaggcatttcctgcaggagcgtatccttagggtagtgctcattagggcgaagacaacggaatggtagtagaccacgttcatcacgcgaccaagtttcggatgcaacatgctgcagtcaaggcagccaggtaactgaccacgtcctaaacgcggcagacaactaattaggatataaagcttactgatggaattacgatgagcagacaggttctccgatttccatcaggataacagagcttccatcgattttatagaacagttgacgggtgtcctttgccggaagcagttgtacgaaatgctgttgaaattcatgtacatatatggaataggctgtggtctgatgcctgctcctctgaagaaaggacagtttcttttgggatataagcagagatggtacctcatctatacggcctgcctgcacggcggtctactgaccgtcctgcccttcacatttccccactacatgtacgacgacagctacatgagcagcaatccagtcctgaaatggacatttaatctaaccaacatcacccgtattatggccatgttttcgggcgttctcctgatgtggttcagaagaaaaaggatcttgaatttgggtgaaaacttaatacttcactgtcttaagtgcaaaacactggataatcgttctaagaagtattctaaattgcggaaaagagttcgaaatgtacttttccagatgttactcgtcgcaaatctcagcattctgctgggggctttaattttgtttagaattcattcagtacaaagaattagtaaaactgcaatgattgtagcccatattacacagtttatatatgtggtctttatgatgacgggaatatgtgtgatcctattagttctccactggcaaagtgagagacttcaaatagcactcaaggacttgtgctcctttcttaatcatgaagaacgcaactccttgactttatcagaaaacaaggccaatagatccctcggaaaattggctaagctctttaaactttttgcggaaaatcagcgattagtccgagaagtttttcgaacctttgacttgcccatcgcccttcttttgctgaaaatgtttgttacaaacgtgaatctggtttat

SEQ ID NO: 31487 - DNA, 1206 bp, DROSOPHILA
atgttgcatccgaaacttggtcgcgtgatgaacgtggtctactaccattccgttgtcttcgccctaatgagcactaccctaaggatacgctcctgcaggaaatgcctacgcttggaaaaggtctcgcgaacttacaccatctacagtttctttgtgggcatattcctgtttctaaacttgtacttcatggtgcctcggatcatggaagatggctacatgaagtacaacatagtcctgcagtggaacttctttgtgatgctcttccttagagccatcgctgtggtgagctgctatggaaccctgtggctaaagcgccacaaaatcattcagctctataaatactcgctgatatattggaagaggttcggacacataacgagggccatagtggacaagaaagaactccttgacctacaagagtccttggccagaataatgatccggaaaataatattactctatagtgcttttctgtgctccactgtgttgcagtatcaattgctcagtgtgattaacccacagattttcctggctttctgtgcccggctcacgcactttctgcacttcttgtgcgtgaaaatgggtttcttcggggtactggttctactgaatcatcaatttttggtaatccatctggccataaacgctcttcatggtaggaaagcccggaagaaatggaaagctctgcgttccgtagccgccatgcatctgaaaacccttcgattagccagaaggatctttgacatgtttgacatcgctaatgccacggtgtttatcaacatgtttatgaccgctattaatatcctttatcatgccgtccagtacagcaatagcagcatcaagtcaaatggttggggcatcttatttggcaacggattgatcgttttcaacttctggggcaccatggcgctgatggaaatgctggatagtgtggtgacctcctgcaacaacactggccagcaactaaggcaacttagcgatctaccaaaagtgggtccaaagatgcaaagggagctgaggcagaatcggttggtctacaaaatatgcggaattgtggagctggacaaacccgcttgccttagttatattggctccattctgagcaacgtcattatcctcatgcagttcgatttgagacggcaaagacaacccatcaatgatcgtcaatatctcatccatttgatgaagaacaaaacaaaagtgtaa

SEQ ID NO: 31488 - protein, 401 aa, DROSOPHILA
MLHPKLGRVMNVVYYHSVVFALMSTTLRIRSCRKCLRLEKVSRTYTIYSFFVGIFLFLNLYFMVPRIMEDGYMKYNIVLQWNFFVMLFLRAIAVVSCYGTLWLKRHKIIQLYKYSLIYWKRFGHITRAIVDKKELLDLQESLARIMIRKIILLYSAFLCSTVLQYQLLSVINPQIFLAFCARLTHFLHFLCVKMGFFGVLVLLNHQFLVIHLAINALHGRKARKKWKALRSVAAMHLKTLRLARRIFDMFDIANATVFINMFMTAINILYHAVQYSNSSIKSNGWGILFGNGLIVFNFWGTMALMEMLDSVVTSCNNTGQQLRQLSDLPKVGPKMQRELRQNRLVYKICGIVELDKPACLSYIGSILSNVIILMQFDLRRQRQPINDRQYLIHLMKNKTKV

SEQ ID NO: 31489 - DNA, 2883 bp, DROSOPHILA
caatgataaatgcgcaaaacagttaaaacgaaaaaattaaatacaggaaaccaagccacatggcccgacagtcaagctggcaaaacaaaactaagagtttccagtcgagttaaccaataatccacttcaaaatcattttcataaatgctgaaatatggccacacgagcaggaaaaaattaaatatatttcattaatggaaacgtttcgttttttttttcttttgcgcaaatgaaattttacatttaacatgaccaattaatgtgcggcaaagccgcaaataaaaccgcttaattacgtgactcggccaaaaggcaggcgaaccagcaacagccagcaacaaaggcaaagcggctgaaacgcagaaatttgcatgacacgcaccgaaatgaaataataatatggttaataaagccagccgcatctgattcatacactacgctgccacagtcaggcccacactcatgccacctattcggttcccggccagaaatccgattccagtctcaccggctgaaggccaattatcgcacttatttcgctgctaattaaaatgcaattatttgctttaaacaacataatcccactgactggcaactggcatttcgttttatttgcatatcgataaggccattgaggtaaacttttcgggttgaccaccaatccatagagcaacttggcgtgggtgttaactttgtagagttggaaaccgctcgagggatttgaccaccgaattcctttgatacaactgttgatctgattaaaaaaaatgcgtttaatcgcgaatattttgatggagctctaataggatttgacagtgttcaaatcgcattttattgaataatttgtaaaaaaactgtacgtttatttggaatactttcatgctgagagtatttattctgattttaaaaaacgtaacaatatcttatgtatgtatatgctaatagcctctattaatacttcttctccagagagtgggctcccagagcattccatgtgagatcagtgtggcacatcagcgtccgtgtaggagtcttcgtcatcttcggcggtaatatgagccggtggtgccttcaagttcctgcgatatgaatgcaccttcgtgggcactcggactggccgttgcctggcactcatgtgtcctgtcgccggctgtccctcgaggtaccaacccccgttggcattcacattacgttcggcttcatcaacaaaatccgtgataatttgccacaacggcaggcgatccgccaaaccacgcgagcgagcctgaagcactgcagcggaggcaatcagagtgaagttcagaattcccgcattgaatatatgcaaccaagcgctcatctgttgctcactgtcaggcgaaaccattggcggcacaggaaggggcaccggaatcggaacggggatggggatggatgtagctgctgaatcctcgactggatcctgggtgcacgttaccggatgaccattaatgtttcgtttctggggctgtttcaggggtttcaaatccagcggtggcgatgagtatgatgatttagaaatgacagacgaagccgacgattttgtgctgatggtaacttgcggtttcgctagggtcatggccaggattgtggaatagttggcagaacctgtttggtaacgatgctataggtatagttcaggattatcccatgcggcacttacccgtttggctagttgtctctcgggccaaccgctgctcagctcgtttcacccaaccgcgaaccgtagactccggaacacccaattcgcgtgatattccggccttggtttcaccacctcggattcgggctatggctcgctccttgtcgtccaatgaaacttggactcggggacgcttaccacgtggaataccaaatctttccattttagagtaactccaatatcgataatcgagtatcctaaccaagcaaagaagcgagaagaaagcagtgaagaactttcgattggtttttgggtctagagatttacacaatttcactcgcgttgtcgtattccggacgttctgctcagctcgacacgatgatttgtttgacaggctttgagaggtccgggacttttgcctttgggccagctgacatttaaagcgccgatgaggtggattttcttcgcgtttcacaggcctcttcgtctttccctttcgatgacatttgctttctcctttgctgcccattctctttcttcaggaatccctttcacgcagagctgcatttcgtcgtttttgggggatgccaacttgggcgaatggagcaaaatcctcaagtgataatcaacgctttttcaatttttcagtttatttgttttcgttcttttatttttacatttaattctgacgtacactaaaatatgtgtcctagtttccaatttattttaatttctttaagggcattgattttcattttcttctggggcatttctgtttatatctttttatgggggtttttacactcttattgtgatttgggatagctgtaccttagaggtgcagaatttcagggagtttttgagtttcagtgaggagtttactgtcaacaatttatcaatgggggatgtgaacaagacttcgattttgcaatccgcaatgccactcttattcatccgattccatttctatatagacttatatgctagaaccatttttggtttcaatttacaatttctctgggaattatcggtttttatttcctcgttctaaaatttctgccacaatttgtggaattcatgggggaagtttttcgttcaattatggactaggtaaatctatgtgcaaaaaatataccctatattatgtatatcgtacatatatacatatgcatgtatatatatgtatgtttcggttgacaatttgccaacaatagtacaatata

SEQ ID NO: 31490 - DNA, 828 bp, DROSOPHILA
atggaaagatttggtattccacgtggtaagcgtccccgagtccaagtttcattggacgacaaggagcgagccatagcccgaatccgaggtggtgaaaccaaggccggaatatcacgcgaattgggtgttccggagtctacggttcgcggttgggtgaaacgagctgagcagcggttggcccgagagacaactagccaaacgggttctgccaactattccacaatcctggccatgaccctagcgaaaccgcaagttaccatcagcacaaaatcgtcggcttcgtctgtcatttctaaatcatcatactcatcgccaccgctggatttgaaacccctgaaacagccccagaaacgaaacattaatggtcatccggtaacgtgcacccaggatccagtcgaggattcagcagctacatccatccccatccccgttccgattccggtgccccttcctgtgccgccaatggtttcgcctgacagtgagcaacagatgagcgcttggttgcatatattcaatgcgggaattctgaacttcactctgattgcctccgctgcagtgcttcaggctcgctcgcgtggtttggcggatcgcctgccgttgtggcaaattatcacggattttgttgatgaagccgaacgtaatgtgaatgccaacgggggttggtacctcgagggacagccggcgacaggacacatgagtgccaggcaacggccagtccgagtgcccacgaaggtgcattcatatcgcaggaacttgaaggcaccaccggctcatattaccgccgaagatgacgaagactcctacacggacgctgatgtgccacactga

SEQ ID NO: 31491 - protein, 275 aa, DROSOPHILA
MERFGIPRGKRPRVQVSLDDKERAIARIRGGETKAGISRELGVPESTVRGWVKRAEQRLARETTSQTGSANYSTILAMTLAKPQVTISTKSSASSVISKSSYSSPPLDLKPLKQPQKRNINGHPVTCTQDPVEDSAATSIPIPVPIPVPLPVPPMVSPDSEQQMSAWLHIFNAGILNFTLIASAAVLQARSRGLADRLPLWQIITDFVDEAERNVNANGGWYLEGQPATGHMSARQRPVRVPTKVHSYRRNLKAPPAHITAEDDEDSYTDADVPH

SEQ ID NO: 31492 - DNA, 4290 bp, DROSOPHILA
ggatagctgtaccttagaggtgcagaatttcagggagtttttgagtttcagtgaggagtttactgtcaacaatttatcaatgggggatgtgaacaagacttcgattttgcaatccgcaatgccactcttattcatccgattccatttctatatagacttatatgctagaaccatttttggtttcaatttacaatttctctgggaattatcggtttttatttcctcgttctaaaatttctgccacaatttgtggaattcatgggggaagtttttcgttcaattatggactaggtaaatctatgtgcaaaaaatataccctatattatgtatatcgtacatatatacatatgcatgtatatatatgtatgtttcggttgacaatttgccaacaatagtacaatatattcatattgtattttatcggtataataactaataaaaaccaccaacaattgtttaatttaattattcttttactttgaattaagtgtttgctttcgattcgactttattttgttttttgtcattttacctgtctaccttaattaaaatctagtttctttacgcttttaaagtatttcgctttttcaacaattatcacgtgacaattttttgttttaattaatttattcagggcagtttaagttctttccatggtgtgagtgtgttttttaaacatttatatgtttgagggcattaatagtttttatcgtacaattatttgcaattaatattcattatatgtcacgtagagcgaaagttatagactccactagtcagagctgtataaatacttttaagggggatcctatatgcaatgctttaaaaaaaaccatacagtttttaggatagtaacataacgtaaatggttgaattcttcaaaataattaaattgtaatataagaatttaacaaaacccaggattatcagattggtagtatcttagtattgatcaagtaaattagaaaaaaggttcacagaactcttcacatttaggtgcttagtaatcctcctgcagatgatgccttccttggtgtaaggacgagcttctgcacatccttcttagaatcgcgaagagcagtgcaaacatgaggcacagtccaagggctatcaaggataactttccatatggcaactcactgagatcgcgtttcaggcagatctcgggggattcatcatgcagcaccaactgctgatagtcgccagcatgatggagtaatcccagttgctccaaattccattctatatgtcttgtgagttgcgacaacgtcgaagtgtgcgtcacatttgggcaatttgctattccattgcatagtaagtgctttggaatgcagacttccgtgtctccaggacatcggaaatcacaaccgccatcctgaaggagggaggcagccagactgccgtccggattgcgtggcaggtgaaagagttccgtccaaaccagtcggaaaatgtttcggcctggttgaccatcccccgtatactggatgagcacgggcaggggttcctgatcggcacccgtggctcccaactccgctgtggtcaggataggcaaatccctggctaaggatatattttcggggcaaaccacaaatcggggctccagacgacccgccaaatagacctcgatcttggcactatcgcagctgcgatctgcaaagcgtgctttttccaagttcagccaaagatccctctgggcggccactttcagttcccaaatgcatttctctcggcgataatgatgctctggcggtgccatgggtcccgataccatggccaaggccttcttgtaggggaataccagttcgccatctggcgagggtccgagggtaatgggaccgcacaaaggaccatgggcaaactcataagtagcttcgaagagaggattcgggttcttgaagtacgaggtaatggcatgctgtccctgcacaatcatttccagattcatttgatctgccgaggatataactctaaccgctcgggggatgttgtcgcaaaagcaggccaggttattttggtacttatcccgctcctcccagatcaccagcttatccactcgctcctcgtgacaccgagtgcacgcgttactattatacggaagttccttgaaggaaacagaattcacttcgattatggctcgggcatagagtcttcgatcggtaacaaatttgtattgacagcgcacatcgcttccgccggttcgcttgaaaatcagtgaattcaagggcgatcgaagacgtccacctggatgcttccaggcatacatcacctcgtcacatagggtatttggcactgggtcaccaaaacgagtattgttgaagaaatcgtagtgcgcccagtagtacagtgagctgccgctatagctgcccgtcttcgagtcgaactgcacgtacagtgagggactggtgctcacgaagtccaccttctccattggtcgcgagaatgtgtcgcagaaggtcttgataatccgtgctggatcggcatggtcggaatcgtagatcgtcagggattctccgcagtctccttcgtacttcaaaatcggtgattctattcgattgatgcggaaactggaaaaaaaaagttaaatcatgtgttattaattgtctttatattacaaattgcattagagttcctctaattagtttatatataataaatagactaatttgttaagatttttctgacatcctttttttgctacagtgcccgacataatggtaaaaacacctcactaccctgctggcactgtgccagaccacaattctggccgcgtccttacgccctacaatttaatataaattccacctgccaacaggtaaatctggtggtctcccttttactctgggaccctctctatcgcacacacgtagactcgtttgggtttttggggtcgcgatgtgagttgcatttctgccttcatcaaattgcattccaaaactatttgtggcaggctggcgaaaacgatgggcgagcgccaaggatatttgaaaggagttgatgtggaaggccaattttctgcagttttcctgcattacgttgccagttgatgtgattgcagtcttcagggtggaaactcaagtttggtcagcggaaatgaaaagatcaaggcgacattgtttatttattagatcaaagggcttttcagcgaagttcaactggaaatcgtcagtgcacacgtacacttcttgttgagaatgtccttaaataccttaactataatgaattgtaatagtattctgctaagtgtgcatgtttatttacccgtaatcgaacacatatttttcatccatcgttctcagtgacttattccgcaaagtgcacaaaccggttttataacccgactactgtttaggatttgcgtatatccttttatataactgccattcagagtcggtgaatacattctatgcaattacatttggctctatccgaaaatatgacataatacaacattttattaactcacacaaagttgggaaaaagtgccatgaagagggggggcttgggggccgagaaaaatcaccatcatcagcagtttgttggaagggcgcaggggggtaggcgcctgcaacgccccctaatctgcgtcgctggcaggcagcagtgtggcacaaatttcatttggtttcgctcttgttttttatgcccgtgagtctcgcccctcactattcataatggagcagagttactatttttttttgtacccaactatatccccataacccccggcttcttctcggctcttttcgacgtgcccataccgtcattcacgtacgcttcgtcgaaaagtaagccccaacaccctgcggcatgtcctcgtaatccgtttgcagcctagcccaattccagttgctacactcgcaaaaatctttggtttctggggcataaactatggctacaaaaaaggtattttaaaaccaaacaaaatgctaaataagtaaaaatacaacacaatccggaaataaagggaataaagggggtggatttgtctgtgtgtaaggccgagttaccaactcccggtccgagttttccgccatgctgactccgtgggcgtggttttttttttgggggtggtggtggtgggccagggatcgcgggaattgttgtcaactggttagcctggttatgtgcatatgggagtcgattggggccgtgcccaaaagcccagagcgtcagtttatgtggccataaggcttataaatagcccaagtgtgcggcatgtcttgtgcatttcaagcggatttttgttagtagggtaaaaaacattgtggatgactaaaattgatttta

SEQ ID NO: 31493 - DNA, 1596 bp, DROSOPHILA
atggatgaaaaatatgtgttcgattacggtttccgcatcaatcgaatagaatcaccgattttgaagtacgaaggagactgcggagaatccctgacgatctacgattccgaccatgccgatccagcacggattatcaagaccttctgcgacacattctcgcgaccaatggagaaggtggacttcgtgagcaccagtccctcactgtacgtgcagttcgactcgaagacgggcagctatagcggcagctcactgtactactgggcgcactacgatttcttcaacaatactcgttttggtgacccagtgccaaataccctatgtgacgaggtgatgtatgcctggaagcatccaggtggacgtcttcgatcgcccttgaattcactgattttcaagcgaaccggcggaagcgatgtgcgctgtcaatacaaatttgttaccgatcgaagactctatgcccgagccataatcgaagtgaattctgtttccttcaaggaacttccgtataatagtaacgcgtgcactcggtgtcacgaggagcgagtggataagctggtgatctgggaggagcgggataagtaccaaaataacctggcctgcttttgcgacaacatcccccgagcggttagagttatatcctcggcagatcaaatgaatctggaaatgattgtgcagggacagcatgccattacctcgtacttcaagaacccgaatcctctcttcgaagctacttatgagtttgcccatggtcctttgtgcggtcccattaccctcggaccctcgccagatggcgaactggtattcccctacaagaaggccttggccatggtatcgggacccatggcaccgccagagcatcattatcgccgagagaaatgcatttgggaactgaaagtggccgcccagagggatctttggctgaacttggaaaaagcacgctttgcagatcgcagctgcgatagtgccaagatcgaggtctatttggcgggtcgtctggagccccgatttgtggtttgccccgaaaatatatccttagccagggatttgcctatcctgaccacagcggagttgggagccacgggtgccgatcaggaacccctgcccgtgctcatccagtatacgggggatggtcaaccaggccgaaacattttccgactggtttggacggaactctttcacctgccacgcaatccggacggcagtctggctgcctccctccttcaggatggcggttgtgatttccgatgtcctggagacacggaagtctgcattccaaagcacttactatgcaatggaatagcaaattgcccaaatgtgacgcacacttcgacgttgtcgcaactcacaagacatatagaatggaatttggagcaactgggattactccatcatgctggcgactatcagcagttggtgctgcatgatgaatcccccgagatctgcctgaaacgcgatctcagtgagttgccatatggaaagttatccttgatagcccttggactgtgcctcatgtttgcactgctcttcgcgattctaagaaggatgtgcagaagctcgtccttacaccaaggaaggcatcatctgcaggaggattactaa

SEQ ID NO: 31494 - protein, 531 aa, DROSOPHILA
MDEKYVFDYGFRINRIESPILKYEGDCGESLTIYDSDHADPARIIKTFCDTFSRPMEKVDFVSTSPSLYVQFDSKTGSYSGSSLYYWAHYDFFNNTRFGDPVPNTLCDEVMYAWKHPGGRLRSPLNSLIFKRTGGSDVRCQYKFVTDRRLYARAIIEVNSVSFKELPYNSNACTRCHEERVDKLVIWEERDKYQNNLACFCDNIPRAVRVISSADQMNLEMIVQGQHAITSYFKNPNPLFEATYEFAHGPLCGPITLGPSPDGELVFPYKKALAMVSGPMAPPEHHYRREKCIWELKVAAQRDLWLNLEKARFADRSCDSAKIEVYLAGRLEPRFVVCPENISLARDLPILTTAELGATGADQEPLPVLIQYTGDGQPGRNIFRLVWTELFHLPRNPDGSLAASLLQDGGCDFRCPGDTEVCIPKHLLCNGIANCPNVTHTSTLSQLTRHIEWNLEQLGLLHHAGDYQQLVLHDESPEICLKRDLSELPYGKLSLIALGLCLMFALLFAILRRMCRSSSLHQGRHHLQEDY

SEQ ID NO: 31495 - DNA, 4609 bp, DROSOPHILA
aagaccgagcaaacaaaaaacgagggaggcggccgcatccgaaagcaaaggcaaagccatgacatgttacttaaatgagcaactttgttggaaacaatgtcgacagcgtctagactcgaaactcgggacccaggacttgggactcgagactctgcgacaggcagcaggacaacagctcccacactcccaggtggggcgattctttcaggaggctggggcaggaagagtagggtaaggtgtacgaggtaaatgcaaactgacagttacgaagcggactgcgagaaaatcttcctaatgggctgcctgtttgggcatatccttgctggggatgttgagtttgcgtccaagtttcaatatatattgcaggaaatgtatctcaaacattgtttgttgaccatttttatacaatatttaatctattaacttagttctatgaacattcttttgttagcagtatcactttatgttacaggtgtcatatgctcccgcaatatgtaagggtattctatgtttcggtcattatatccttctatttcttattgccgctcttgttgttgcaacttgagtgaagtttgcagaaacaacaaattgttaaaaaaaaaaaatggacgaaacaaccacaacaaggttggcaataacaacaagcacaaggacaacaacttggcccgaagagcgggataggtaggtttgtgccgagcgcagttttccattgcatttttcgtctacttcgaacttttcaccaaaaagaaaaaaccaccaaagccacgtagcattggccatctctttcgcccagcgtgtagctctctctttcgattgcttaccctattcggttgcattttgtgcactgtaatcacgcaatcatgttgcccacttctgaactcttaatggcaatcggtgtaaacgtgcgcacaacttttccagcacccagcgcccattccaaccgcttttccgcccacttttcccactgccctgttatccagcaacaatgggcttacgatagttactcgatgctctcttggaaatcctgcttccttctgtaggtggacataaatatttatcttttggcaaaaacttgcttgatattttaaagccccagtctccgcccgatctttccagcatccccatgtgctgttgtgatgtttgtccggaacacatagttttctttagccgcttccaacaaaaacttggcaatgttgctagcaatttctgcataaattacaggggactgcaacattaagaggttgtttgggttcttcaggtggagaaggtgctccggaatcattgcaattgcagctggattacttgaagcaaacttgtgtaaatggaagtacttgggattacagggaagatggacgttaagagacagacataaaggtagttaaacgccagttcaaaaccaatcccaaataaaatcataccttgctatggaaatgaaacagaaatctatagagatcccaattgttcctcatttttctcttgaaataattaattatttttatctacttaagttataccgtttttaataaaattcttttaggggaatctttttgaggcacatctttaagagcaatttaaaatgtacacccctatctaccatatctgttttaaaactcccacctttattttgtttccctcgcaatcattgatgtgccccaaagtgtcagtcgaaaaacttcgccgtagtctttgccattcgttgtggcatgcaaagccaaaaaccgcagcacaataaaatatttcgcagctcttggtgggaaattcagtggaaaatactcaaaatgaaatgcacaatcaatgcgacatttggccaaaaagttcagacacttgcgcagcaacattccacacaccgaaatcgtcgacaatggcgacaaagtaatattgtatatatatatatttggatttatatgcgagtattctcacaaagaacaactccagctcaacacgttaaattaaaatgtcacataaatctttgcggaaaatttcattaaaatacgcttacagcatagagcgcaatgaggaaccccgaggattgtcccagaagaaagaaagggatgaaatccatccgacggagcaagtgcaaaccgcccacatagccgcaaaactttgcacttgtagcgaaaaggccggccaaaggattttggactgcggagagggatcaacttggatagtccttgtcgggctaactggttcaaaaatggaaattttaatggaaaaacttgtaaacgcaaaatggcaagtggtgaccccgatcttgagtcgagctacgagttgggaaatgttttcacagacatgataatttaaaaaggaacttgaaacttatttgatttttgattaaaccaaaactttgtcagcaactttgttgtgaccattacctggagaatcgatggctttttcgccgcaaatgtatttcaatacgataaagccgtttatgccgtttttaagtttttcttgcaaatttaaagattaatctaatattaggcgttggaagattttcgaatgtctgcactattacacagtaatcatcagccaattctaactaccacatatctgctagctggacattccagagaaattttccaatgaaatgaacgatattcccaatgcctacctggggaaataaaggcgcacaatttcaccgacatgtcctttgatgtggtagctgcaggacgtattcggcggataccagtgggcgatgctaaggaagatgccctcgctggcgctgctgtcctttaaagaatcggagctcagtagccagtcgcagacgccgtgcttgatcccagccgtctccacatgacctggccagttgccaacgttgaaatggaagcctgtattgagcagcggacccgccggcgaagtaacaaactccacatacatgtattgtgatgtgcctgtcggatatgcaaattgtttagatggcggccctccacaggacacggccttgctactcaccaataatgctgaatgggaacttgcccaggccgcagaacttcccaatgagcggcgagtgctcatcacgtccatcgtatacggccaaccagtcgtagggacagtgctcattaccagatccgatcggcctgatggggcaggtcatcacattctcacacctgcaatatgaatggtcactttatgattactgccgcctgtctttgttgcgtttatgaaagcgttgaaagggtaaatttcattttcccaacgccagcaattgaataaaaaaattgaaaaagtgaacaattaaaaaactcacgttccacaaataacgaagaaaataaaaggcaaaaaaaaaagggaataacaagtgaggctggcaattgaataactgactgagtgctgatgcttttagtgcctggcggaaatccatgaaaaaatgctgctgaaacaggggcgcgatcaaaaaggggagtttttgagtaagaaccttaactgatttttatgtgaacatttttttaatgtagcttaaggaaaggattgatatagagctacgataactgcgtttatgtttcatttaaattttgattactctaaaacgtagaaacatttcttctcttctttcagattcagatgtaactttaagttgtttcagtcttacggcagattagtcgacttttccatttcgcaaatgcttttagaatggacttgaataaatgattcgtaagcttcataactacgcccatggtcttgacattcatttgcactttgccagcccgaggaagcaaaaaagcgggcaaaaaaaaaataaagttctccgagaaaaacaagaaaaaaggctgcggaaaatgcgaagcgtctgctctgaagccttttctaatttcttgcgtcagacagtcgaggatgcttttaattttttgccggccgtctggtcgaatagcacataaccctgactcacggcccaaagcactgggcccagacaaagtgacctttgtgcccgtctattgatgatggccacgatgacggggaatcacaattttacttccccctggcggagcacactgattggtgggcagttcaaaaggcaaatgaaatgcctctcacctgcgcgtgtgtgtgtgtgaatgtgaactttctaattgaaagccaactttggcaattacgaactgaactttaatcaaatagagaccgattcagtgagtcaaagccgaaggcagttgaatgtgatttggcaagtgaaacaaaaataccaatttaattgacagtttcattgagcctttccgtcttccctgaattctctaccatttttttgtttttttgaccaatcgcaagaaagtttttggagcaaagttttgagcaacttttgtatctatatccatctatacgtagcagaaagatagatttctattagctagtcggttcgtttcagtcaatttaatcactttgtcagcaagtttttgcccgagtctgcgaagagctaatccaacttattgataataaatgcgttgttggccagaaagttgattacaaagaaggaggggacagagaaaatggctgtttagtctggggtaaaagtttttcgcccagcccgttggcatgggcagcacacatatcaaaaaaaaaagagcaaaggaaaagcgaagcgtaaaaaaaacatcaactgactggtaataatttcggcata

SEQ ID NO: 31496 - DNA, 492 bp, DROSOPHILA
atggaaaagtcgactaatctgccgtgtgagaatgtgatgacctgccccatcaggccgatcggatctggtaatgagcactgtccctacgactggttggccgtatacgatggacgtgatgagcactcgccgctcattgggaagttctgcggcctgggcaagttcccattcagcattattggcacatcacaatacatgtatgtggagtttgttacttcgccggcgggtccgctgctcaatacaggcttccatttcaacgttggcaactggccaggtcatgtggagacggctgggatcaagcacggcgtctgcgactggctactgagctccgattctttaaaggacagcagcgccagcgagggcatcttccttagcatcgcccactggtatccgccgaatacgtcctgcagctaccacatcaaaggacatgtcggtgaaattgtgcgcctttatttccccagaaggaagcaggatttccaagagagcatcgagtaa

SEQ ID NO: 31497 - protein, 163 aa, DROSOPHILA
MEKSTNLPCENVMTCPIRPIGSGNEHCPYDWLAVYDGRDEHSPLIGKFCGLGKFPFSIIGTSQYMYVEFVTSPAGPLLNTGFHFNVGNWPGHVETAGIKHGVCDWLLSSDSLKDSSASEGIFLSIAHWYPPNTSCSYHIKGHVGEIVRLYFPRRKQDFQESIE

SEQ ID NO: 31498 - DNA, 2955 bp, DROSOPHILA
aaataccgcatcaaaaacgcggcagccaagcagttgacaaaaaagcaatacaaaagtacaaaaaaaaaaaaatagtgaggaaaatctgagggaaaatagcaacgaaaagcgaacggggcaaagctaaatagaattcaagttgtgagctaaaaattcacatagatatgcgtctgtatatataatctgctgtatatatatatcagcaggaggagactgacggcgccagccagccaaaaaggatgcaggagacaggacgcaggacacgccgacagacggaggccagacaacagtgcagtccaccctcgccatagacgttccacccactcctgaataatgcatgcaaaaatacagaaaaggagaaaaataaatataaggaaaaatagaaaaataatgcacacacacaggctggcaggagtatctgtgtgtataactctcgctaagtgcgaaagtgagttgcatagatgcaaccgagcagatagagcaacacgggtcaggacatggaagcagcggagccaacagggagcaaggatgggggtcggcccgggaaaagcagaacgggggggttctggttggggaatgacggagtgaaaagggcgaagacaggctaccaagacttgtgtgctgtaatattttccttaaattatgtgataaatataaatatacagacatttatacgcgcacactgggaaaaatcaagttaagtttattaaatggatagtcaaaagaaggccaaatagcggggtgtataatatcctaaaggcaatctagaattatgcaatttcctactatacatacacattgtcgaataagaaaagatctaactttgctttttgagctctgctcttctgaaacttattctcactgcacaactatatttctttcggtgcagatatatatatctaaggcccgagaaatatgcaaggaaccaggacaaggggacttttgtttattagtgtaagtggcaagactctggcgacaaaagacaacagacggcaggacctcaaggatgcccgtctttgttgccacggcagtaattggaattctctcctggctggagcacaaaaatgaaaagtcccaccgagatcccggccgagatggcgaaagaaaatgtcctgcttgctggctcacctgatccgtaaagttgtccgtgtggaagagcaccttcacatagctggtctcgctgatgaatgtctgcggctgttccgcctccccgcaaaacattccgggctctcggcgattcgagacatccgtcttggcattgccatcaacaatctgcaacaatggatgcaggaaaactcgatttagtatgtcgcgtacgccatcgcttagcccacgatataaattagccgcgacacatgcggcgccaataaatcaagagtcggccactggccggccacacccacctgcaagtagccgccctcgcagtgggttgcattcagcagctgacccactttgaacttcttgaatcgcagacgcagcacaaagtcgcggggcgctcccttcagcgtccggaagcggtaccagcaggtcagcggacgacccacgttctggttgctgacctccggcgagctgatgtcctcgaagatgtccaccgtcttgttgcagtgatctctcgatacgtccgacgagctgccactgccaccgcctccaccgccgcctcctccgccgccgcctccacctccgctgccactgccacctaaagaaagaagattcaaacaagatatttattattttgcaagatattaaaagtgcaattcaaacgcagatatgtgtaattcaaaaattatatttctgtggcatgtgcgatttatactaaaatataactatattacgtggtaatgagcttataacattaagaaccaaaatttagtctgtaatctggtgatttgaatcttgttgatgaactcccaaattggccaacaatgtgattcacttttgaaccttaatcgcctcatttcggttgatgaaagcttaaagtcgtgctctagattttcggctcggataacgtgtgtgatgctttttgcaaatcccagcaacggattctaagttagttgcatgtgggcatgcttaaccgcaggactaggcttattaatctctagccgccgcttacttgggcttttatctaaaggagcagagcaaccagctgcaagctcctgcggccgttcctattcattgtgcttaatttatacagcgaaatgcataaatgacaaaaggacattgtgctgaatttgtaattcaagtctggctgttaacaatgccaccccatcacggtctttatttctagcgaagggacttcccccccatgcaaaagacgcagacttcgttgtccctgactgtgacaaagaccaaaaaaatgtgagaaggtcctgccacgccccctccagcgcccactttagcagtcaaggcgcgtaaaattttgaggagacctttgagaagaaccgaggagagaactgagaattcggaaggagaatcgtgtcgagagctgagttttcgcgtcgagtgtttgtgtggcttggcttataaattaccccaaaggcgagtgcatgtcctttgccgaggatcttttcgcctataatgcaaaaatattcttgtgcccaactttttaatcagagaagcgaactcgttgggattctgggagctggcaaacaaggaggttacgtgaccaacattttttgtcttcgcagtttttatcagttcgcatttctctgattgttttgctgttatttgcgtaactttttgccgttctttagttaaattatgaatgacaaatgcgggaggaatacacaaaagtacatttattgggtacagttgaggacaaagggtgttgaaaaaagtctttcacttccgcctttgcgcgctgtctttcattgagtgcttagcctaattaaacgaacttcaaggatatactgaaccaccacccctctaattgaatcgggcacataattaatatgagag

SEQ ID NO: 31499 - DNA, 510 bp, DROSOPHILA
atgaggcgattaaggttcaaaagtggcagtggcagcggaggtggaggcggcggcggaggaggcggcggtggaggcggtggcagtggcagctcgtcggacgtatcgagagatcactgcaacaagacggtggacatcttcgaggacatcagctcgccggaggtcagcaaccagaacgtgggtcgtccgctgacctgctggtaccgcttccggacgctgaagggagcgccccgcgactttgtgctgcgtctgcgattcaagaagttcaaagtgggtcagctgctgaatgcaacccactgcgagggcggctacttgcagattgttgatggcaatgccaagacggatgtctcgaatcgccgagagcccggaatgttttgcggggaggcggaacagccgcagacattcatcagcgagaccagctatgtgaaggtgctcttccacacggacaactttacggatcagccaggagagaattccaattactgccgtggcaacaaagacgggcatccttga

SEQ ID NO: 31500 - protein, 169 aa, DROSOPHILA
MRRLRFKSGSGSGGGGGGGGGGGGGGGSGSSSDVSRDHCNKTVDIFEDISSPEVSNQNVGRPLTCWYRFRTLKGAPRDFVLRLRFKKFKVGQLLNATHCEGGYLQIVDGNAKTDVSNRREPGMFCGEAEQPQTFISETSYVKVLFHTDNFTDQPGENSNYCRGNKDGHP

SEQ ID NO: 31501 - DNA, 3215 bp, DROSOPHILA
ctataaatcggatggcaaaactgtgccaaagtcagttgaaaaatttaatcaaccttgttgtgacaatcctggagaggatttgcaggtgggttggtcgtccctagagccacttaactataaatcttgtgccgctttaggaggtgcaaaattgtatacataaaatacttctacgtagtcgcattcgttgaggtaatgttttaaaaatgatttatggattcgcatccccatctcacaaggaaggagcaaaggacgaaagcagagcggcaggaagcatgggcatgtgtgaggatcggaggggagttcaaggagccggttcaggacccggcacctcaagtgctcggccagccatgcaattacatatatcaaggaatgggaatgggtctgaaaactcactgcggggtggcccgttcgccggagaatatggaggcttcccttggtatttttgtgcatgttacagaaggggcgaatgcataaattatttaaaattacccggcagcggcagaaggctcttcagctcccgtggagcagacccagtcttgtaaagtgcgtgttatattgaacaaatattatttggagtgcaataaatagatgataaatgtcttaaaggcgacccgagagctcctgcagaaagttaatcaaagcgtttgagaaatgggctcatctcggcaaaggaactgcatagttggcggtgtttaccgtcgcgaagaggagcaactttcttcggtgtttaataaacaaagggcgtcggctatattaatcatgacataaaatgttttcctattttcttagttgcaacttgctcttaaccccataactatttcgctaaactttcgagctaatgtactgctaagattccatttgttttgtattaattaagtaagggtgttttcattgcgaaacaatcaatgaataattaccatttatattcaattattatttaccccaattcatagttatattttcgaatacacattaaaaactttctacgaagtaaaaatgcctaatgcttggcttttgtgatcacttccgagccaataaagatttccttctcggcaaccaaagcagatttcttgagcatataatgcagatgcaggagacaacagaacgcgaaggcgatgcgaaacagcagtcgtctgttgggagtaaccaatccaaggactaatagccttctttgaaaacagctcctccttacgctctgaccaaaactgtcggtatcctgcagcttccagcggaagtccttccgctgcaaccatccatgcgtggccaggacctcctcgaactgtagtaaccgcgccacatgcatccaggatgtgtcctgcggagcactagtagtggccaccagctcgtcgagggtgtgcagcagagaccgcagcgtgttgacgatgaccgcgatctgaaagatgcgccgccacacgccactggaaaaagtgtagatagagctcaggttgtagagaacgatgagtaccaactgggggctcaggcaatctatacattgccgggtgaccttgacataggaccgatgcaatcgctgcagcgaaatctgtcgtctctgtagccttctaaccgctcgataatccgatcgcaggatctccaaacagagcctctcgtcaatggccgccatttcactgttcaccagctcgaaggacttcagcagcagggctagcacaatgctaatcaaatgcgaggtgacgtctatcacccaaatggtcatcgaaatgggtaccacgaagagcacaatgaagagcgctttccagctgatgtttatggggcccagaagtcccttgtagaacaatcgaaagaccagcagcttgagcactaattggaaggccaaaaaccaagacagctccaccttccgcctgcagagccgatgaagctgtggcgaaagtcgcaggattcgatttatcactcgtctacgctcctcgatgactcctcttggctggattagcagccagcaggagaaacccactagctgaagatgcagcatcaggggatagggatcgaggagtgccagcgtgaagaaaaaggcgcaccaaagtccaatcatccttgacaccgtgacgctgtagtacgtcaatcgcagctcgttgcaggactcatcgtagcggagtcgcatcaatcccaggtaatagaactgcgccagatagaagcgcagcagaaggagcacgtgcctgctgatgtaacggttgctcaagcgaagcgaatgccacggggccatcgatgaaatgaatccaccaactggatacgactgtttcccaatagaatggccatcgttaggtgcgtaatgccgccataatgatcttctgatgtccactaattagctatatggcactcaaatggacagatatagatagattgatataagcattatttaaaaatatgtacctttgccttattgtgcttttcatattttattcttttttgcaataaacacttgcggcaaagtgcgctgaaaatgagaacttgatgagcggccatggcaaccgactgtgtacattagccggaaaacaaaagcgtgctcgatggcttcatggccaagcacatttcagttagatgtactccagaattcttgcacttcatcaacacaatttgttatgcaattaatttgagtggcaaaaagtgaggaacttggtttgaaggcgccaaatggagaaatggctgatggcgaacggcggcgggtgctggatgtgaagtctggtaaacaagttttgcataatttccataaaatatttcataaacaacttgaaaaatggaaaaaaagctatgctatgcagctggagactgaggcgagggaagtccgaaaagaaagcaaggcaaactcggagcggtaattaaaaagttcacaaaagagtcgggcaccagggactttggaaaattgctaccaagaagaattccgccgatgacaaggcgtaaaacttgccgattgaatgcgaaatgtggcccgggcagccggacggactcctacccattgccaattcaaataaattaaaaaggaactgcgactcgttgccaagtttgtcaccgcagaaaaataatacggaaaaaatgctctctatatacatatataatacatatatatagaagatagatattaaaatatgtagatgtggaaaaacagcgcagtggaggcttgaaaggaaccgcaaactgcggtcgctgtggcttctctggtcagtggtcgttacttttgcactcttgttgttatttttgcggtgctt

SEQ ID NO: 31502 - DNA, 1215 bp, DROSOPHILA
atggccccgtggcattcgcttcgcttgagcaaccgttacatcagcaggcacgtgctccttctgctgcgcttctatctggcgcagttctattacctgggattgatgcgactccgctacgatgagtcctgcaacgagctgcgattgacgtactacagcgtcacggtgtcaaggatgattggactttggtgcgcctttttcttcacgctggcactcctcgatccctatcccctgatgctgcatcttcagctagtgggtttctcctgctggctgctaatccagccaagaggagtcatcgaggagcgtagacgagtgataaatcgaatcctgcgactttcgccacagcttcatcggctctgcaggcggaaggtggagctgtcttggtttttggccttccaattagtgctcaagctgctggtctttcgattgttctacaagggacttctgggccccataaacatcagctggaaagcgctcttcattgtgctcttcgtggtacccatttcgatgaccatttgggtgatagacgtcacctcgcatttgattagcattgtgctagccctgctgctgaagtccttcgagctggtgaacagtgaaatggcggccattgacgagaggctctgtttggagatcctgcgatcggattatcgagcggttagaaggctacagagacgacagatttcgctgcagcgattgcatcggtcctatgtcaaggtcacccggcaatgtatagattgcctgagcccccagttggtactcatcgttctctacaacctgagctctatctacactttttccagtggcgtgtggcggcgcatctttcagatcgcggtcatcgtcaacacgctgcggtctctgctgcacaccctcgacgagctggtggccactactagtgctccgcaggacacatcctggatgcatgtggcgcggttactacagttcgaggaggtcctggccacgcatggatggttgcagcggaaggacttccgctggaagctgcaggataccgacagttttggtcagagcgtaaggaggagctgttttcaaagaaggctattagtccttggattggttactcccaacagacgactgctgtttcgcatcgccttcgcgttctgttgtctcctgcatctgcattatatgctcaagaaatctgctttggttgccgagaaggaaatctttattggctcggaagtgatcacaaaagccaagcattag

SEQ ID NO: 31503 - protein, 404 aa, DROSOPHILA
MAPWHSLRLSNRYISRHVLLLLRFYLAQFYYLGLMRLRYDESCNELRLTYYSVTVSRMIGLWCAFFFTLALLDPYPLMLHLQLVGFSCWLLIQPRGVIEERRRVINRILRLSPQLHRLCRRKVELSWFLAFQLVLKLLVFRLFYKGLLGPINISWKALFIVLFVVPISMTIWVIDVTSHLISIVLALLLKSFELVNSEMAAIDERLCLEILRSDYRAVRRLQRRQISLQRLHRSYVKVTRQCIDCLSPQLVLIVLYNLSSIYTFSSGVWRRIFQIAVIVNTLRSLLHTLDELVATTSAPQDTSWMHVARLLQFEEVLATHGWLQRKDFRWKLQDTDSFGQSVRRSCFQRRLLVLGLVTPNRRLLFRIAFAFCCLLHLHYMLKKSALVAEKEIFIGSEVITKAKH

SEQ ID NO: 31504 - DNA, 3466 bp, DROSOPHILA
tcataaacaacttgaaaaatggaaaaaaagctatgctatgcagctggagactgaggcgagggaagtccgaaaagaaagcaaggcaaactcggagcggtaattaaaaagttcacaaaagagtcgggcaccagggactttggaaaattgctaccaagaagaattccgccgatgacaaggcgtaaaacttgccgattgaatgcgaaatgtggcccgggcagccggacggactcctacccattgccaattcaaataaattaaaaaggaactgcgactcgttgccaagtttgtcaccgcagaaaaataatacggaaaaaatgctctctatatacatatataatacatatatatagaagatagatattaaaatatgtagatgtggaaaaacagcgcagtggaggcttgaaaggaaccgcaaactgcggtcgctgtggcttctctggtcagtggtcgttacttttgcactcttgttgttatttttgcggtgcttgtcctgccagcaccgcatcctggcatccttgcatacttacatccttttcgccttgcagagtgccactgctcattattgtcggcaatgtccaggcatcggaaattggaaaagtttcctgccttcgtgacaatccacactttcgctcacacgttctatgaatattcaatgcagtcatagattatattcaattgatataatgacgtaaataatagttgacagggtcaagtacaggatgaatttatttttaagagatttataaataaacatcaaacgaaatgctcgagagttgctaaatatttactacaatttacaatgttttgctaaacagcaaagctctctctctccctctctttgccatttctgcccctcttttaaccgttttctctttgggacatcagcaggggtgcttttgaaacggtttggatttatctgagcggttgaaagtggggaaaagcgatgttttccatgtaacaaacaatacggttcaaatgaatataactacaaccgtgagatttaactactatcggcaatatcccgacgcaaccaatcgaccaaagcatcacgggcgcattccgcatcagcatccaggcagaacaacttgcagatgtcctgcagccagttgccaatgatgtagcgcttaatgcacggcattacacccaactcccgaaacactttaaggcaataaatttgcaggcggggattatccgtcgtcgaagtcatgagacgacccacataacacggcagttgggtgaactccctgctgcgccacaatgcccgcttgctatggagcccattgagcagggccaaagccgtatattcccagttctccaccttctggcgaggcagcaacattcgcggattctcatcgggctgggcaaagacgtcgtaaagcagctttacaccatccacggcatcgaaacgccgctgaccctcagcacagcagagtagcagcgcaaatgccttggtgttcatgtcccagaagttggacaagcggtttaggatcctcgagtgcagcagctcgaagaggcccagctcgatgccccgatcgggtgccacttccagcatgtcacacaggtgatgccacaaatgcaacgggaattgcggacggcatggatcctgtctgaagatctcggctaaggcggaaaagttttcaggatcctccaggaatatacccagaactaggaaaaaatataacaccgttaaatccaatgaagtgcatgcagagctcaccttttggcttgcatgtcaaatttcgcaatatctctgaagccaattcatccttaataggctcttggttcttaatgattttataaaactccacccttaagcacttgcggttggctatattttcggctccatccaaattgcgggatagtatatctttaagaaataaaagcttattctaagaattcacacaaccttcaacttactataaatccttagatacatctccacctcccggtgctcctccttgtgatgcttcaatctcatacgcataaaggcattcttcaacctattggtaggatagaaactggatgatatcaaaaaaaaaaaactcctcaatgcagacaacccactttctaacaaggtccatttcaatgatagctctttgggcattcagtggatttagaacgaattccgacaacgatacgactgccttccaatgggtcagcctaacatcactatccagttctttgagcaatttgggcagtgcaaaccagccgtaggccagttcagcacgatccgccaggtgcgtcgaggtcgaattgcagcagagcggcatacacttgcaaatattccgtttctccatatgatgcgtccactctgtaatccattttttttatgattatccttcgctgattatatatcgcaactaaattacccgtagtctgcaagctgtttatggaggtcggcttcatcacatccttgatttcgtgttgcagaaagtgattgcgatatctcgctagctgctcccacattttggtttaatggtttgttgttattataatgagaaaatacaatacgtgtcaaatgccagaacttttttcaaaaatcaacttctattctacgtttcaacttaacatttctgttaggaaaactatgtttctgtactgtaaagcgccattgcggctgagaacgtaacccaattggttggaagctcaactgcgtgttgaatattatgaaaaggttcgaagctcggatgcaacagctgttcgtcgcctgaaatcgatatatcgcaatttggttgatatatttcgccgattcaatgccgctgcatttgtgaacggacgccgagcgagttactaccgaatattagatgcggactgcaagcgcagctatacgagaatataccgacaggcacgcaaaatatgcaaataccaggagtgcatctctattgaccggtcaaatactcggcttggcggatagtgcatttgcagttgcaatttcatcaatcgccaaatgcacttgactgaaaggctgtacaaaaaaacaaagagaaaaaacccagtgtgcgtgcgggaatatgtaaaaaaaaaacgagttaaataaatagctaaataacaagcagaaagcagaacgtaagtatcgaaaaagcgcagtgtttttgttgtgccggctgaaataaattcgattgtgtgcgcgcgcgtttgtttgtgtgtcggcatgtgcgtgtgagtgagcagacaacaaaaggaattcggctcgctcaacttcttcctagtttaccgttacttgcactgccaaaatcgcaaaaaataaggggaatagggagataaataaataagccgacgaatttcgaatagcataaatagtagctcctgccaaaaaaaaaaagaagaaaaatcagagaaacgtcagtcaaatcgaaaaacagaaatggccttgataaaactagcaaggtgagtttttattctgttttctcgctaatattacctataaagtatgtgtataggaattttcccgttgaaagttgtagtc

SEQ ID NO: 31505 - DNA, 1242 bp, DROSOPHILA
atgtgggagcagctagcgagatatcgcaatcactttctgcaacacgaaatcaaggatgtgatgaagccgacctccataaacagcttgcagactacggagtggacgcatcatatggagaaacggaatatttgcaagtgtatgccgctctgctgcaattcgacctcgacgcacctggcggatcgtgctgaactggcctacggctggtttgcactgcccaaattgctcaaagaactggatagtgatgttaggctgacccattggaaggcagtcgtatcgttgtcggaattcgttctaaatccactgaatgcccaaagagctatcattgaaatggaccttgttagaaagttgaagaatgcctttatgcgtatgagattgaagcatcacaaggaggagcaccgggaggtggagatgtatctaaggatttataatatactatcccgcaatttggatggagccgaaaatatagccaaccgcaagtgcttaagggtggagttttataaaatcattaagaaccaagagcctattaaggatgaattggcttcagagatattgcgaaatttgacatgcaagccaaaagttctgggtatattcctggaggatcctgaaaacttttccgccttagccgagatcttcagacaggatccatgccgtccgcaattcccgttgcatttgtggcatcacctgtgtgacatgctggaagtggcacccgatcggggcatcgagctgggcctcttcgagctgctgcactcgaggatcctaaaccgcttgtccaacttctgggacatgaacaccaaggcatttgcgctgctactctgctgtgctgagggtcagcggcgtttcgatgccgtggatggtgtaaagctgctttacgacgtctttgcccagcccgatgagaatccgcgaatgttgctgcctcgccagaaggtggagaactgggaatatacggctttggccctgctcaatgggctccatagcaagcgggcattgtggcgcagcagggagttcacccaactgccgtgttatgtgggtcgtctcatgacttcgacgacggataatccccgcctgcaaatttattgccttaaagtgtttcgggagttgggtgtaatgccgtgcattaagcgctacatcattggcaactggctgcaggacatctgcaagttgttctgcctggatgctgatgcggaatgcgcccgtgatgctttggtcgattggttgcgtcgggatattgccgatagtagttaa

SEQ ID NO: 31506 - protein, 413 aa, DROSOPHILA
MWEQLARYRNHFLQHEIKDVMKPTSINSLQTTEWTHHMEKRNICKCMPLCCNSTSTHLADRAELAYGWFALPKLLKELDSDVRLTHWKAVVSLSEFVLNPLNAQRAIIEMDLVRKLKNAFMRMRLKHHKEEHREVEMYLRIYNILSRNLDGAENIANRKCLRVEFYKIIKNQEPIKDELASEILRNLTCKPKVLGIFLEDPENFSALAEIFRQDPCRPQFPLHLWHHLCDMLEVAPDRGIELGLFELLHSRILNRLSNFWDMNTKAFALLLCCAEGQRRFDAVDGVKLLYDVFAQPDENPRMLLPRQKVENWEYTALALLNGLHSKRALWRSREFTQLPCYVGRLMTSTTDNPRLQIYCLKVFRELGVMPCIKRYIIGNWLQDICKLFCLDADAECARDALVDWLRRDIADSS

SEQ ID NO: 31507 - DNA, 3395 bp, DROSOPHILA
gccaacaactgagctgcaggctacgcacacggggttggttaagaattcaagaaatatcaagcgtaatccgcaactaatcatataatggctatatttacagctcgctgtcttgcactccgattgcattccgaatcgctgtatttaatgttatatatactcgaatatattgggccactctggaggagaactcctggcaatatccgcacttcgcatggaatctatgttactacctgtttgtttgtttcgatagtttctagccggaatcaaactgaatttaaagtaaacaaataagttccacatagctaaagcccaaactaccccactccggtactctcttttttttttttttacttactggccagacgtactcaacccaattgcaccggatttgccgagggcgaagaatgaatataatgaagtatatgggcgacaaagtattacactaatctgcataaatgtaatgtttaaataaattatagccgtactagtcaaattatgaagtaaagttataaaaactgaagaagcaatagaactctgtaaaagattccgattcgagcgacacacccaaacacatgtatccattgttattgaacaactattgagataaattacatattattccacattgttaaactatcgttgtattccgtcaatttgaggctacatccggatttctgtttcagttgactacaaatatatatcaatgtaattgagaaattccaattgctctgttcaaaagttgaagttacgcctaagattaaccaagtagcatactacaaaataaaaaagttggaccgtcgtagtcgctgctccaagtgaatattcgcaaaatgcattggaagttaataaaactcaatacaagagtcaagtaaaattacctgagagttttcgtaattaattgatttatttattcaataccagcttatcaagccaactcaattcaaacagaaacttaacaccgggagctgaacaagtcagtagtattgggcagctggatggactagaaccatttgggcagagcgtcatggggcaggttcttatggttgggcagcgccgtgcagggacgctgttggcgccagaactcctgccgtttgttgagaaactccaccgcctcgcgggcgtacgcggagatgctctccgtgtgtgtgtccgcgcggaccaaatccggatggagcagcaacttctccaagtactccttgtccacgcacagttcgcccagcagcttgcgggcgttgcgtcgttccagatccgctcgactgggtttctgccgcgtcctggcactggtccccgttgctcccgctgcctgggatttaggtgtatcctcgccggacttccgtgactttccgctcttgggaacagatgctgttggtcctggtggacccggcttgctgccgatggtgttctcgatggcctcctgcgttttctgaacgcccaggcgaaacaaagccagttccggacgagccctcagaccgcgatggaagaacatcaggctctgctcgaactgaccgaggtagtacagcgactcagccttctggtagatggcccgaatgttgttcttgtcctctccaagagccgtctccgcatcctgcagtgccttggaagcctcgcccagcaacaagtagcacttgctacgcgaaatcaaagcattgatgtcggtgctattcagctcaagagcctgaaattttaaggttttgttagctagtttttaatatgttatggcagatcttagaaaactaaacgggacttaacagcggtatagattctattaaaaagagaaaacctgcttaactagatgactctgaaatctgaacagttccaataatgaaaccaggagcaccttgcaaaaaaagtgtatggcgttctcgggattggcattcttgatctccttgagccccagtgcgatcaccgaactgatgtccgcctcgtccgggatgagcagtgcctcgttgcggtcctgcttctgcttgatctggagactctgcttgatgtcaaatgcaccagcgctgaccgctgccgcccgatctttgtccgtgtagaagtcgacgaagttctccttgggcttcttcttcttggcgatctgctcctcgatctttttgcgtgccgccctaagttcggcctcaatgcgattgccccgcttgccgcccgcagcgtcgcctcctgctcctcccccagctcctccgtcatccccctgctttccatcccgtccagcaccgcgtccgccccgatcagtggactcgcgcctctcccagatgggaggcttgtgggagcgacccttggaccgccgattggtctcatcctgtgactcctcctcagccgctgctccggtgcgtatgaagctttgcagcagttcctgctccttgtccacagcaagaatggtgttcagcacgttcgacatatccttataatacccttggcaatcgctgggaagaatcttcaacgtccgacgattggagtaatccaaaaaactcaacttctgaccaaatcactagccaattgattggcgctataatgggttgttgccaggaaactggcgccaccaaatgggttagcaatcgataacaaaacaaccactcgtgctgtgccaggtgctacatatcaggtgtcaggcaccaggtgtcgtgtcgtttggcggtgtgaatgccaagaacaatggcctccatgtgggtcacgaccttggggacgccctattagaaggtgagaatgcatatccactccgatctatcctcttttctcagtggtcctcgagattatcatattttaaactaattttttggttaatgcttaaggaatcgagttgggattttgttaaccatgactggcttacggggcgtatgagtaactttcttgatatgttttgagggggactttaatttccttaaaattacgcatattaaagtagctcctttataacactaaaactatcaacggtatcttttctcaatacgttttttgtttgctagcatagaggaataaattggcatacgtgtcgtatgagtaatataaaaaaatgtaacaaaaaaaccttaatgtaaactaaaacttatcattaaacacttgaacaatcttggctataaaaaaagcctttctatagtgtttctatatggtgttactctacaggtgcttgttcaactacgttaagaatgtcaaactgtgctcctttgttgtgaactaaaacctgtgcgaagctttcaggagcttttagcggatgtcctttcccgctaagtgattatccttcttcacgaacaaagcattaaatgcttaaaagtgaaaatgaaacacataaaatatcaccgccttcgtttttatgtacttttcgaaaattatgaaattaaataaaagtacatagattacttttatcttaattacatattttttaaatgcgataaaacccgttt

SEQ ID NO: 31508 - DNA, 1233 bp, DROSOPHILA
atgtcgaacgtgctgaacaccattcttgctgtggacaaggagcaggaactgctgcaaagcttcatacgcaccggagcagcggctgaggaggagtcacaggatgagaccaatcggcggtccaagggtcgctcccacaagcctcccatctgggagaggcgcgagtccactgatcggggcggacgcggtgctggacgggatggaaagcagggggatgacggaggagctgggggaggagcaggaggcgacgctgcgggcggcaagcggggcaatcgcattgaggccgaacttagggcggcacgcaaaaagatcgaggagcagatcgccaagaagaagaagcccaaggagaacttcgtcgacttctacacggacaaagatcgggcggcagcggtcagcgctggtgcatttgacatcaagcagagtctccagatcaagcagaagcaggaccgcaacgaggcactgctcatcccggacgaggcggacatcagttcggtgatcgcactggggctcaaggagatcaagaatgccaatcccgagaacgccatacactttttttgcaaggctcttgagctgaatagcaccgacatcaatgctttgatttcgcgtagcaagtgctacttgttgctgggcgaggcttccaaggcactgcaggatgcggagacggctcttggagaggacaagaacaacattcgggccatctaccagaaggctgagtcgctgtactacctcggtcagttcgagcagagcctgatgttcttccatcgcggtctgagggctcgtccggaactggctttgtttcgcctgggcgttcagaaaacgcaggaggccatcgagaacaccatcggcagcaagccgggtccaccaggaccaacagcatctgttcccaagagcggaaagtcacggaagtccggcgaggatacacctaaatcccaggcagcgggagcaacggggaccagtgccaggacgcggcagaaacccagtcgagcggatctggaacgacgcaacgcccgcaagctgctgggcgaactgtgcgtggacaaggagtacttggagaagttgctgctccatccggatttggtccgcgcggacacacacacggagagcatctccgcgtacgcccgcgaggcggtggagtttctcaacaaacggcaggagttctggcgccaacagcgtccctgcacggcgctgcccaaccataagaacctgccccatgacgctctgcccaaatggttctag

SEQ ID NO: 31509 - protein, 410 aa, DROSOPHILA
MSNVLNTILAVDKEQELLQSFIRTGAAAEEESQDETNRRSKGRSHKPPIWERRESTDRGGRGAGRDGKQGDDGGAGGGAGGDAAGGKRGNRIEAELRAARKKIEEQIAKKKKPKENFVDFYTDKDRAAAVSAGAFDIKQSLQIKQKQDRNEALLIPDEADISSVIALGLKEIKNANPENAIHFFCKALELNSTDINALISRSKCYLLLGEASKALQDAETALGEDKNNIRAIYQKAESLYYLGQFEQSLMFFHRGLRARPELALFRLGVQKTQEAIENTIGSKPGPPGPTASVPKSGKSRKSGEDTPKSQAAGATGTSARTRQKPSRADLERRNARKLLGELCVDKEYLEKLLLHPDLVRADTHTESISAYAREAVEFLNKRQEFWRQQRPCTALPNHKNLPHDALPKWF

SEQ ID NO: 31510 - DNA, 17643 bp, DROSOPHILA
ttatggcttaaaagcatttacacttactcaaatatatagcatacataacatggctttgcaaaaatggttaccaattttgttgactcaatgaaaccactcagttgctcagtttttgaatgacttcgtaattttatttataactgcaatgattttgattcggaataaaatgttatgcaattgctgaataatacttctaatgacaccaagtccaacaacaatgattgagttaataataaggataataatataaatatgcattatgttcacttccaataattatcgcccaataaggagtttaacaaacgtttaccgaaaaccacagatgatagataatacctaaatactttcgagattatcacaccaactctcgtattgcacattgaactaaagaattttgaaatggaatgtggcgagtttcgttgaaatgccctcggttgtgcttcagtatttcattgttaacatatttctcttgtttgtgtgtgtgtattgctctaggggattaagtcgtacaatagtcgattctaaatatcgtatgtatataattacattaattatttgttgctgttgggttttaacatgttcagtctagtaagatatttatgcaaagaggcgcgctcctaaatgtacatacaatcatttacacccgcctataaaaggtatagatggagctgggtaattaatttcactaacttggtgctaattctatatacaaattttatgtgcggcttattttgttctctgctttagccatttattaagtgcagcctgggaagacgcgaacgaattatcggtgattttttagcatgggcctgccctttcttcaggttctctattgggtcttttcagtgtgccatggtatttggtttattgcacttttcattgacttttgaacttttgcctgtggcacaaaacactcccgcttacaacatacatcaacaacgagccacaaacacacactccacatgcacacacttatgtatatacagatcaagccctaagttcagtagacggtggagttccgcggaccgattccaggtggctgggactgtggccgtatgctggtggagccactggaaccacctgccgctccgccgtaaaggaaacttgattgccggatgactgataccgtggcggctgccacgccagcttgaggaggtggagccggtgcccgatgctttttcagtggagcgtgcgccggctttagcactggagctaatcctcctccgaacccgccaggattaggattcgaggtcgtattattgttgcttgccaccgcgttgttgttgttgttcacgctgctgtttccgggtgctgtttgcggaagaatcggagtagcggggagaaagatatatgtacaaacatggatagatatataaaatagcgaagactaactaagccaaaaggagctgctatgatgcaagcgaaaacgaaatacaaatggtaagaacacttttagtgcaatatgcggcagaagtgacaatgtgcacaatgtgccttgaaattctgaaataaagctacaaaaatatttcataaaaatcaaaattatatagattgaagaatatttttgaagtaataatcttctgaaacggacaaatgaatttgaaccaatgaccaagcgaagaaatctgccgccgaggcagcccaaaaactggagaaaacttaaacacaaaatgaaacaaatgaaatatgttcatgtattttatccaaatgaattttggtttattgtttcttcaaaagataacttcgaaactaaaacaaacaattactcgtaatgtgcctgttgcatactaaaaattattcatcgggtataatatatatgcatatatatagagacgttggtaggtacaatatatataaaatgatagccgggtacaaaagtaaaggcatgcgctacatgtaggagaaatgtaaatgggggcgcagggaaatacaatgcaatatgggttggcttctgtttacatatacacgtacatataaagttatagtatagattgggtaaaaatataactatgcgtaataatattgtgtgtgcttagtggtaatatcgcgaggggaagcttccatagtccttcccttttgaaatgtaacaaaatataacattaaaatttataaaatatataatgtttggataaagctattcaactttagtgttatgcaatcaatatacaaaataacattcctccgctgcgctttacgcaatcatttcattgcttgttaacagtaaaataaacaacaataattaaaaagattactaaactctgcgggatttaacatatatatgtgtgtgctgtggattgtaagcctgggctttcccttcctatacaataataatctatactggtagtaatacacttttaaaattaaaattatttagatatacgaatcgttgtatagatcgttcgagttcgaaactaaaatgccggagcgtgtgccttaagagaaaactaattatataacagcattccgtgtgtgtgtgtgtgtgtgtggtgtgtatataacaataatcgcagttacaatgcatctaaatgtttatgtacttaaataaaacactcacaaaacaaacacactcgctcacacactcgactacataccattggtggccttaaacgtgcgactaggatagactttttgtatatttagaaacggcggcggcttggggaattcagtgacgttgtggaatcgcttcccgaacttggtctccaagtcgttgaccagtcgacccacgctggctgcagctcctgctcccgagcctgatgacaagcccgagctgctgccaaactgatgcgaggcattggccatgtgcgttggtggcgtcgatggggcgttgggccgaatggatgagtgacgctgcggcggaactggcgctgatcccgatccggaaccaccctgtaagaaacgagaagtcacttagcttgattctactgcggtttttggggctatcatagcgtgtagttacgttgcgcttgctgttaagcatattgataaccttgactgactcgccactgtgcctcccttggcgatttatatggagtatcttcttaaaggagtacaccgtcttgtctatccagtacttcactcggtcctgctggaggagcacatgaatgcgggccactgggccacggaatacgcttagggcaatgggttgtgtgtaaaagcccagtgttttggtcacgtctcgtttggaaaatcaatccaccccgctcaacacaaaaataggtgagttataaacggaacactagcttggactgatatgaacaggcagtgcgcagccaggagcgcttacaaacaggtgagactgcgcaggcgcagtgagaatcttaatttaaacgaagacagatagggtgaaaagggtggcccgagttcaagcgagcaacaaatgcactgcgcaaaactagatgattacttaaggataagtgccgagcaaatatacatcggctcacccattatctggtttacctttaagagcatttcgaatgactaagaatagtattaatttacgtgctcagtatggtcagtcctagtttacttaaaatatatgtatatccctgacttcggccccacatctgctcaatacataggcaaaacgcccaaggtaaccacccaaggcatcgcagtccattaaagttcacctctgacattcgggccaacctgttgttctgcgctgatattattcctgtccgtttgctacttacattgctcgactgtcgctgtggaggcggcggaggtgggcagctgcggtgtggtggcggcgctggcggatttagaggacctccatttaggataataggtttgacattgtctcgcagcaacgatttgggactggcgcttgctgaggatggattggacgagggtgcgggcgtcggcggcagtggcggtgatggtgctccgttagacattccggcgcctccacggaattggtcgcgcagggcagccacgctattgctgctgctcgacgatgatggcggctgggtaattggcggtgagggagcctgagaactgatggccgagctctggataagagctgtgttcaccgcactgaacatcgtcgatccgccgatattgttcagattggtgttggagaaactgcgagccggcgtgggtggcggtggtggttttaccgatgggcgggctgtaaatgtatgttgaacaattagaacaagcgtaagttaaatctcatcaatttcaatattatcagtaaaatatacaattttgaattcgttaaaagattaagattgccgtatgggtaacaaaaaagataaaaccattcatttatagtttgaactttgaaattaccaaggaaaggactcttacactttggcgggttaggggcacatctcatactgcctgcactggtgttggggctgctggattcgctgccatggaactgcagtggaccgcgcagggtgcctaaatgctgctgggtggggaacacaaggccgttgacgataccggccgcaggcggagatctgtaaaagaaacttccccagattagctgaattcattttaggtcctcctcgattgttaaagccaaaaaagcaagaagcgtaagaaaaaccacaaacggagtttgatgaaagcagatgagcgttagctgcggtgctggattactagggtgttactgaagcttgtagctaaatctgtatcggtatacctgggcgacttcatgctgtggtgcctggtcaccgccggacgctgctgtccgttggccatcgccagttgattcaagcccggtggcttcggagcaaaattgggcttgccaaagctgatggccggcttcatcggcagctgaagcggtggcggtgtgggcgtcaccgacggcgtgctatctgccgttgagggtggcgaggatttatgcacagatgcataaccaccaccagaactcgaaccggaactagagccactgctgccaccaaatagagtggacttatttggcgccagattgcgtactgatcccgtcgaggaggttagactgctgtttaaggacgcggtcgaggcactcacggttgattttgaactatttacaaaactattgcctaacgagatactgtgggtggatttagatacagtgtgtgtgtgtgtttggtgtgcgaggataaccacaaagtcccgtcaaagtaatccgaaaataaagaagaaaattaagataaattttaacaaataatttacaaatgaaaaaccaaaatgtaaccgttccaaacagcaggctgtgtttgattatggggtctctacagtttagttggaatttaaatagtatatatataagtcttaaaactataatctgacgttgattattccttgttttaaagggaataccaaatatgaaatataatgaagtaacattctactttaacggaataaattccaacaactgtagatcccaactaaccataacccaatcatgtgcgctgctcgtggctggaagacgacacttactttaggttggccgccttgctcttgacacttccacttccacctccactcccactgctgttgctgccgctgtccgagagcgtgggcgatgccgctttgacactcgaactgttgccgaaggggggtgtcggcgctgtgcgggggatgttcatgcgctccaagatcgaatcatttgagttggctgactgcgatgggacagaaacggagaagaatggatggattagtggcgttgacaatgggattgcgtgcgacactttctgctccgctgttttcttaaacgtatcgttgcttgtcttaaatgagttcgccaatttggcttataacacatgtctgtgttcataacgaatgagtcgctgataaaagcattacgcatcgtgtaagctgaactaattaaacaaagtgtctttacagagtattttaaaagtcactaaagagtcaactagaaacatgatttaacttcgaatatcttcaacacccccagattgtctataattagaggacctcatccgtctttctcgccatgggtccagttctcacctttggcggttgcggtggtggtccccgatttgttctcagattggcttctgttgcattgatatgtgtgttgttggttggtggctgtggttgttgctgctgctgctgtttttggcgcttcaacgtcaagtgcttggtgagctccgtgttgaagtccatgggtccgttgctggcattcgaggcgctcgtcgcggcgggggggctgttgctccgctgctgagcggatgagttcgttgtggatttcgatgtcgttgttgctgccgagccggcggatggcgttgctgtgtgggcggaaaacggaaatcggttgagcaacgatattaatctgtatacaaaacgtagtagacctaccgcgaatgccgttcacgggcttcagttttggcatttgcgagaggccttcgaacaggcctcccaatttgggggttccattgccaaggccattgctgctactgctgctgttgttgtgattgctggtgctggtgttgttgttgagggttcgcttagctccgatacctgctcctccatctcctccgcacaccttgccagacagcgctggcccactcttgtccaccgtggtggtcttcttcagttttgttcccttctggatcgaactcagcagtgcagatcgggcgtctgctcctcccgcgccgcccaatttaagaccacccatcgccggaggcggtggaggtcctggcggcggtggtggtcccgggggtggcggaatagccatctaaaaaggaagacaaatatcattgttaaaatgggcctaaaagaaaaggatattttactatatgtatggcaattttatctctgcctcaagtactttttgctttgaactacgcttcaatctcattttcgatggatacgaatcttcgggccctaagaaattgccagttctgcgtccgcctctgcgaagctttagcttaagactggctaacacttttgcatcgatcaagcgacttccaaagccgagaccgctgtcaccacccacacaccataacactcacacatgctgtgtgtttataatacaatttctatacttattatttatgtcttgttttctgttgtcttcagattgacgccccgataaagatacaaaatggatgtggaggcaccgaagcctgaaattctctagtttctacaatttcttaagagtcaccaacaactcaaagctcggtttttagatttcacattcctaattggcctaaaatatgagcttatgtttaccaatgaaacaaatccattgggcgataatttaatatttaatatatattttcaacatttacccttatcccaataaaactagtaatatttattatgcccctatggttgaagccacaatggaaaatttcaagctcaaacagcgcgtaaagcggcacagttttagcttcactggggcaacccacttgaaaaccaggctatcccacgtgattcgagcaaatcataaatgttgtgaatgtgttgcctttgttttaatcacatttatggctgttttcaatttaaatttctttagctttatttcgaaccacccttcaaaatagcattaaattcacagtaagagttccgtgaatggaagtggctccaaataattatcaagaaatcataatcaagttatttgaatggcaactgataagaaacggcacaaaaacaaagccaacaattatttccctttgtgtgcaataaaatgtttagaaacgatccaatctcattatattctcatcgattagctgacaaaatcatgtttcccggcgtcccagttttttccgtttgcattgcacttagtgtgatgattttttgtcatgcggaggtaagttaaataggcgctcaaaaagtataccaatacttaatcgaaataaacaaaaccctcgacagacgctgaatttgtttggaaacttggaggctatttatgaacaggcagaaaatgcactctcaacgtaagtttcaaacaaagaaagtaggcctaagcttactgttttactccccagtttacaagaatcacttttgcaacttgaaaccaatggcactctaaacacatcccctgatgtgatttatccaacttcctgtctgacttctggggatcttgaaaatggcttgcacaccctgaaagttccaggcttgagtccctttcaagtgtattgcgaaaatcagttggctggacccggttggattgtaattcaaaagaggttcagtggaaatctgagcttctttcgcaattggaaggagtacaagaacggattcggcaatctaatggacgagtacttcctcggcctcgaaaagattcgtgccttgactgccctggagccgcatgagttgtatgtacacctggaggatttcgatgatacaattaagcatgcgaaattcgatgaatttgccattggaaacgaagatgacgactacgccatgaatacactgggaaaatattcgggcactgcgggagattccctccgctcacaccgcaaaatgaagttctccacatatgatcgggataacgatcatgagtttaataagaactgtgcattttactatctgggaggatggtggtacaacgcatgtctggacaggtgagattactgtcggataaactttctcaaaacataatctcacaactttgtaattattcaagcaaccttaatggtcagtatatgccgggtgggaaatacgaggagagcttgttcgccagaggaatgtgctggcgatcttggcgtggccacaactacggatacagggtaacccaaatgatgataagacccaagtgccgaatgataccagtgactcagcggtgaatttgggcaaggcggtttcacgaatattgttattattattagctgttcactccctgttggtttcaatggcttcgagaacgtgaaaacaatttgttatgtacttgattaatatgcaaaggttgttccattgaatcatcgcattctcgccgagcacattaatcagaatctcaattagaactgcgaaatatactgtaattctcatgtttagttgtctcaacttcctgatctactaccgctcaaggcgaacttgacctacgatttgtcaatgcaattgataagtcaatcgaactatatagtatcgaaattgattttcaagctatacaaatctatctaatctagatgggttggaacaaggcacggaacaagatcatgaatctctatttgttgtgtgttttaattttaagcggtggcagcctcttgtctactgctcaaagcaataaattggatctagtctataagaaagctgaaagcatggtttccaggtttgtgacacaaaacatcgtagagctttcaagtttaaactatgtatttttcagtttaaagatcaggctggaagagctaaaacagagctacaaggaaatcacagaagaaagaggcagtcatgagagtaagttcgagctattttggcttctgatcttctacaaaaattaaactaattacatcttttcgtaatcgtctagcagcaattaacccatcctcctgtctagctgccggaatcaacagtaatggcatccatgttattgaagttccgggtctggaaccttttccggtttattgtgacactcggctggcgggatctggatggactgtaattcagcgacgacaggatggcagtgaaaacttctatcgctgttgggaggagtatagccaaggatttggggagcttagcggagaattctttatgggtctggaaaagctacacttcctaacaaccgcggagccttacgagctgtttgtctatatggaagatttcaatggagtggtacatgatgctcgatacgaggattttgccattgggaatgcatcagcgtcctatgcgctatctgttttgggtaaatactcgggagacgccggtgattcgttaaggtaccacaagggaatgcccttctccacattcgatcacgatgatacgggtcacggatgcgccaggatttatgtgggggcctggtggtatgatcagtgccagaggaggtaagaatatgatatgatatcttcaaatgaaaaagtcaaacaattatcttcgctagcaacctcaatggccaatatttggaaggaggtcgattcgagccgaagatgtcgggtcgtggaatcacctggatgagctggcgtggctacgactacggctacaaattcgtacaaatgatgatcagacccaagtgttccaacaacctacgaaggcagggcatgcaaaatgccttaaacgcccattgaattccacaccgaaaacaccgaagggaaatcactttatttcttgataaacactatcaacattttgggacttttatttacaatttgataataaccgtttcccgctgatttgtttgttgtattattagttgattttttttttcaaacgctgcttttctacacgcgcacgtaaacaaattgttctcttcgtttgcgaatagtctttgtttctcgtcgaggttttcgagtggaacgcgcgttgcgctcagttcgcaagttgaattccaactgaggagctccaacggccgcgcatgcgatgccccagctataaaattcaaacagagaaaccggaggcctggggagagtctccagcgagaaagagcctcgggtaatgagagatatcggggggagcgaagtgaacacattgataaaaatatattcgcgggggtctgacgtcacagatgggagctccatggaggcctatggaaatgagtgactgcgacaaagaccagaagcccagacaaagggagaccacaattgcagacgcagaccacacttgtcatcagttccactgatgatgatgagaagaatctgcagatccgcaaaagaaatgctaaaccgtaagactgccgggcagggaaggcgaaacgtgtgaaaaaccccgactgggctgtcttgactcattattgtggcacagtggaacagatcggctggaaaccggcagctccttaattgctgtccactgtgatccccttcgctggcctccagcgcagatgattcactcaactcaatcgcttgattcatccagacggattgtcgcttaattgaacagctgctgcggcgctgggaaaattggccagcgttggacggaagggaaaatagtattactatctgtattaagcaatgaatttaacattaaacgttaaagaatttttgtatttgaattttaatgtttttgagctttaaataagaatgctctggctaagatttgataattttggaccgacttccttttactcattcatattatactctttactcatcgtgttaatattttgttgaattctcgttaaaaagatagcttccttagattgacttcctccagtttgtctgaccattggcaaatatcttgggagttaaataaaatgtttgctggaaacgatgattcatgggcaggcgacttcgttagaaatgtgaagcataagacccaggtatttataaaatttctatatcttatcaagaattactgacggacagacagtgcgaaaaaataaaagtatttatttaagaacttaagaaatgaacatacatgctcaaaaacaaatttcaaggggacatatttgaaggcagtaagtttcatgaaataggagtcttataaagtataatcttgaatcaaaattataaagaaaaagttatagttgatcttggcaccattcctagatgtgcattaccagttttggctttatggctgtgtcgcgcactgttaattccattatactttcatataaattcgctacatttaaaccgctattgatatgaaaggttcaacaacagtaaatcgattaattgaaaccgatggatctaagcaatttcattgctgatatggattgtgagtcattcgccctaaacaattccaggttggggcttctaaaatttggctcgactccgcgtcctggttttagttcctgctcttatcctcggattacattcaattaacgttttcgaggtgtgtcgccacttttatctccacccccaggaactcggtttcgcggcagaacgccttcggattgccccaataaactgtcatcaagttaattgccccaaatggacatataaacaagggcgtgttatgttccgagggaaggactggtataggatgacatcgaatcaaattgaatcaaagcgcggaaatcaaacctcctgcccatttccaccattttaactcccattccatccacgccgcaaacaaatcgcccaactgtccaaattcatttccaccgccggccataatgtaagtcaaatattgggtgttaaatgttcagcacgcccattggaaacgcttcgtgagacaatacccgatacgccaaccaacacccggtaaccgcacgagattgcgcaagtcttataagacaggccgcaaagtgtcccccagtttggatttctggcgggacagtttggtttagtaagcgcccagttctcctaatgatggtaattttgctgaggtttttcttcatttaacgtaggttttctttgtctcgctttcctttcgtttggctcatcgctttgtttacttggcaatttgcacaagtgtttcattgcgtttcaggttttgagactggttttggcaaaggctgttctaaaaagagattttgaatggtggtttctaacttcaaatgacttctagtgtgccagttaattagtttgtctaattgcaaattgtatagtgactgtgactcatttcagttctgtatttgattcttaagcacaaaccggtttacatgatgcactcagtcttgcaatttaatttgcctcacaagtgcccagactttcgctttcaatttctttaattcatttttgtcgtttagctgtggccaagttccaattacacaaaaccaaaaccgttggactaacaattaacatttacatttcaattgcaagtcgtgccagctgtgccttttcatgattttcgaggcaggggaagctgctcatcaaatcattgaaattccaaaagccacgcggtacgataataatatgtgaccgcagtgcaaattagtcggagcaacaaatgcaaaagacaacacgctccgaaagcatttcttatgccaatgtttttatagctcatccaactcgattttgtttataagtttttttttttttgtgaatgaccgtttatactagaggcccgctgacgtaaaaacgttttgtggcgaatgttttgaggtgaatcaaattcagataattcagagatacacaaagtgccttcgctccagtggcagagtttgttatgccgaaaacattactgcggaaaaggtcagatatctaataaatacaatttagtatgcaaattccgaatttctctatcaaaaacacatttccaatttattcttgacagatctcagatcgctcaaatgactcataagccgttgagcctcaacctctctgatcagcaatagcgccagaactggtttattgtaatattagtcatattaaacgctagatacaaaataagatgattttcaaaaactataatagcttgacatctttattgttattcccaaaggttactcccaaccttccttaaaaaccttgtattgattcatttgcgagtatatatcccacatatgagtgaatacaccgcattgaatggccttttatgagcctaaacactgcgtttcgtgttacttctgatctaagcgtttcaccatgcatcattttgcatttgcattttgcattttgtaattgaagcttctgcctttgccacatcggctacctcatcagcgcttgctgcgcgtgtgtgatgtaaggcccatatttgcttacagataaatattgcattgttgcacttgatgtggctgtttcagttgctaagcccgttgttgccggcgggtctattaaaatgcggttttcagcaccgtcgcacaatgcttaaataactaatgtaaacacatcatgagagtcgagacgagacaacgatgaactcaatgacaacaacggtgttgggttcgctagtttgcatacactacacatggaaaaaaagagccactaacagctcttagaaacaacaacccggtcattctaagtgcctaagaaataaatactcagctaaacatcctcatgtgccaattcattttttagtcggataagattcgaaatgggaagttggtcttcctctttgaacattgaatcactttcaaaaaaattactttcatgcttaaagcacattgagagagaggagtgttcgcagtgcaactgcaaatgtgatgtgaacacaagtcaaacacaaactatgagtcaccggggcaccgaggaagcgaaagccctcggcatggggctcgaaactgtagtcagaaatcggtgtgctggagagctcactgtagttttatgattcagttccaggttgcacaaggaagtgcagcataattcagcgtcataaaggctgacagaaacgaccgactctctctctctactacgtgccaatcagacctcgtgtgatgcagtgctcgaaaaatgcacgacagccaattcgactgacaaatggccgcacacaaggccgacaagtgcccactccccgtggccataaaaccccatatccacaccccgtgccccacacaccttcacctccaccctcccttcaatcaccagtctttgcgtgtgtcactgcagcagcactcgatatttctgtgtgtacttgcagtggggcatgcacaacagcctcgacaatagaccggcagcaggcagactcctggacgggatgccatggaatgggacgttgggatgggtcggtgccatgtgcccaccgctgccatggcctacgccacgccaatgacattgaacccggcgactgggacgaccctttgtgccatgcatagcattacggaaaggagctcgaagcccattcacacttgtggatggtttaaagagcgcactaaattggccacgagggttattttcggtacagagaaaagaaattacttataacaacttctatagtcttgtatttcaatgttttgatatctgttttccaccatcgcagagtagtaaagcattttagaaatgagaatataaacaagacgttcctcgactatcagatattcgttgctcagctaatgggagtgctggacaactggaacccggacaccggtaccacgacaccagaagttgcacgcttaagctaaaacttgtgactaactctacaagtaataaatctaatgtaaagattgcgattgtatgcctcttcaaatggctatagtaagagcccagattatgtcataccatcgaagttcaaccgccacaattcgcactcacatcgctgaagggagccaagcgaatgaatcaacccctagtcagcgaatttagttttcgtcggccgtcgagcaatgcactctttgtaggtcagttatggggtggcatgggtggccacatgctccatgggtcttcgctggtgttgcaacacttggtgtcgtcatgcgtcgcgtgcccgggcgttttgcttaatgtgattaagacaaagcgacaacaaaccaaaacaaagtgcattcgctgacggaacaggagaaaatcaaagcgacccgagtttattgcaccccttttagccggttagacggtggaaaaggcttttcgtgttctccgacacaggaaaaaataaatttcatgcaagctcaaatattaaatcaaatcgggcaagacatggactgtcggctatacttagaatatatgcaaataatggtgattaatctggaatatggacatatgaataaatattataaaaagtctaaatacagctgcctactaacgctggtatgtgtttgtttattgtgtacctcgaggctataagatatagccccatatcttggaaaatgcaattttacatacacacaaccattagtcgcaaatatcgtggcgaaattgtcggagggcgcgataagataattgcctacatggaactggtaccgaagaggttcctgaacttgccataaattaccaaatttctgggcaccgtgcgaaatagaattgataaggtcgctcgataagtccgtaccacttcggattctgagtgctgagtgatgcactcaatcgactaaatgggtacaaagccaaacgagttggatttacaaacagactcaccttgaagcgggtttcggttttcgactgcggtcgtagcttctgtgaatgaaattctcggttctctgggctgctggctgtcttcggtgtttcagcaggtgattgtcgtgattctctggcggagatgaaacagcatagcaagcggttccctaatgtatttttccgaaactatggtgtataatccgtatccgtgttcctaagttaagttaatccgcgcgctagatccgtctatcgtttttcgagtgcacaggtgttgcatgtgatgtgtatcgtgtcctgtgagtgcggggggaaagtccctcccactgttggtaagaattgtagaaatgtgtaaaagcctggctaaatgcctaaaagacgtacaacgacgatacaaatccgactgattttcatttttacacaaacacacgcacactgcgacagcacactctcactcacgtacacgcacgcacacactgccaggtgggctgacttctgattcagtgcgattttcgcgttctgcaaggtgtatctacaacctcccgaaacgcgtattcacttcgatttccgggttctagcgctgcagcattgtttatctaccacggatatccagattttcttcgcaatcggtcgagaaaacaataaatttattgtgcagcttagaggtgtaagagaaacatagacgtatcgatgtctctcgatggtttgtgcctatcgaaatcggtgtcccgcaatatacacagcttccactaagcgaaattttagcattttggcatacgtgtagaatttaaatggaaaattacccttggtaacgcatgtacgatcaaattcgcaccaactcaacggttcctaattcttgtcgtgcaaatgagacaaacaaatttataattattaaaataaaatatattcacatcggattgtattgtttcttatatatatggcccaaaattaaagaatttcattttaattaagagcatggtcggcgttgccatactttcaaaaagttttccttaagctggggtatattccaatagcacaacaacggtcactctatttcaaaattcaaaacaagctattggcgtcgtctgtctggattttgtgtatggaataagtagatcagaagaagcaaatgggatccaaagtggagcagcagtacaagctgctgaatgcggagctaatggaccaagtgcagaagcagcgcttggagatcggcgagtacaggaagcgggtgatatctttggagcgagagatcatggacattcgggaggagcacgtcctgcaaaaccatcgccagcgcatggagaacatcagtatcgtacgcagcctgatgctgagcctgaacgtggactccgattccctggcagtgcgtcaggagcccgctcccgcagctcagataaacagaccaagcggcccgcgtcgcagctccagggaaatctgcaaggacatgcgacggacgtgtgcgttggcccgcaccaccagaccaatctcgccaagaagatcttcctcagtgaccagtactgtatcgtccactagtcgccgctccagcgcagaagtgcagtccgaggtggtgaccactaggataccagaggatagaagagccaacaaggtaacttatacttaaatttgattatgcttttcttaacgattcattatcggcttgagtacagcc

SEQ ID NO: 31511 - DNA, 3132 bp, DROSOPHILA
acacctctaagctgcacaataaatttattgttttctcgaccgattgcgaagaaaatctggatatccgtggtagataaacaatgctgcagcgctagaacccggaaatcgaagtgaatacgcgtttcgggaggttgtagatacaccttgcagaacgcgaaaatcgcactgaatcagaagtcagcccacctggcagtgtgtgcgtgcgtgtacgtgagtgagagtgtgctgtcgcagtgtgcgtgtgtttgtgtaaaaatgaaaatcagtcggatttgtatcgtcgttgtacgtcttttaggcatttagccaggcttttacacatttctacaattcttaccaacagtgggagggactttccccccgcactcacaggacacgatacacatcacatgcaacacctgtgcactcgaaaaacgatagacggatctagcgcgcggattaacttaacttaggaacacggatacggattatacaccatagtttcggaaaaatacattagggaaccgcttgctatgctgtttcatctccgccagagaatcacgacaatcacctgctgaaacaccgaagacagccagcagcccagagaaccgagaatttcattcacagaagctacgaccgcagtcgaaaaccgaaacccgcttcaagatggctattccgccacccccgggaccaccaccgccgccaggacctccaccgcctccggcgatgggtggtcttaaattgggcggcgcgggaggagcagacgcccgatctgcactgctgagttcgatccagaagggaacaaaactgaagaagaccaccacggtggacaagagtgggccagcgctgtctggcaaggtgtgcggaggagatggaggagcaggtatcggagctaagcgaaccctcaacaacaacaccagcaccagcaatcacaacaacagcagcagtagcagcaatggccttggcaatggaacccccaaattgggaggcctgttcgaaggcctctcgcaaatgccaaaactgaagcccgtgaacggcattcgcgcaacgccatccgccggctcggcagcaacaacgacatcgaaatccacaacgaactcatccgctcagcagcggagcaacagcccccccgccgcgacgagcgcctcgaatgccagcaacggacccatggacttcaacacggagctcaccaagcacttgacgttgaagcgccaaaaacagcagcagcagcaacaaccacagccaccaaccaacaacacacatatcaatgcaacagaagccaatctgagaacaaatcggggaccaccaccgcaaccgccaaagtcagccaactcaaatgattcgatcttggagcgcatgaacatcccccgcacagcgccgacaccccccttcggcaacagttcgagtgtcaaagcggcatcgcccacgctctcggacagcggcagcaacagcagtgggagtggaggtggaagtggaagtgtcaagagcaaggcggccaacctaaacagtctaacctcctcgacgggatcagtacgcaatctggcgccaaataagtccactctatttggtggcagcagtggctctagttccggttcgagttctggtggtggttatgcatctgtgcataaatcctcgccaccctcaacggcagatagcacgccgtcggtgacgcccacaccgccaccgcttcagctgccgatgaagccggccatcagctttggcaagcccaattttgctccgaagccaccgggcttgaatcaactggcgatggccaacggacagcagcgtccggcggtgaccaggcaccacagcatgaagtcgcccagatctccgcctgcggccggtatcgtcaacggccttgtgttccccacccagcagcatttaggcaccctgcgcggtccactgcagttccatggcagcgaatccagcagccccaacaccagtgcaggcagtatgagatgtgcccctaacccgccaaagtcccgcccatcggtaaaaccaccaccgccacccacgccggctcgcagtttctccaacaccaatctgaacaatatcggcggatcgacgatgttcagtgcggtgaacacagctcttatccagagctcggccatcagttctcaggctccctcaccgccaattacccagccgccatcatcgtcgagcagcagcaatagcgtggctgccctgcgcgaccaattccgtggaggcgccggaatgtctaacggagcaccatcaccgccactgccgccgacgcccgcaccctcgtccaatccatcctcagcaagcgccagtcccaaatcgttgctgcgagacaatgtcaaacctattatcctaaatggaggtcctctaaatccgccagcgccgccaccacaccgcagctgcccacctccgccgcctccacagcgacagtcgagcaatcaggaccgagtgaagtactggatagacaagacggtgtactcctttaagaagatactccatataaatcgccaagggaggcacagtggcgagtcagtcaaggttatcaatatgcttaacagcaagcgcaacggtggttccggatcgggatcagcgccagttccgccgcagcgtcactcatccattcggcccaacgccccatcgacgccaccaacgcacatggccaatgcctcgcatcagtttggcagcagctcgggcttgtcatcaggctcgggagcaggagctgcagccagcgtgggtcgactggtcaacgacttggagaccaagttcgggaagcgattccacaacgtcactgaattccccaagccgccgccgtttctaaatatacaaaaagtctatcctagtcgcacgtttaaggccaccaatgcacccggaaacagcagcgtgaacaacaacaacaacgcggtggcaagcaacaataatacgacctcgaatcctaatcctggcgggttcggaggaggattagctccagtgctaaagccggcgcacgctccactgaaaaagcatcgggcaccggctccacctcctcaagctggcgtggcagccgccacggtatcagtcatccggcaatcaagtttcctttacggcggagcggcaggtggttccagtggctccaccagcatacggccacagtcccagccacctggaatcggtccgcggaactccaccgtctactga

SEQ ID NO: 31512 - protein, 828 aa, DROSOPHILA
MAIPPPPGPPPPPGPPPPPAMGGLKLGGAGGADARSALLSSIQKGTKLKKTTTVDKSGPALSGKVCGGDGGAGIGAKRTLNNNTSTSNHNNSSSSSNGLGNGTPKLGGLFEGLSQMPKLKPVNGIRATPSAGSAATTTSKSTTNSSAQQRSNSPPAATSASNASNGPMDFNTELTKHLTLKRQKQQQQQQPQPPTNNTHINATEANLRTNRGPPPQPPKSANSNDSILERMNIPRTAPTPPFGNSSSVKAASPTLSDSGSNSSGSGGGSGSVKSKAANLNSLTSSTGSVRNLAPNKSTLFGGSSGSSSGSSSGGGYASVHKSSPPSTADSTPSVTPTPPPLQLPMKPAISFGKPNFAPKPPGLNQLAMANGQQRPAVTRHHSMKSPRSPPAAGIVNGLVFPTQQHLGTLRGPLQFHGSESSSPNTSAGSMRCAPNPPKSRPSVKPPPPPTPARSFSNTNLNNIGGSTMFSAVNTALIQSSAISSQAPSPPITQPPSSSSSSNSVAALRDQFRGGAGMSNGAPSPPLPPTPAPSSNPSSASASPKSLLRDNVKPIILNGGPLNPPAPPPHRSCPPPPPPQRQSSNQDRVKYWIDKTVYSFKKILHINRQGRHSGESVKVINMLNSKRNGGSGSGSAPVPPQRHSSIRPNAPSTPPTHMANASHQFGSSSGLSSGSGAGAAASVGRLVNDLETKFGKRFHNVTEFPKPPPFLNIQKVYPSRTFKATNAPGNSSVNNNNNAVASNNNTTSNPNPGGFGGGLAPVLKPAHAPLKKHRAPAPPPQAGVAAATVSVIRQSSFLYGGAAGGSSGSTSIRPQSQPPGIGPRNSTVY

SEQ ID NO: 31513 - DNA, 2816 bp, DROSOPHILA
ttcacgcaaatgtccgtggtgctggtggagaacgattcgcaaaggcgatacaaccccaagggaatgatgcagaaaatgaccggcgatgtggcaattgagttcacgctgcaaaggaatcggagcttctacatgaccgtcttctatttgccgttgattggtaatatgaaaatgtgtttgatttcttgttatggaataacatataactacaatatattctttcagcctgccagatgttcctgattttgtcctttgtactgcgttctactcgtaggagttccctcattctcatcgccttgctgattgccgcctggggtttaatgtacatgacgcgctacgcctctccgcattatgtgccgcccatgagtaagttttaaatcaattaactaaaactcactgtgtataattttcaaattcaaattttcacttttcctacagtgactgcatataaagtcatcatgatgaccaccacctattgctacattctgcacatctgcattatatggctggatctatatccacccagatcgaaggctcctggctggctggttagggtgattaactccaatgttctgcgatgcattctgggattgagattttcggatgtgagtagttaagcccctattgaacacatatacgtattgcaattcactatattcctacagtctaccgactattgcgacattcaggagaatccctggcaccatatggccaagatcctgaacaacctgagttcaatcttggtcattataacctttgccatcgtagatattacgagtgggttttgaaaaacagaatttttctttattgtgcatttgagagaatattaatggttcttaaataaataagaagtaaacagagaagattgtgaagattttgcgactacaagttgaaaaagtgggagagcgtgctgggctgttgcgactcctcgcagttaattgctgccattgttccaactccgatccgggatcgatttggatttggagtgttttggtatcggagcttagtggtaaccgtatccacccagggacagggcaggtgcagcgtatgacttaaccagggcaggagctgcgtagctgatggctggagccgcatatgacttgaccaccgtgggagcagcgtagctgatggctggagcggcatgggcgtaactgatggctggagcggcataggacttgatcaccggagctggagcagcataggcgatggcaggcgcagcgtacgacttaacaatgggcgtggcatgggaaacaacctgtgcatgcaaagtagattgtaagattaaatgggaaaatatcagagtatatccagatcttaccgagctgaagtgcgagtagctggtggctggagctgccaccttgaccgccacaggagcagcataggacttgaccaccgtgggagcggcgtagctgatggcaggagcggcatgggcgtagctgatggctggagcggcataggacttgatcaccggagctggagccgcataggtgatggctggggcagcgtaggacttgatgactggagctgcagctgcatatgttatggcaggagcggcatgggcgtagctgtagtccggagccgagtgtccataatcaaggagtccaggagcagcagtggccacagccagcagagaggtaaggatctggcgaggtaaatggaaaaccaaactttgatgttaatctttttgatctagtgaatataagatcgaggtaatccttgtatgaagatatcctttgcagtcagtattattggcttaaagtgataatactgatcctaggccgcatcctttccaaccctttccactcaccagaagtttcatgctagcgctggataacgaatcacttggcttggagggagaattgcaactgtaagtggacgtgtgcattgcgttacttttatacccctcgacggcagaccacgcactcgcactctcgagcggactgcgaactgcggaccggaggacaggtggtcgagcggacagatcttgactagatttcgatctgagcctcggacggacaaacagtcagcagacagcagtcaacaaagcgggccaagcagcaccaatttgtgaagtatctcggctgcagtgaaactgcaattctcgtagacgcagctcggattggagagcccccaaacgcggatgacgcaacctgaactggagctgggagttgggagctccgaaccgaaggcagaccacttgccggctaaggagtcgccgcaggaaaggcggtctttacactgggggtgccattgtggctcgcatttggaaagcgcacgctaattgaaatcgctgattagctggccaatttgggcaacgcgccaggtgacacgcccctcgaaagcacgcagccttgccactaacaacttaattagccaacgtagaatgccgtctaattgttttcgttgctatgtttgagtattctcgaaacaattctcggcgtggcgctgggaaattctctccaaattgcataatgaacgcttgccaaatcggcaaacgccaaaaccaaacaccaagcagcaatcccctctggccgaaatatctaggcgagcttcatatttatctttatcgtgcctcgaatgccgctgcgtgccacatttgaccatattggatgggtgatttcagccgcagccacgccgtctcgtctcgaggacactcgtgcgtggcgagggggtttggatcgagtggaggccccagttcgccagctccagctccagcttcaactcgccatcgatccatcgactttgccggctgaaattgccggttcagcatctggcagttcgtgggattttttatggccgacttgattaaccccacggga

SEQ ID NO: 31514 - DNA, 588 bp, DROSOPHILA
atgaaacttctgatccttacctctctgctggctgtggccactgctgctcctggactccttgattatggacactcggctccggactacagctacgcccatgccgctcctgccataacatatgcagctgcagctccagtcatcaagtcctacgctgccccagccatcacctatgcggctccagctccggtgatcaagtcctatgccgctccagccatcagctacgcccatgccgctcctgccatcagctacgccgctcccacggtggtcaagtcctatgctgctcctgtggcggtcaaggtggcagctccagccaccagctactcgcacttcagctcggttgtttcccatgccacgcccattgttaagtcgtacgctgcgcctgccatcgcctatgctgctccagctccggtgatcaagtcctatgccgctccagccatcagttacgcccatgccgctccagccatcagctacgctgctcccacggtggtcaagtcatatgcggctccagccatcagctacgcagctcctgccctggttaagtcatacgctgcacctgccctgtccctgggtggatacggttaccactaa

SEQ ID NO: 31515 - protein, 195 aa, DROSOPHILA
MKLLILTSLLAVATAAPGLLDYGHSAPDYSYAHAAPAITYAAAAPVIKSYAAPAITYAAPAPVIKSYAAPAISYAHAAPAISYAAPTVVKSYAAPVAVKVAAPATSYSHFSSVVSHATPIVKSYAAPAIAYAAPAPVIKSYAAPAISYAHAAPAISYAAPTVVKSYAAPAISYAAPALVKSYAAPALSLGGYGYH

SEQ ID NO: 31516 - DNA, 4115 bp, DROSOPHILA
ttatattcttacatcaacgagactgctttggtagtttgtagtctgcactgattcatcagcttttgaagatttctttctgtgtacattatgcgtcggtcgatgcacaagcaaatgtcacatcaattagccgcaccgagggccacaagatgtggcgattgcagctggcttggctaagttggctaactttagctagctggttagcagactcataaaacatcaaattagctttgactaggttggctaatttgaaaagtaagaggcagttgggtgaattggccatctccagttgtggttgcgccgtggttgagtggttcaatggccgcccggccacccacacgccagctgttcgctgaccttcgccgcctgacgttgactttccttgatttctacacgtatcagtcggaaaatgtcgagcaaatattgcgataccagctgtgggtaaaaacaaaagtcacagcagcagagcaaatattatataagcacacacatcatactgtgtgctgagcgtgttttcagttgttttttattactgtctgataatcacctctgatccgtttgttgaaccgataagaaaagatccattcgcctatgggtaagtgtcgaccaattgataagcacttatttatagacattaactactctataaataatgtcatcagtcattcatcataactcctccgcaattaaacagagtgaaatgggaagcaatcactgtctcggaactgtaatctggagtagtacaataagatcaaagccaagaaagtaggaaatcgatagttaaccattggccatgctgttcgttcaagttactgtggcagcggcaacagcaacacttcaaaatttgctgcaatttgctttaattatacgctccgttggacgaaaaaaacaacagcaacgaacaaatagggaatgtcgatcgagattgcagacaaatttaggccatacaaagctctactttgttttcgcttttcccgaaaaattaacccacaattttcccccaattgcagaaacaccaacatagtatgcgtctcttcaaaacgcgcaaatccacggatacctacagcacactagccgcgcagcaacagcaacagcagcagcagcaacaacaacatcaagcggaaggcagcaacatttcccacagcagcaacagcagcagcaacaagagtcacacaccggcaacatgcagcaacagactgaacaagagcattgtgagcagcaccagcatatcgtcatcgctgcctgatctgcatgacaagtcgcccgtcatgatcctcagctgcaccaccctggccagcaatggagccaccgccacggcagcggtcacagcaacagccaccggcacagcagcaacatctggcggctcgctgcagcagcaacaacagcagcatctgcaacaccagcagcagcagcagccgttacgcacggccacgcccacgtgtctgctgagtggccgtcagacgccatcggccatatcggtgatgtcgctccaagaggccaccagtctgcaccgccagcaacagcagccacaccagccacccaccatctacgtgccggtgcctacgaaacttggcaacaatgtcaacactggcaacagctcggccactctgctgctcagctatggcagcaccagcagcatcgccaacctgcaacagcagcagcagcagcatgccgcccagtaccagcagtatgttgcacagcggctgcacgccgcttccagcagttgtttgtacgagaaggggtcgaatgccagcggtggggcgagcagcaacaaaagcagtctatccctgaccccaaatggtaagtactttactataaagtgaagtagaatactcatattactaatggggtagcccaggagttgtgcttacattaatttttattattggctgataatatcatgggtaaaaacttgcaatcatttagctgccagtggcagttactttccgtatccgtattcaccgatttctcaaagtaagtcatactcttcagtacacaaaaagcttttgctacattgttgggcgcagtgaacaggacatgtgatgcaccttgtgataacatggtgatgaagaaatggctcttatcttcgcagacattcacgagcctcagccagtgatacttgttttcctcctcaacctcccaaatgctgcagttactattggcgcccaattccagttgatttccagcagttatatagaacaattccttcttgtgttcgagacacaagcgacgagttttcaccagaagcctcagaggtcttggtaaactctgcaacatgttttggagatcattgttccactgttctggatgattactcttgaggttcctcaattcccgtgcaaagttagagagaagaatctcgtttaaaagacgaaaacgtcgtagatgccaatgaaagctcatccaaagcttcagcttgaagggatttccggtattgagatggctttgcagatcttgcggtgctttttgtgtctctaaaatatccgaccagggaatattccatgccacgcgctgttgctgctcttcattcagtgataaactgatgtccttactccacttatcgaaatccaaagggcttgcatttaattgtgtaggcacaagtccaatcagtacatgaatatcgtctttaattacggtctgaactggatttagtagtgaacttaggcacaaaagtattatgagagcaatgtaaacgaccattgcgatggaaaatcttatttaaactgatctatggattccctatttgttcagtttgctctgtgggatttccgggtatttggcgcttatcgctggttttttgataattccttgatattcagtggggccaacgccctggttttcatttcctcaaacccaactgataccaattcctgttcccacaggtcacttgcccgactacaagttggtgacagcgatgccagttgttgtcctggacgatgaacacaaatccaattcattgccggccactgaagcgagtcgcaacagcaacagcagcagcaacatgaacggcagcagcaacagcaacagccttgacgtcagcaacagcaactcgcattcggggagctccacttctttggccagcaccacgagaaatggtaagtactttggccaaaaatagaagtgaaatccgggcaaatgcctggaaattgattttcccttcaagtggcggcgcctcgagggtttttattccccgtggagtatattttattttggggcacattcaaccgagagtgttgggtcaatggagagggggaaaatgagcccataaattatagagcggcagagggtgtgttgtcagccaggtattaagagctcaatttggagcacattttaattgaaacaattaattttccatggctaaacataggaaacagcactcccagtgcttccgtgtttagcaaaggcaaaatcagcgccaatcagagttgccaattgtcatcgatacgatgcgtattgtgtcgcatggcacatactctactccaaaataccgtattgacccgatttcgcatcaatgcgcgccgccaacatcggcgctgtaatgcgatcccatgtctgcaactggaatttgtattgttttcagccgggcacgagttggtgctgctgtggtctcgattttgaagaggagcccaccctaaaagcctaaactacacagggagaaaccctacttgggaacttgggaataagtcataaatctgctaaagaaaactttattataaacacctttctttaaaatgattatacatgacacagatttttctaatattatcagaaataaatgttgcttccatactattctttcagtgtagaatatctcccagccaacagccgaccaagtgtgacaaagctgggcattatatgtcattcaatgcagttcagttgagttcactttactttggttgagttcagtttagttgtaatgatttgcacaaagagcactttatttacttttatttttgcccggttatgtgatatatgattgaggttttcggttgtatagatgggtggagttgtgagtaatagatatgggtattagagcggctagttagataaacgaggaattgagggcaggaaatggctgatgatgtgattggcaaatcaaaacatgagaaaatatgagt

SEQ ID NO: 31517 - DNA, 1033 bp, DROSOPHILA
attgcagaaacaccaacatagtatgcgtctcttcaaaacgcgcaaatccacggatacctacagcacactagccgcgcagcaacagcaacagcagcagcagcaacaacaacatcaagcggaaggcagcaacatttcccacagcagcaacagcagcagcaacaagagtcacacaccggcaacatgcagcaacagactgaacaagagcattgtgagcagcaccagcatatcgtcatcgctgcctgatctgcatgacaagtcgcccgtcatgatcctcagctgcaccaccctggccagcaatggagccaccgccacggcagcggtcacagcaacagccaccggcacagcagcaacatctggcggctcgctgcagcagcaacaacagcagcatctgcaacaccagcagcagcagcagccgttacgcacggccacgcccacgtgtctgctgagtggccgtcagacgccatcggccatatcggtgatgtcgctccaagaggccaccagtctgcaccgccagcaacagcagccacaccagccacccaccatctacgtgccggtgcctacgaaacttggcaacaatgtcaacactggcaacagctcggccactctgctgctcagctatggcagcaccagcagcatcgccaacctgcaacagcagcagcagcagcatgccgcccagtaccagcagtatgttgcacagcggctgcacgccgcttccagcagttgtttgtacgagaaggggtcgaatgccagcggtggggcgagcagcaacaaaagcagtctatccctgaccccaaatggtcacttgcccgactacaagttggtgacagcgatgccagttgttgtcctggacgatgaacacaaatccaattcattgccggccactgaagcgagtcgcaacagcaacagcagcagcaacatgaacggcagcagcaacagcaacagccttgacgtcagcaacagcaactcgcattcggggagctccacttctttggccagcaccacgagaaatggtaagtactttggccaaaaatag

SEQ ID NO: 31518 - protein, 336 aa, DROSOPHILA
MRLFKTRKSTDTYSTLAAQQQQQQQQQQQHQAEGSNISHSSNSSSNKSHTPATCSNRLNKSIVSSTSISSSLPDLHDKSPVMILSCTTLASNGATATAAVTATATGTAATSGGSLQQQQQQHLQHQQQQQPLRTATPTCLLSGRQTPSAISVMSLQEATSLHRQQQQPHQPPTIYVPVPTKLGNNVNTGNSSATLLLSYGSTSSIANLQQQQQQHAAQYQQYVAQRLHAASSSCLYEKGSNASGGASSNKSSLSLTPNGHLPDYKLVTAMPVVVLDDEHKSNSLPATEASRNSNSSSNMNGSSNSNSLDVSNSNSHSGSSTSLASTTRNGKYFGQK

SEQ ID NO: 31519 - DNA, 4281 bp, DROSOPHILA
tgaactcgagtttagagacagaaaaggagtggcaggacgattgggggagagtctggaagagaagctggcgccgcgacatcctgacgccattgttccacttaaaacgcttgcactgccagccgatgtgagtgcggtgtgagggggaaggggacggggtctggggacatcatcatccatacggatgaacttaagccgagtggctgttgatgttgttgccggggagcagttttttatttgccaccccccgccaacccaacaccatcatcgatccaaggacaatgctcgcccagggggttggatgacgcacttgggcacttgggcacccgagctcccagctcccagcttctcgactgacttttggcgctgacctagttgcatgcaaacaattgcgtggagtccgctctcgggaagccactgtttccatgtgcccgtaaccttgacaccggccgaggattgcagttgtcagcattggccagggcagcttcccgagtcgcccatccaaaccagatcgttgaaggtccccagctgctctggctggccaagagtgtgttgtcttttcgttttctccttccatcaaagtggcccagaccataaaaggggcgtctgactgcggctataaggagaggccattggataagataactggctccgtctttggatcgagtgtgcccaccttaaagagcgtttatcgaccattgataacgagtttgagccacttgcgtaatcccgacaatatccatcataaccttatgcgttggccatgatgaagttggccatgagtcacgagtcattcggcttttggccgttagatgactagtgagttacatgccgcatatggcaggcaaattgttatggctaatacatacgaaattgcggttgaacagaaattactcattcaatttgcataaactcatacctttcggttttggatggggcactatgcaaatagagacagtcatgaagatttcaaaaaaaaatctctttcgctgaacctgactttatggcctgcggtaatttacccagagattaagatatatctttcatatctaacatgttttttacctgcgaatttagtactctgcagatgaaaatgttcttcgaagatggccacgaatgttagtggttgtatacttttagggggtttcctgtgcggtacagtaatatgttagtaataaatattagtatctgcaaatatgtattatcaaatctcccctcgttcctggtaaaaactcatttccgttgcagaactgcactctcataaacgagttctttatactgcaacccttttgattggaagcagaagttgctggggatgtcgtgtgattcttatcaattccaattaagtctagagtggttccagggatcaagtctgatgactcactgcagcaccttgcctatagcaactaaaatgacgcaatgatctcaacaatattcgcatcgtaaatctctcttcaacaaagttaacttattatttgagttattgatgtgggttgtttatgatcaatgtggcaaccgtctttaagcatccaataagtaaatttctctttttgacttttcagtgagttgtgcaggatcgccaatagacgcagatgtcaagggtacggattatcaggacgacgagtatgagtacggcgacgatactgatgatgatgacacccaaatcatcgatgtgacaaaaaaccatgctgagcaggaagcgccgccttattttgatgttacggacctaagggtcgaggccaaaccgggcgatgatgtgatcctcaactgtgatgcacggaatttccagcgtaagctatccccataacctagtaaacgcgattttaaatccctaacaaacaatccgtatagttagcaacgcggtggtttggtacaagaaccgaataatcatagccaacggacaaaatcccattagccagcgggtgcagtgcatgctgaacaactcgatactcctgcggaacgtgtcgccggaggactcggatgactactactgcgaaatcctgccccagagggttcgacagcacaccgcactgcgggtgggcgcccggctgtcgatcctctgcgacgatcgcgacatcacggatcgatcgcagacgttcaggcagggcgaccaccacaagctcgagtgtcgaacctatctgccagacaatgccactatcaagtggtcctttaatgtatgtttttctaatcgtatcctcgcactatcactcagttcctatcgctggcatccgcctcccattttcccacacgatctttatcttgcaggatctgaacggacagccctcctccgtggacaaccagaatggcgtgattatcctcgacaatgttgatgagaagaacgccggcgactaccagtgcttggctgacgatggcagtcgccatcctccccatggcaccgttcacatcgatgtccagtacagccccatcgtgtccacccatcggcataatgtgaacaccgagaagggcgccaccgccgagctgtactgcaactatcgagcgaaacccattggcaggagctacttcatcaaggacggcaagaccctgcagctctccgacaagtactccctcaaggactcggtgcacaacgaccacaatcgcaccaccctgattgtcagggaggtgaccgacagcgatctgggcgagtatctgtgccaggtggagaatgccattgggtccaacgaggtgaaggtgcatgtcagctacaatccggagaccccgcagttcgaggacatgaccgtggagggcaacaaggtcacgctgcactggctggtcaggagtcaccagctcctttccgaggccatgttggactaccagctaactggggtaagttactacacaaattatttggcttggacattcctaaaccgatcgaatctttcaaacctcagtcgtacacttggagcactgtccaggtgctcgagacacatcgccacaacaacacggataacatctggaagatcacccaccaactggagctgagccgtggagtgtggcatgcgcgcgtcaagacgaagaacaccaaaggatggtcccacttttcgaacgaccacgtcttcgagatcccggaggactccgaggtcgacaaagatgaaggtgagtacgggcgagcaccactgataggatcaaatatttatcatgttcatttgacagaagtggaactgccaccggatgagatcgtgcaggctggaatcatgcccatgagcaaaggagctgcgtcatcgatgcagcgcctgaacgtgggagtgatcctgctggcagcgctcctgctgcgagtccgcctctaaggggtgccacccatccagaccgagatgtgtacatacgtatttccggactactcagctatcgaggctatcggagcgatagcgaaacgcacataggaaccgaaactaaagtattctaattatacaaatgctaatgcgcgaccgctggcttgggtcaatgttaatgttatgctatagaacacgctggagcgatcaccattcgccattgaaacgaaacattagtgccaagcaagaaagtaactggaagatcggcgaggactaaagttaatttagtttagttaaagttaaagctgcacaagcgactagggcagagcaactgcgacgatcggttaaaccgaaaagagcaacattttgattaaccttagcaataatatttatttgttttttctgtctgcatgtgcgtgttggcacttctgaggaggagctcgaaccgaaaacgaatactaactaatacgacggaaaattgggagcgatggcaatataccatacaatccccgagcgaaagttcaagggactttctaggacttgcaatacgcaccatatttttgtacatgaaaacgtacttacgaacattaggctaactgaatcggaggggaagctggggggggggacttatcgaatggcatgctaattattttataaactagaccaaagcttagacatacatatgtgtacctaccacacaccatacatatgaaacttatttttacgaaactacgccacatcaacactcaatggaacagaacgattcaaaatatacaaatcaaaagcaagaacgcatatgtacctatgcctacgagataccgaagaagtcggcggtagccatatatatgtatctaggtataatatacactctagttgattgataatcgattgataatcgggtttggctttactcctgtctttgattctgctacaatacctgaggaatatcgccataacatgctgacaatgtaacactgtactgtacgtactacgtatgagtaatcaaattgtgagtgta

SEQ ID NO: 31520 - DNA, 1515 bp, DROSOPHILA
atggcctgcgtgagttgtgcaggatcgccaatagacgcagatgtcaagggtacggattatcaggacgacgagtatgagtacggcgacgatactgatgatgatgacacccaaatcatcgatgtgacaaaaaaccatgctgagcaggaagcgccgccttattttgatgttacggacctaagggtcgaggccaaaccgggcgatgatgtgatcctcaactgtgatgcacggaatttccagcttagcaacgcggtggtttggtacaagaaccgaataatcatagccaacggacaaaatcccattagccagcgggtgcagtgcatgctgaacaactcgatactcctgcggaacgtgtcgccggaggactcggatgactactactgcgaaatcctgccccagagggttcgacagcacaccgcactgcgggtgggcgcccggctgtcgatcctctgcgacgatcgcgacatcacggatcgatcgcagacgttcaggcagggcgaccaccacaagctcgagtgtcgaacctatctgccagacaatgccactatcaagtggtcctttaatgatctgaacggacagccctcctccgtggacaaccagaatggcgtgattatcctcgacaatgttgatgagaagaacgccggcgactaccagtgcttggctgacgatggcagtcgccatcctccccatggcaccgttcacatcgatgtccagtacagccccatcgtgtccacccatcggcataatgtgaacaccgagaagggcgccaccgccgagctgtactgcaactatcgagcgaaacccattggcaggagctacttcatcaaggacggcaagaccctgcagctctccgacaagtactccctcaaggactcggtgcacaacgaccacaatcgcaccaccctgattgtcagggaggtgaccgacagcgatctgggcgagtatctgtgccaggtggagaatgccattgggtccaacgaggtgaaggtgcatgtcagctacaatccggagaccccgcagttcgaggacatgaccgtggagggcaacaaggtcacgctgcactggctggtcaggagtcaccagctcctttccgaggccatgttggactaccagctaactgggtcgtacacttggagcactgtccaggtgctcgagacacatcgccacaacaacacggataacatctggaagatcacccaccaactggagctgagccgtggagtgtggcatgcgcgcgtcaagacgaagaacaccaaaggatggtcccacttttcgaacgaccacgtcttcgagatcccggaggactccgaggtcgacaaagatgaaggtgagtacgggcgagcaccactgataggatcaaatatttatcatgttcatttgacagaagtggaactgccaccggatgagatcgtgcaggctggaatcatgcccatgagcaaaggagctgcgtcatcgatgcagcgcctgaacgtgggagtgatcctgctggcagcgctcctgctgcgagtccgcctctaa

SEQ ID NO: 31521 - protein, 504 aa, DROSOPHILA
MACVSCAGSPIDADVKGTDYQDDEYEYGDDTDDDDTQIIDVTKNHAEQEAPPYFDVTDLRVEAKPGDDVILNCDARNFQLSNAVVWYKNRIIIANGQNPISQRVQCMLNNSILLRNVSPEDSDDYYCEILPQRVRQHTALRVGARLSILCDDRDITDRSQTFRQGDHHKLECRTYLPDNATIKWSFNDLNGQPSSVDNQNGVIILDNVDEKNAGDYQCLADDGSRHPPHGTVHIDVQYSPIVSTHRHNVNTEKGATAELYCNYRAKPIGRSYFIKDGKTLQLSDKYSLKDSVHNDHNRTTLIVREVTDSDLGEYLCQVENAIGSNEVKVHVSYNPETPQFEDMTVEGNKVTLHWLVRSHQLLSEAMLDYQLTGSYTWSTVQVLETHRHNNTDNIWKITHQLELSRGVWHARVKTKNTKGWSHFSNDHVFEIPEDSEVDKDEGEYGRAPLIGSNIYHVHLTEVELPPDEIVQAGIMPMSKGAASSMQRLNVGVILLAALLLRVRL

SEQ ID NO: 31522 - DNA, 4878 bp, DROSOPHILA
taaggttttttcattggtttcttttatatggatatatatatatatatatatttatatatatatatagatctatgtatatatagtataccattgttaacatttactattgactatgtaatatccgctgcagagatacttttcgtgtttcgtgttctgtttcagtttcggtttatgtttttctgtttgatttgcaggtacttagtactactttgctccttgggtttgcgattattgtacgcttgtcctatatatacacacgctataacatatagttttttaataggtatccatggttagatatatgagaatttggggggcttcttatataggttcctttgggtagggtggaatactaaagagtttaggcgttaataaatacatctcgagttttagttggtaaaattgctaacatttagtaagtaactatgttgtacattcaagggctacatcgtataaggtatcgctgatctataacgatcgtaaatatatctatgtgtatacagtatacagtgtgtatatgaatatgaaacaatctgcagttatagattctaggcataggctatgcagtgaagtcttagacgagtttaaatagcactttctcgaagttcgtacatctataaatagtaaatatatgtatatatatatatatattaggtatatatatatatcgtgtatatggctactctgtagattagagttacagctagagttagagttaaagtttcagttgcttatgtcgctagaatacttgagtaaagatagagctaagattgtttgaaagactgactacgccgcttcgaatcgatttcaaacccacgttgcacgtgacatgttgcacgttgcacgtggcatgttgcacgctgccagttgcttgcttgcctcgtcggtttgttccccttttaggttgtggtcatagagcactagtgaatcatgttggttctcagacaatcggcacgcacacccattccatcagccggaacagcagcgagcacaaccaattctaggcggccgtcgtaaccttcggctgtccgccaggtccggttgctcctgctcctgctcctgctcccactgccatgccgccaactcccactcctgcatctgcgcccgcctcgagggatgcgggtgccgccgagatctcgtccagctgctgttggagcagctgctcctccacctggccgtcgcccatgatgctgctgctgctggtggttgtggcgccgctgccggtttggctggtgcgcagctccggcggcagatagattttgaccacgctggtgatcttcacccgacagttgggacagttgctgcatctgcaagacaggattaaggaagttagtaaggattcaatgggagcacaaggctgcagagacaactcaccgtgcagcgcactgggcgcaggcgatgacgtgacagcacggattgaacactgtgttgatggcgcggtccatgcagatcttgcactgcatggcctccgagatgcgcgtgtccacgcaacgctcaatcgccgcctcacgcgcctccttctcgcgtatggccaaatctatcttgccggccatggagccgccggcaccagtcgtcagggccatggcccatgggctgacgcccggctcgccgacggcagaggcgcccaatcctccagcgacagcagagcatccctcggctccctccgccaccagatcgccgccccgctcgtggagagtcctcctcgcctggtcgtgcacctcgcgacacgtgtgctgaatgtcgaagacatagcgcttgcccagctccgtattctccatgaacatggaggcgatggtgcccttgagatcccgggtaaactgattggtcaccactccgcgcaccttgtcgcacacgtagaaggcgtggcgctccgtgatggagcggtacaggcccgcggcgatcggctgcttgggcagcttgatctccagctccttgcgatcgttgtggtcatccacgtactccaacttgaaagtgcgacgcagcgacttggccgcagcgatggcgccaaaggggatgctaaacgaaaagagacacaaatccattagttttgaaaaacttaattgaaaagaagaaaaaaggaagtcgattggatttataagctctatgcatttacaaggcactttcaaatcaaatggtaactgcgcatttggttattaatcattaaggtttatagcgcataaagtgagttctattaaaaatgttacctttgacgctaattttgcgctacattaacttgaagccaaaatcatttcgaaagatattgccaagaagcgactataaaaatgccattgaattattcaggttaatgtatcatccatctacttataagaatgttgttttcgttttgagcaacttttttaaggcctctcaccttgacttttgtttatgaatacgaaattactcaatttggttttagtaaaaatatgaattaggtaagttagaagtgcgattagctattagaaaactctatgattctatctttctttaagctcatagttgtggtaaaagtgccttgtgagttttctacttccggttatagaaagtttgatcgtatccttggtgtcctgcaactcacctctgtttctcgcccccccggcagacggtgatgccatgggcgcccaccgcaatgtcgcagcgcgtggcactctcgttggtggtcacgccgctaaagagctcctcgccgtagccttcgagatcctggatggacttgagcagccagtacttggccgtcttgaggctcatctgcagcttggccagcttgccgtgctccacggctatttggcgcagatagtccgccggtggctcaccctcgcagctcggctgcatgaagtactcctcgtagacgcggagcggattgctggccagtcgctcgtccaggcccgtctggctgctgctgttgctggggctgctcgagctgctgttcgagtgggtttgcgagcaggcggatgtggaggcggatgcagatgctgaggcggatgcagatgctgaggcggatgcggatggcgagggctggagactgcagctggtggtgcttgccgctggcagcgtacagacctcgatgtgctccatggacttctgcttggacaggcggcgcttcttgaagctcagcacatgctccttctccttgcgctgctgctccaacctatgctgctgcgcctgctgctgttgctgctgctgctgttgcgccaactcccgcctcattcgcatcgggcagtcggccttcagcgacgactcattgaatcgcagaccatccgcctggcagagcagcgccgccaacttggccgctccactccagtccggcgcagtgagccgtccctcgagcagatcccgcctggcctgcatgtagaacaaattacgcacgctctcctgcaggatgaagtgcaccggcacccagaacttgacccgcagcgccagcatcagctggatgccgctgccgctgctgccactgtcgccggatagccgattgcgcagattgatccactggcgcgtctgcgactccttctggttgggcgtccagtgctccaggccgaagtactccatctcgcagatgatgttcattgcgcgacagacctgcaagcaaaggatatgggtggttagtcatgttgccattgcaaggatgtttatgagctgtacaacttgggatatatctatgtataatgtaggtcagttgggcacttttctactcattgtctgagctaaatgactttccattgtctcgcaactgcggcgaattaaagcttaatctaaatgtttttcaatctattctggatcagcgacttatcaattcagcttgacagagcctgtcagcgacacgcggcctgaaccagcagagcccgagccaaaagcatgtcctgtgtggcatgactatctgccaacatttcgccatgacagcggcaacatccgcagcagcagcagcaacaactgccagtggcaagtggatggattgggaaatgtgggtgggtgactgcgcatgtggctgtaaagtgggtttgactggcggcaatcgccttactgatgccgtggttttcagaaatatttgcttatgcaacgagcatgtcatcatttcgaatggaacgagctcaaatgctggcagcgcatctcttggcaaaacaacatccttatgtgctccataataatgccactgacgatgacgatgttggttgcttgtccgtcgtttgttggccacacaacaccacactttgccagccaatgccaatgccaataccaataccaattgcaattccccaatgccccaaaggcaagttgcattcgctgtcgccgatgaaatgaaatttgcaaacctcaaaacaaaagaagacgaaaagcccgtattttgtgaacatccgactttaaatacacccccccaaattcccccaagtatatacacattctcgctcctgcagcactttgcataatgaggtatccgcatttccgagtgtctgcgttagccaaggcaacaagttgctcacgcatcaacgccttcgcacatttttacgcttttcccccatttccaattaggcgaaaccgcatgaaaggaaaaaaaaaacacgcgggaaaatgcggtagggatgtttaaacttatgagtaagaattattagccattacagtgaaatttgagtcaatttgttatgtttttcgcttctgttgtttggccagcttggtgttcattagggtttacaaattaccatgtttttggtgtttaagttaagctaagagtgaagattattatggcatacttcgaggcgctttccttttcattttttagatcattctttccggggacctattgctctgtgctcaaagtgctgccttggcaatgaagtgtcctggaagccctgcaagtttcgccttgagcaaaggacatcctctcattgaaac

SEQ ID NO: 31523 - DNA, 1998 bp, DROSOPHILA
atgttggcagatagtcatgccacacaggacatgcttttggctcgggctctgctggtctgtcgcgcaatgaacatcatctgcgagatggagtacttcggcctggagcactggacgcccaaccagaaggagtcgcagacgcgccagtggatcaatctgcgcaatcggctatccggcgacagtggcagcagcggcagcggcatccagctgatgctggcgctgcgggtcaagttctgggtgccggtgcacttcatcctgcaggagagcgtgcgtaatttgttctacatgcaggccaggcgggatctgctcgagggacggctcactgcgccggactggagtggagcggccaagttggcggcgctgctctgccaggcggatggtctgcgattcaatgagtcgtcgctgaaggccgactgcccgatgcgaatgaggcgggagttggcgcaacagcagcagcagcaacagcagcaggcgcagcagcataggttggagcagcagcgcaaggagaaggagcatgtgctgagcttcaagaagcgccgcctgtccaagcagaagtccatggagcacatcgaggtctgtacgctgccagcggcaagcaccaccagctgcagtctccagccctcgccatccgcatccgcctcagcatctgcatccgcctcagcatctgcatccgcctccacatccgcctgctcgcaaacccactcgaacagcagctcgagcagccccagcaacagcagcagccagacgggcctggacgagcgactggccagcaatccgctccgcgtctacgaggagtacttcatgcagccgagctgcgagggtgagccaccggcggactatctgcgccaaatagccgtggagcacggcaagctggccaagctgcagatgagcctcaagacggccaagtactggctgctcaagtccatccaggatctcgaaggctacggcgaggagctctttagcggcgtgaccaccaacgagagtgccacgcgctgcgacattgcggtgggcgcccatggcatcaccgtctgccgggggggcgagaaacagagcatcccctttggcgccatcgctgcggccaagtcgctgcgtcgcactttcaagttggagtacgtggatgaccacaacgatcgcaaggagctggagatcaagctgcccaagcagccgatcgccgcgggcctgtaccgctccatcacggagcgccacgccttctacgtgtgcgacaaggtgcgcggagtggtgaccaatcagtttacccgggatctcaagggcaccatcgcctccatgttcatggagaatacggagctgggcaagcgctatgtcttcgacattcagcacacgtgtcgcgaggtgcacgaccaggcgaggaggactctccacgagcggggcggcgatctggtggcggagggagccgagggatgctctgctgtcgctggaggattgggcgcctctgccgtcggcgagccgggcgtcagcccatgggccatggccctgacgactggtgccggcggctccatggccggcaagatagatttggccatacgcgagaaggaggcgcgtgaggcggcgattgagcgttgcgtggacacgcgcatctcggaggccatgcagtgcaagatctgcatggaccgcgccatcaacacagtgttcaatccgtgctgtcacgtcatcgcctgcgcccagtgcgctgcacgatgcagcaactgtcccaactgtcgggtgaagatcaccagcgtggtcaaaatctatctgccgccggagctgcgcaccagccaaaccggcagcggcgccacaaccaccagcagcagcagcatcatgggcgacggccaggtggaggagcagctgctccaacagcagctggacgagatctcggcggcacccgcatccctcgaggcgggcgcagatgcaggagtgggagttggcggcatggcagtgggagcaggagcaggagcaggagcaaccggacctggcggacagccgaaggttacgacggccgcctag

SEQ ID NO: 31524 - protein, 665 aa, DROSOPHILA
MLADSHATQDMLLARALLVCRAMNIICEMEYFGLEHWTPNQKESQTRQWINLRNRLSGDSGSSGSGIQLMLALRVKFWVPVHFILQESVRNLFYMQARRDLLEGRLTAPDWSGAAKLAALLCQADGLRFNESSLKADCPMRMRRELAQQQQQQQQQAQQHRLEQQRKEKEHVLSFKKRRLSKQKSMEHIEVCTLPAASTTSCSLQPSPSASASASASASASASASTSACSQTHSNSSSSSPSNSSSQTGLDERLASNPLRVYEEYFMQPSCEGEPPADYLRQIAVEHGKLAKLQMSLKTAKYWLLKSIQDLEGYGEELFSGVTTNESATRCDIAVGAHGITVCRGGEKQSIPFGAIAAAKSLRRTFKLEYVDDHNDRKELEIKLPKQPIAAGLYRSITERHAFYVCDKVRGVVTNQFTRDLKGTIASMFMENTELGKRYVFDIQHTCREVHDQARRTLHERGGDLVAEGAEGCSAVAGGLGASAVGEPGVSPWAMALTTGAGGSMAGKIDLAIREKEAREAAIERCVDTRISEAMQCKICMDRAINTVFNPCCHVIACAQCAARCSNCPNCRVKITSVVKIYLPPELRTSQTGSGATTTSSSSIMGDGQVEEQLLQQQLDEISAAPASLEAGADAGVGVGGMAVGAGAGAGATGPGGQPKVTTAA

SEQ ID NO: 31525 - DNA, 3191 bp, DROSOPHILA
atatatatattgagtaggggccgaaaatcacacccttcgttggcccgaaagcaacagagctgaaaaacccaaaaccacacaaacccaagcccaaattgaaacctcaatagaaatacaaacggaagcagaacaaaaactcacttaggttgccatccaaatcaacggctgtcagacaaaaagtcgctttttattgatttttataaagccaaaaagcaatgaacagcaaagaataataacacaagccgcagaagcagaagcaaaataaaaataaaaagaataaaaacaaaaagcgaacgcaatgtgaataattccccagttgaacacagaggcgagcacgaaacggaaaaactaaactgctgctatatccccactcaccccatcactcccagtgcccccccgcctttctagatacccaactatataatatagcacactatcggaactttcatcaaatgcgattcgactcgattcgattggattcgatgacgattcgaagcggagacaccggagagacggacgcacacggagccccataaaaatgtgttataaaaatatacacgcataaattcccataacccccctcaaaaggacataaatacacggggagaacttttcatgcaaatgtcattgacaaagtcaattagcaggaaacggaaaagctgcagctgcacaattgaaattgaaaattcgtttaagggcatcaaaaaacacgaaacggaagtgcgggacaaaaagcaagactgattttaagtttagttagattattttaacaataaatcccccccaaaaaaaaagggaaagcaactattttgtggggaaaagcccgaaactgcaacaacgaattagccaagcggaaaccgttgcaaggaggtaaaccgcccacagagaaaatagggaaagtcccaacaaagcgggaaaagcaccaaaagcaggaaaaacagcaaagcaagaaaaacaaaagcgacctcccaacaaaagcaagccgtatccattcgaaagcatgtttgtgctcatagctgtgctgtttgttaacgcttgcctagcgggtaagtacgaaaagcatatcccaagtcccagaatttagggtccaaaatcctcccgaagaagtcgtaataatttgaagcaacaatgtcatgtcctgcgataccttaaccctaagcagctcaagctgttgacactaacaacaccctttgcttggctcagaatagtgctacatcagcgattattcgttttcccaacgacttttaagttggttaccacctctttataaggcacctcgagggcgtccagttccacttgggtttatatttagcaatgtctaccaatccaagtactccgtatttattgtcttagatatgcagcaaagtataaaaagaaatttaggtcagttcttttttatttcttattggaaatgttttcttttacttgttcctcttttaaaaaccacctaatcagttagccaaaatacttttaaatacaagctaggttacaaatttaaaatacatttaccaaaactgcgcttattgcccaatggtggaaattaattgaggtcaaatgtcatggcaaatataaccattaattatgataatgtgactagttttgaaatttatagatttagttaattttatcctaatttcaacacacgtttcagttcaatattggtttatccaccagcttattttaaattcaagtatttggcttagaatgtagcatgtttccaaacgcttaaataatacccaataaataactgtctaaggagtttataaaatgaatataatggtcaattgataaaagattgacagctggaatcctctgtaatctgctttgagagctgagagataaggtgcagaatatccgcaaagctcctaattttatgacataacttaagggctgacgtctttacgagacggctcaagccaaatccaataaatccccagacgcataaacgtggctagtgcctgcgaagcactatgcatatgcgtagcacggccattcgcagcacagcacaataatggcataataacaagcaattatcgttataataggcaccattccggctacgccggagaacataaccgttacgttcctcacgcccacggcggtccgggtgtcgtggcagacgcaaatcgatctgaaggcacatcccatcgagaagtacatcgtgacgtacaagccaacggacgacaggtaggtaccactaacaaagctagaactcaatccgccgggccacttgactgtccaaatgacgggcaaagcacactcacttaccattcagttggcgggctaaaagggactttgacgttccgacgggttccgactgcacggccaaaaccattggccacattttgttaacgggaaggcttcattagattcattagattcattaataatgtatataattacatgctgattagttggctacttaaatgtttctaaattaatgaagcggctttcactgttactacacacagaattatttaatagcatgaagaagtaactttttctctccgtgtaaggcaactgcaattgcatttatgcagagtacaagtggacaaaagaaaaactctgcctgcaattgactgcccatggagtgaggtttatggatctgaggggatgggggcgaaggggcgtggccgcggtcagtcaagagcccagtctgtgtgtgtgtgtgtagtgtgcgtctggctgggggtctgtgcctgtgtgggtgtgtgcggctgcgagtgtgtttgcttggccatgagctaaataacggcccaagttaaagtaaaccaagggagtgggtgggaatggccacaagtaagggcgggggtgggtggattggggccgagttgaccgcgagtgcaggccaaaagaaaaacaaatgcgctgtgtatttgtagtcaagttatttgaaacaaaaggcaaaagtgcgagtttcgtacacaaagcttggccaacttctaaggaattacaactcaatttcgctagctcgaacaaccagctggctcataaaaattccaattatgctggatctctttagctttttcacgttcattgcataaatactgcccaagaaactaactgagatgaggatttagtagataaaacacttaagcttgtttcaaagcgaaatcaacttaagtttcttaattgctgcttttgacatttatttgcataacctctttatagaaagtcaaccacaagttaaa

SEQ ID NO: 31526 - DNA, 192 bp, DROSOPHILA
atgtttgtgctcatagctgtgctgtttgttaacgcttgcctagcgggcaccattccggctacgccggagaacataaccgttacgttcctcacgcccacggcggtccgggtgtcgtggcagacgcaaatcgatctgaaggcacatcccatcgagaagtacatcgtgacgtacaagccaacggacgacaggtag

SEQ ID NO: 31527 - protein, 63 aa, DROSOPHILA
MFVLIAVLFVNACLAGTIPATPENITVTFLTPTAVRVSWQTQIDLKAHPIEKYIVTYKPTDDR

SEQ ID NO: 31528 - DNA, 2320 bp, DROSOPHILA
tgactcgactcgggttttctatttgcctataaattgggttattttacaattgaaacataagaaacataagtcaaacagctatcgcttggcgagggggatttattattatattttttgggctgaggggggagttagacaaaccagttgttcatctgtttgtcaagcccccgtatttgcctaacactattttcatggttgcgatgttaacggctgcacttgaacgtagatcccatgaggaaagcttccacaaagctgccggcgagtgggtggtaaatggagctttttctataaaaaatatacacagttatcttaacccattgaagatcgaagtctgtttttattttgacttgaataattaagacatttcataaggtttttcaggaaatagtatcaagcacggaaaatatatatattatttttaatcacaaattaagcaagttacacattaatatccaatatccaataaataattaaaaaaaataaaggcttcacaaatggaatgatgatgcttcaactggcaaagaatcatatctacatatgtacatatatataaaccggtcacgcatttggtaaattacaaaaatattatattatggcgagagcactcgagtcgacaacctgtgtttgtttatactctctcctcgcaaaatacacgtactaaatgttacatatgtatattttggccttattcattgcctttatatgcaataaaggtgttatcaaacaagtgactcatctgtcgcctattcggaggagaagcatcgctgtagctcactaaatcaagtgcacaataaaagaggtatccgattattagttcgacagaaaccccacttgtatggtagctatcacctctcgacgataagatagtagccaatcgttgaggtattgcgggagccacagtttaagttcgttcctcagtgcaacgccagccagcaaagcgatcggttcagttcggccggaaatccagagtctgcatcaagaagaaacataatccgaaactatggacagcaagcagcctccaccgtacagtgaacagtccggatacactcccgcacaaacctatcagcccggtggccccacccagccaccactgtacccaccgatgccgcagccaccgcagtcctcaacggtgatcatccagaccaccacaacctccaacctggtgcccatcggcagtggacccacccgcatccgctgtccctcctgtcacgccgaagtactgaccaccgtgaagtccactccttccggcaggacgcactgctgggccctcatcctgtgcctgttcatgtgagtcttatagtcactagtcatctgatctgaagtcactgcttgccaccatatgtatgtatgtatgttgattggtctcaggagctttgggccaacgaaagtatcttaggggggacttagtgcttcattaatccagtcaaatgacctttttataaaattgcgcaaaatggagtaaaccatttttaaaagcaatacaaatcggatatgttgcctattaaattcagtaatatacatagatgatatgatatcctatagatgatatcctaacaatctagatatgttttcgtatcgcccaagcagaaatgttctataaccattttattgccaactcgttacaatagctcggttaaatgttaaaaagctacgcccatgaaccacttgcggccccttatcgcttggaaaaaacaataggtttctacaggtattgcgactgtgtgtactggtaatatgtgaaaacattgttatctcaactggaactggagttgagtcagataacgaatccgagtggaaagacggggtgaaagcaagcaaactgactgattacggcctgtagacgtcgtaaaggccaattcggaattagtgctctgactaatagtttaattccccgaacttatctaatcgattcgttttccactctatccacacagctgctggccgtgcgtatgcctaccttactgcatggactcctgccagaatgccaaccactactgccccaactgcagcgcctacatcggcacctacgagaactaactaactaacgcctatttatgcatacaaacgtatatacctatagagaaccctaagcactagcgtcataaccgagaaaaattgaactgtaaatacacatgtacgaacgccacacattaaactcatgagactcacacaggaaacagaaatgcgacaagatatcttgggacaaggcactctttccgctaaatggattatgaagtaatttaatattttcagaaatgtctatgataatgttgacattatttagtattttccactacattttgtactggtactaaacaat

SEQ ID NO: 31529 - DNA, 320 bp, DROSOPHILA
atggacagcaagcagcctccaccgtacagtgaacagtccggatacactcccgcacaaacctatcagcccggtggccccacccagccaccactgtacccaccgatgccgcagccaccgcagtcctcaacggtgatcatccagaccaccacaacctccaacctggtgcccatcggcagtggacccacccgcatccgctgtccctcctgtcacgccgaagtactgaccaccgtgaagtccactccttccggcaggacgcactgctgggccctcatcctgtgcctgttcatgtgagtcttatagtcactagtcatctgatctga

SEQ ID NO: 31530 - protein, 96 aa, DROSOPHILA
MDSKQPPPYSEQSGYTPAQTYQPGGPTQPPLYPPMPQPPQSSTVIIQTTTTSNLVPIGSGPTRIRCPSCHAEVLTTVKSTPSGRTHCWALILCLFM

SEQ ID NO: 31531 - DNA, 2427 bp, DROSOPHILA
gtactggtaatatgtgaaaacattgttatctcaactggaactggagttgagtcagataacgaatccgagtggaaagacggggtgaaagcaagcaaactgactgattacggcctgtagacgtcgtaaaggccaattcggaattagtgctctgactaatagtttaattccccgaacttatctaatcgattcgttttccactctatccacacagctgctggccgtgcgtatgcctaccttactgcatggactcctgccagaatgccaaccactactgccccaactgcagcgcctacatcggcacctacgagaactaactaactaacgcctatttatgcatacaaacgtatatacctatagagaaccctaagcactagcgtcataaccgagaaaaattgaactgtaaatacacatgtacgaacgccacacattaaactcatgagactcacacaggaaacagaaatgcgacaagatatcttgggacaaggcactctttccgctaaatggattatgaagtaatttaatattttcagaaatgtctatgataatgttgacattatttagtattttccactacattttgtactggtactaaacaatttcgatcgatcattacgagaaaccaacgccaacattttaatgaccattttaaaacaatctttttactttttactatcgcttaaaaaccgtaatcagtaaaatggatcataaatatcataaatagctaagactatatcaattgttgtctaggaaacataaacccttctggcacctactcaagccaacaactggaaatggccaaatggcacagagctactggaaccgaatgtcaatcgattaggtactgcactggccgactcctcttgtacccctccatatcgtcatagtcatagtaggtttcacctaaaaagtacttgtcgattagtcagaaaagataacgattgcgatagagcaatgttgtcattaaatggcgggctatttcagtgcatgccccgccgcaaacatgagcagcacatggatgggcagagctccagaaccggccgacacggaaatggtgaccgtaaccacgcagccaaactatggggtggtggtgacccagatacccgtctacaccctgaacggagtggggccgggcgcacatccactggctgtgggctgcaagccgatgagggtgaggtgtccgtcctgcaggggcgaggtcaccaccagtctggccacgtcccccacccgcaagacccacatgtgcgctctgaccttgtatatctgctggtgagtggggcgtcaggataccaccgggcttactaactttgctaacctgattctccagctgctggcccttcatctgccttccctacttcatcaactactgcaagagtgtccagcactactgtcccaactgtggatgccacattgggagctatagcatttgatcaagtgctgtgtctccgcactgccaaaaatgccttccatgtcaagacttaatcaagattagccatatatgtatacagatacataaaataataacgttttaaatttaagttctttttgttaatgacggatggtttctactactctcactgcacatatgaagtaatcttttctggtccataatttcctcacctagtgtgccagtagatagattttatattcgtattaggataaatacccagaatatgaggaaagcgaatcaattgaataccgataccgataaggcagttctgagtttaatgaaactgtcatcgatatacatatacggaagctttcagtattatatcagtgctcgttcgcagctgtaagcaactggttgatatttttagtgtgatttgaagagtatagaaaagcatgcgttgctacaagcgcgtagactccccgccgccctactcggatccattcgccaccgctcctccagcggaggacgtcatgcagcagaacctggcgtcgcccgcacatcccaatccggtgatacccgtgatggcccaaaccatgccggtgttgcagcccgtaagcgtgatgcatcaccagacgacagtgctggtggacaatacccgccagggaacgatctgtccccactgcaacgctcggattcgccttcgcgtggagcaccatcctaccggatcaacttactgtatggcggcgttgctctgcctattcctgtaagtagatcgcatttatggttgcaagtatagcaacaaaggtttgtacatacataatgtgtatgtaagcaaacggaaaaagaaatgtttttactagtctgctatatctgtggccgcaattgttttgcttcttcctggacaagctatgagaaattgctgatcgtgccttataagctatatactctatttcccatctctatccaccagatgctggccctgcgtctgcgccccttgctgctgcaactgttgctacaagacctcccagtactgtcccaac

SEQ ID NO: 31532 - DNA, 369 bp, DROSOPHILA
atgagcagcacatggatgggcagagctccagaaccggccgacacggaaatggtgaccgtaaccacgcagccaaactatggggtggtggtgacccagatacccgtctacaccctgaacggagtggggccgggcgcacatccactggctgtgggctgcaagccgatgagggtgaggtgtccgtcctgcaggggcgaggtcaccaccagtctggccacgtcccccacccgcaagacccacatgtgcgctctgaccttgtatatctgctgctgctggcccttcatctgccttccctacttcatcaactactgcaagagtgtccagcactactgtcccaactgtggatgccacattgggagctatagcatttga

SEQ ID NO: 31533 - protein, 122 aa, DROSOPHILA
MSSTWMGRAPEPADTEMVTVTTQPNYGVVVTQIPVYTLNGVGPGAHPLAVGCKPMRVRCPSCRGEVTTSLATSPTRKTHMCALTLYICCCWPFICLPYFINYCKSVQHYCPNCGCHIGSYSI

SEQ ID NO: 31534 - DNA, 2315 bp, DROSOPHILA
tactgcactggccgactcctcttgtacccctccatatcgtcatagtcatagtaggtttcacctaaaaagtacttgtcgattagtcagaaaagataacgattgcgatagagcaatgttgtcattaaatggcgggctatttcagtgcatgccccgccgcaaacatgagcagcacatggatgggcagagctccagaaccggccgacacggaaatggtgaccgtaaccacgcagccaaactatggggtggtggtgacccagatacccgtctacaccctgaacggagtggggccgggcgcacatccactggctgtgggctgcaagccgatgagggtgaggtgtccgtcctgcaggggcgaggtcaccaccagtctggccacgtcccccacccgcaagacccacatgtgcgctctgaccttgtatatctgctggtgagtggggcgtcaggataccaccgggcttactaactttgctaacctgattctccagctgctggcccttcatctgccttccctacttcatcaactactgcaagagtgtccagcactactgtcccaactgtggatgccacattgggagctatagcatttgatcaagtgctgtgtctccgcactgccaaaaatgccttccatgtcaagacttaatcaagattagccatatatgtatacagatacataaaataataacgttttaaatttaagttctttttgttaatgacggatggtttctactactctcactgcacatatgaagtaatcttttctggtccataatttcctcacctagtgtgccagtagatagattttatattcgtattaggataaatacccagaatatgaggaaagcgaatcaattgaataccgataccgataaggcagttctgagtttaatgaaactgtcatcgatatacatatacggaagctttcagtattatatcagtgctcgttcgcagctgtaagcaactggttgatatttttagtgtgatttgaagagtatagaaaagcatgcgttgctacaagcgcgtagactccccgccgccctactcggatccattcgccaccgctcctccagcggaggacgtcatgcagcagaacctggcgtcgcccgcacatcccaatccggtgatacccgtgatggcccaaaccatgccggtgttgcagcccgtaagcgtgatgcatcaccagacgacagtgctggtggacaatacccgccagggaacgatctgtccccactgcaacgctcggattcgccttcgcgtggagcaccatcctaccggatcaacttactgtatggcggcgttgctctgcctattcctgtaagtagatcgcatttatggttgcaagtatagcaacaaaggtttgtacatacataatgtgtatgtaagcaaacggaaaaagaaatgtttttactagtctgctatatctgtggccgcaattgttttgcttcttcctggacaagctatgagaaattgctgatcgtgccttataagctatatactctatttcccatctctatccaccagatgctggccctgcgtctgcgccccttgctgctgcaactgttgctacaagacctcccagtactgtcccaactgcaactcctgcttgggttcgttttgaagacgcagcgaaaacactcgccgatttcatatcatttcattttatatatatgtatatatatatacataaccaactatacatacatatatgtatgtatgttcatatctccttatgtatcgacggcgtcaatgtggtgtcttcatcacttaacatacataaaaatatgtttgcttagtgagcaaaataagctgacagcgaaaaaataaacaaatagattttgaagcgaatggaattttctttaatttctgtttctgggtatctggctacattgttgctgcagacaactagatttgcagaaaaaataatgtgaaacttaattgttcatacgttttttttttttgtttttgtgtactttttggcggtcttttcccgaaactttttcgtagcacaactcttttgtgtccagcaataaatgttgatatgaaactgttttgaaccggtaaaatgttgctgggacgaaccggcatgttggcacagtttaaattgatgctaagatgcttcaagattactgttcatgctattaaatgaaatcactgaagttctttgcattataattgaatatttagtaaaatatttgaatttctgctaaatgtttagttcttaagaaatggaataaaaggattttaatttaactcagcctagggatacgctgtaatcaattttaaggatgtatataaatatcacttcccagttaggcaac

SEQ ID NO: 31535 - DNA, 315 bp, DROSOPHILA
atgcgttgctacaagcgcgtagactccccgccgccctactcggatccattcgccaccgctcctccagcggaggacgtcatgcagcagaacctggcgtcgcccgcacatcccaatccggtgatacccgtgatggcccaaaccatgccggtgttgcagcccgtaagcgtgatgcatcaccagacgacagtgctggtggacaatacccgccagggaacgatctgtccccactgcaacgctcggattcgccttcgcgtggagcaccatcctaccggatcaacttactgtatggcggcgttgctctgcctattcctgtaa

SEQ ID NO: 31536 - protein, 104 aa, DROSOPHILA
MRCYKRVDSPPPYSDPFATAPPAEDVMQQNLASPAHPNPVIPVMAQTMPVLQPVSVMHHQTTVLVDNTRQGTICPHCNARIRLRVEHHPTGSTYCMAALLCLFL

SEQ ID NO: 31537 - DNA, 3761 bp, DROSOPHILA
tatagtatggtagacttaataacagttggcgttctttgttaacccattagtgccgctttgtcaactgatgtatgcgattggccgctcaaacgccacgtaattgcttcaatctgagagccccgctataacctacaaagtgccgctgattagcggcatcttttgctggcctagcggtacctggcaccctactatgttggggtattttcggtactcaagtaccctactcacccctcgccctgcggcttcagcgccagctccttgaagttctccaccgtcttgggcaccgtcttgccgaacagaccgatctcgatgcgaccagcgggctcgccgccaatggtgatgtcaaagaaaacctacgcaatcggaagcggtttattattaacaagtcatctcacttgatttatggcgcagcaaatgtgtgtgtgtgtttgtgtgtgtatgtacgtggtgtatgcagaatgtaaggacgaaagtccaaggagcacgcaccttctcggtcactttgggacccttgctatcgtcggcaacaacgacgccggccaccagggctaccacgaaaacggataagaacagcttcatcgttctaaatattcacagcgcttcagtttattcctcaagcgacgtcgccaatggatatttcacgactgaattttcggtttctgttagtgatgtaagaaaactttgttgcatcgccaatcgatgttttccatcgttttttatgtttttgtcgaaatatcgatgcttaagtgtgaccattcgatgacgatgtctgatgatcacacattcgggcggaaaattcaaattcaaatagttaatacgccgaaagcataagttaaggttttcgtacgaaggaacaaagtaagttcgaagagttgactttattggtatagtttttaatattttagggattagaagtccagtttgcattagcacgtagcattctctcttgttttattgacggttctgtacacaaaaagtaagtaaaaaaatatgcttttatttattggtgtactgctatttgcgtctgagatttgtccatatccttggctgccttctctgctctcttcttctccctgctggccagaactttctccctggatttctgggccctttcagcgcaatccttgggtcgtgtcttcagggtcatatcatccacggccgcctgtttacgggctgatctcgaaatgcatcgttccatgcagctgatgggcacaaatcttccaatgaagcaaccgcagtgtgaacaatagtgattgatgtcctggcggccagaccattttttactgaaataaagtgaacattacgaaagatttataaagcttcatgcagatggccaaccaaagttttgtgaatcccagaaatctctgcaggcaagtgaccaactccagttgcaccaaactggttccagacttctcacacgaaggacaacggatccaggtgggctcctccttcaggtatcccacttgtggcttgtggctgacaatgatggccacaatctgcggttcgtccacggtcatgatgcgagttccagcgagaacgatcggtgactgaaagatggatcaaatttggagagatcatgggagggaaaatcaaaatcagaatcactctcccgatttctcttaaccgaggcgttggtctggtaattaagttagtgcatggaaatcaaatgagttattctctctgcgttacaaatgccattggatgtacagtgtaaaaagtatagtgtacattttgagcattacacattaaatagtaaacttttattcgtttcaaacagcagtatatttattattattattgaatataaattaaatgacaaaactgatctacatttgttcattgtgttataataattcggatccgatgatccttcttcagtgggtatctaaagttgtggacggcggtatacgcccaggtactccccgcaggcaccgcagtgatgcctcttggtgcagcaacgcagccaggaacgcaccacacgggtcttggccttggtcctgcaataaggacacgtaatgtcgttggggccggggcccacggcaaagtaaagtggtttcggatcctgagccatttcgcaccgaaagatgttgactgctttaaaaacaaacgcagactgaggctagcgaagagaaattgtaggaataaaatgttcaaatgatatgcaaagagaaaaaaatcggcccaaaaaagagaaaatgtgatatttttggctttatttttgtttcgatggtattgcagtagtgggtgggaaattgagtgtttagaagaattttaataaatatgtgaacaatgctgcctaggcggtggttgccttcaatttgagtggttgcctcctcttcatggaacgtccaaagtaacagccgcaattgccgcagtaatgacttcgatcggtttgtttgcacggcacatagtaattaaagcagcagcagcagcagaaggtcctgtaaaagtattttataagtttacgtttccaagaaataggagaaagtaaggcaacctacacaaaaagacatcccacaatgcggtttagttcactggcccaccacttcagatcattttgcaccacactcagatccttgattccgcaggcggggcactcgatctccacgggctcgcgtggcaggttgagaaaagtgcctgccaggggcgtggcaaagttctcgtagatcttgcgctcctttcggtcctccagagccttggcctcccgctccctgatctcctgctgcgtttccgcttccttctccggcagcgttgtcgtcatgatcgctcaacaatcgaactgaaagcgaaacgctgccaagcacgctggcaacctgtttccaaactcaaaagagaacgtgagtgcacagagagaaataatatggaatttttggccaatatattcccccggttttccgcccaaaaatatgcagtttttttgatcgaaaaagtaaaaataatgagccaaatatggaatgggttacatcgttgaattcataatacaattttctatcgactggtgttgaagccttagattttcaaattttcgcctttttttgcataatatcatgatgttaccccttataaaaaatgcgaaaattaaaaaaaaaaaaattttgaaatcaaactaaaaagtattttccttcgttagtttgcttaattaggtgcacaaaacagtatttatcatagcattgtgactcttttttctgaacttatggaaaaaacactgtttattgaaaatgtacttgtgataactttgagtttttgaaaaaaaaaaaaactatgaataaattctcaacagttaagctatataaaaaaagtatacttttgttctcaaatagtgtttaaacaagtacaggttttatttctgtaagtgtattttccaactctggcaaagagtatgagtatgatttttgaaagagcatagaaagagcagcggcgaaattgatttacagtgtgtctttaattgagttagacgcgtaatagaattatagaacagataaatatttggcattaatttcgatttaattggtccgcgggatgggctacttggccttgcgctggattcccactttgccgccacacgagctgcagtaaacgcccttggtggtccactcccgattgcaaccgcaccaggtgcacacgcagcagatccagaagagcggaaagatgctggaaaatgaaatggaatagttggtgcaaggaacgagatcccagacagtagatgtccccttaccaggatagcaggctgaggcagaaactggcgtccttgcagctggctg

SEQ ID NO: 31538 - DNA, 945 bp, DROSOPHILA
atgacgacaacgctgccggagaaggaagcggaaacgcagcaggagatcagggagcgggaggccaaggctctggaggaccgaaaggagcgcaagatctacgagaactttgccacgcccctggcaggcacttttctcaacctgccacgcgagcccgtggagatcgagtgccccgcctgcggaatcaaggatctgagtgtggtgcaaaatgatctgaagtggtgggccagtgaactaaaccgcattcctcagtctgcgtttgtttttaaagcagtcaacatctttcggtgcgaaatggctcaggatccgaaaccactttactttgccgtgggccccggccccaacgacattacgtgtccttattgcaggaccaaggccaagacccgtgtggtgcgttcctggctgcgttgctgcaccaagaggcatcactgcggtgcctgcggggagtacctgggctcaccgatcgttctcgctggaactcgcatcatgaccgtggacgaaccgcagattgtggccatcattgtcagccacaagccacaagtgggatacctgaaggaggagcccacctggatccgttgtccttcgtgtgagaagtctggaaccagtttggtgcaactggagttggtcacttgcctgcagagatttctgggattcacaaaactttgtaaaaaatggtctggccgccaggacatcaatcactattgttcacactgcggttgcttcattggaagatttgtgcccatcagctgcatggaacgatgcatttcgagatcagcccgtaaacaggcggccgtggatgatatgaccctgaagacacgacccaaggattgcgctgaaagggcccagaaatccagggagaaagttctggccagcagggagaagaagagagcagagaaggcagccaaggatatggacaaatctcagacgcaaatagcagtacaccaataa

SEQ ID NO: 31539 - protein, 314 aa, DROSOPHILA
MTTTLPEKEAETQQEIREREAKALEDRKERKIYENFATPLAGTFLNLPREPVEIECPACGIKDLSVVQNDLKWWASELNRIPQSAFVFKAVNIFRCEMAQDPKPLYFAVGPGPNDITCPYCRTKAKTRVVRSWLRCCTKRHHCGACGEYLGSPIVLAGTRIMTVDEPQIVAIIVSHKPQVGYLKEEPTWIRCPSCEKSGTSLVQLELVTCLQRFLGFTKLCKKWSGRQDINHYCSHCGCFIGRFVPISCMERCISRSARKQAAVDDMTLKTRPKDCAERAQKSREKVLASREKKRAEKAAKDMDKSQTQIAVHQ

SEQ ID NO: 31540 - DNA, 4174 bp, DROSOPHILA
ctgctgatctcgcggaactcgttttttggatttcggaagctgtctatctccaagccaaaaatgactgacccaatgatgtccaccgcatacgtggtcatcacatccttgatctccacttcatcgctttggtcaagggccccctccaaatgctgcaccaacttatcgcccacgtcgtcgatggtgccgaacatgcccttaattttgccggaggagaacgacggcgtaagtttctgacgtagatttcgccatgaagcacctcttaggttaaaaaggttggccgacaacgggtccttatcctcgtccacgtacaccccgcgatcgtggaaactggcgaaatcgctggtcatgatttggcgagccaattgggcatctcggatcaggatacttcgtttgttcaacatgtatatgccaacgattttgccctcgtgccgggcgtatatatcagccagagccatgcccaaacttcgttcctgcttcatgacagtatccattacgccaaagggaatctttgccggctcctcatcgactcccaatcgctgccagtgagtgtagtgccgcttcacatatctgtacagcagacccgcgattaggatcgtcaggagaatggtccacatattgagaatctctagtctaacttttggtattgaaaatcgacaatttctaaaagtggtgaaatatttgcgaactactcgatgcacaccttccaaactgtacaattcgactgcatgagcatcggtcttatatagacgtagaacccgcgataagcgctacaaacaaccgagtctttttctctggactctgctgctcttccagcaaatcaacaagtgacttctcagctggaaaaagctttcgactcttcaggggaagcagggcggcaaaaagcaaagagactacctgttgagcacattacagaaatgcacaactaatttcaaaggtatatgatatcaacagcatatcattatgctttcaatatgttgaccccaaatagaatgtggttcttagcacaggagctaatattgcttaaatttatttaataattctcattggaacgcttcgattcgatggccttgcgctgtctgccaagttttttctcgtccagctgctccttctccaccttgcggaatctctgccagcgtccgttatcctccacctctccccgttgcagccgaaagagggtcctcttgtaccaactcagagtgatatcgcgtccaatgaaacagccacatgagctgcagtagtgattgacatcatgacggcccttccagcgaatgggattactagaggataaaggacagattaggtattggggctcggatcaaactgtcacaaccaataaagaaattcatcttcttttcaaaacttaacgcaccagcagagaagcacattcagcgagcaggcaatcttctgcagaacggtcactgcctccgatttcacgtgggtagtctgcaactgctggcaggctggacactccaactcctggggctcagtggtcagatggcccacttgcggaatggatgagatgtccccctcgaaggcactgccatccagactctcggtgctggccatttcgaagcgatagagcaactgaccgatgaaccaagaacgttcgcataatgtatctgtatctgcattggagcccacatcgcaatcaaaatatctaagagcgtgccagagagtgggagagatgaatacatactttttggaggcaccgcctgagtgatgatcgaataaattcaagtaacttattaaaaaaaatttgacaacagctgccggtttatttatagatcatttgcgtggatttcagagagccatctgagtggcagacgcactaagtgggacgccagtggaagcccaggtgaccaccgcatcggctgcagaagacacgcttcgatttcaggcgactttgcagacaggaatagacgaacgtcaaagcaaagatgggaaagcaactgaaaggagatttaaacgaatgttaatccatggacttagattcctttccgaattccgaagtttcctaccaggataaagtggacaagaggcaactgagctggcccagtgctcctgtcatctccacggtttccgttttcgaattctgctggcacaatggacaccgcacctggtagctgctgggtccgatgctgaagaatcgcacctggggtttgctagggcgctcctccagcgtgacagtggtggccgccgactggctatccctgtccccctcctggagatccacctccagatccgcatccaagtcgtttccccgagacattgcgactggccggcgtcaagtgctaaacattttggcgaatcccgaggcagtgaaattcgaaaaagagatctatctgaccaaagagatctaattgaagagaaaccactgagagaatcatgcagcaatcaacaattttttggcactcggctcttcagtctcagcagcgctcatcactcgccgcaaggtcaacaaaaagtgcttaaaaactaaacaaaacaaacaattataagcggagcacccactccgtttgccccaacccacgacccccatcccttcatctcactgtcttttccatgcccccaagaggtaaccacacttgccgcagatgaccttgcaatcgttggtggagcgcctcgggcagcagggatagatgggcagcagggcaaagcagctggaaatggataaggaaataatctgaattagaaatataaatacttccgatctttgttattatcctaatagccctatactacgattaaataatcttatttatattccatcctaagaatttactttaaagaaatgtcctggccttgcactcaccacatggtaaggagtcgctccaggcggactccctgctcgtgcaatcgctcgtggcactccggacagtacatctggcggaggcaactaatgttggtggcagcgggcggcggaggtgataccttctcggccagttggcctgtggagttgctcttccggcagaagtaggtatccggctcggagtcctcggcatagccgtagggatagcctctgtgtgggggcgtggccaggagcagctggtccaaggcctgagccgacttctgcttgacctggccgcagttggggttcaggttaatctccaccagatccgctgcgaactcctcgtcgtcgggagcttgaaggtggaactttagctgacggctcatgttgttgaactgactcgactcgggttttctatttgcctataaattgggttattttacaattgaaacataagaaacataagtcaaacagctatcgcttggcgagggggatttattattatattttttgggctgaggggggagttagacaaaccagttgttcatctgtttgtcaagcccccgtatttgcctaacactattttcatggttgcgatgttaacggctgcacttgaacgtagatcccatgaggaaagcttccacaaagctgccggcgagtgggtggtaaatggagctttttctataaaaaatatacacagttatcttaacccattgaagatcgaagtctgtttttattttgacttgaataattaagacatttcataaggtttttcaggaaatagtatcaagcacggaaaatatatatattatttttaatcacaaattaagcaagttacacattaatatccaatatccaataaataattaaaaaaaataaaggcttcacaaatggaatgatgatgcttcaactggcaaagaatcatatctacatatgtacatatatataaaccggtcacgcatttggtaaattacaaaaatattatattatggcgagagcactcgagtcgacaacctgtgtttgtttatactctctcctcgcaaaatacacgtactaaatgttacatatgtatattttggccttattcattgcctttatatgcaataaaggtgttatcaaacaagtgactcatctgtcgcctattcggaggagaagcatcgctgtagctcactaaatcaagtgcacaataaaagaggtatccgattattagttcgacagaaaccccacttgtatggtagctatcacctctcgacgataagatagtagccaatcgttgaggtattgcgggagccacagtttaagttcgttcctcagtgcaacgccagccagcaaagcgatcggttcagttcggccggaaatccagagtctgcatcaagaagaaacata

SEQ ID NO: 31541 - DNA, 1467 bp, DROSOPHILA
atgagccgtcagctaaagttccaccttcaagctcccgacgacgaggagttcgcagcggatctggtggagattaacctgaaccccaactgcggccaggtcaagcagaagtcggctcaggccttggaccagctgctcctggccacgcccccacacagaggctatccctacggctatgccgaggactccgagccggatacctacttctgccggaagagcaactccacaggccaactggccgagaaggtatcacctccgccgcccgctgccaccaacattagttgcctccgccagatgtactgtccggagtgccacgagcgattgcacgagcagggagtccgcctggagcgactccttaccatgtgctgctttgccctgctgcccatctatccctgctgcccgaggcgctccaccaacgattgcaaggtcatctgcggcaagtgtgtcgcaatgtctcggggaaacgacttggatgcggatctggaggtggatctccaggagggggacagggatagccagtcggcggccaccactgtcacgctggaggagcgccctagcaaaccccaggtgcgattcttcagcatcggacccagcagctaccaggtgcggtgtccattgtgccagcagaattcgaaaacggaaaccgtggagatgacaggagcactgggccagctcagttgcctcttgtccactttatcctgttgctttcccatctttgctttgacgttcgtctattcctgtctgcaaagtcgcctgaaatcgaagcgtgtcttctgcagccgatgcggtggtcacctgggcttccactggcgtcccacttattacttgaatttattcgatcatcactcaggcggtgcctccaaaaagtatgtattcatctctcccactctctggcacgctcttagatattttgattgcgatgtgggctccaatgcagatacagatacattatgcgaacgttcttggttcatcggtcagttgctctatcgcttcgaaatggccagcaccgagagtctggatggcagtgccttcgagggggacatctcatccattccgcaagtgggccatctgaccactgagccccaggagttggagtgtccagcctgccagcagttgcagactacccacgtgaaatcggaggcagtgaccgttctgcagaagattgcctgctcgctgaatgtgcttctctgctgtaatcccattcgctggaagggccgtcatgatgtcaatcactactgcagctcatgtggctgtttcattggacgcgatatcactctgagttggtacaagaggaccctctttcggctgcaacggggagaggtggaggataacggacgctggcagagattccgcaaggtggagaaggagcagctggacgagaaaaaacttggcagacagcgcaaggccatcgaatcgaagcgttccaatgagaattattaaataaatttaagcaatattagctcctgtgct

SEQ ID NO: 31542 - protein, 478 aa, DROSOPHILA
MSRQLKFHLQAPDDEEFAADLVEINLNPNCGQVKQKSAQALDQLLLATPPHRGYPYGYAEDSEPDTYFCRKSNSTGQLAEKVSPPPPAATNISCLRQMYCPECHERLHEQGVRLERLLTMCCFALLPIYPCCPRRSTNDCKVICGKCVAMSRGNDLDADLEVDLQEGDRDSQSAATTVTLEERPSKPQVRFFSIGPSSYQVRCPLCQQNSKTETVEMTGALGQLSCLLSTLSCCFPIFALTFVYSCLQSRLKSKRVFCSRCGGHLGFHWRPTYYLNLFDHHSGGASKKYVFISPTLWHALRYFDCDVGSNADTDTLCERSWFIGQLLYRFEMASTESLDGSAFEGDISSIPQVGHLTTEPQELECPACQQLQTTHVKSEAVTVLQKIACSLNVLLCCNPIRWKGRHDVNHYCSSCGCFIGRDITLSWYKRTLFRLQRGEVEDNGRWQRFRKVEKEQLDEKKLGRQRKAIESKRSNENY

SEQ ID NO: 31543 - DNA, 3583 bp, DROSOPHILA
agaatttaagataaaagtaaggcctaggggattttatttccggcatcttgaattgttcgatatactagaaatactcttgagaaaagcttgttgataacagtggggccttatcagttcagcttggacttgttcctagaattcgggagtacagttttgaggcttaataaatagaagattaaatgaacttagttctgaaaagatgccacgcaaaagcacaccagcattcaaaggacggtccgcggaggtttacaaaagtttatccgaaccgaaggctacaattccgaattctggagcaaaagatacgtcccaagtatgtcttaattccgaggacttcaagttgtcgtggagccaaagattgtggtttaatacgctgtatgttattcttgagctaagattgccttcgtccagatgaaatacagtttcaagtttgtcttattttagatccttttgttgctgcggacaaccgataaataaaaatgttagtgataatttggatgagtaatgcaaattctaaagacttcaataatttgattaaatgtatgcacatatgtagaatattattaataaaataaataagtaaagtacaataactgctcttgactcagctaatcattcttatctgtattgacattattgcacagcacacgacaaaattgtcaattgcatatttatttagatatgtaattgtattagctcatctagttttaacctggattatcattagttaattataataaaatcttgggcgattgaaggaaacaagatttaaaagtccagtacttaatactgcgctttcctccttccttgaacatgatttcaattgacaatcgaatttactctcgctttcaacaaattaagttgcttgacttggttggcgctcaaaagcaatgcaaacaagatacaaagctacgacaaagagcttttgccagcaacaatgttgcgcaacagcagtcgcaagagtagtgaaacgcaagactcggtttcagttcgtgactaccaaccaaacgaagatgcagtacaatcagcagccggcgggagcgccgggctatccccaccagatgcccccaccgagctatgagcaggtggtgcacgtgcaggcgccagttcgggtggttcaccacacgacagcacctccgcccgtggtgatcatacaacgtgggtttttttctcaatgtgacagacataagattaacattgacaatgacttgcagatcaagctgtattgccggtgggtccggatcccaccttcatcacctgcccgcattgccatgtccagaaactgacccgcgtggagtactcgcccagtgtgaaaactcactgcatggccgccattctatgcatcgttgggtaagatttgcagattctcaccagccccgtgctaccatcttatctaatctctggtggaaaatcacaaacagcctctggtgttgtgcctgcctgccttactgcgccaccagctgcatgaacgccaatcacttttgcggcaattgcaataagttcgtcggcgtctacaacagcgattagtaatacggagtaaacaaaaccaaacgaacccaaccaaatcgaaccgatcaacgctcacaacctcaacacacccacacacaaaatcatccacgaatgcgaacatttttggtcaggtgtccacagaccgacagctgtacgatgaaatttccccaatggggtaaacaatcgggccgccaagcttttggctttacttgataagaatacgcgatacgcgagacacatttttttttccaacggcgctcccttgagtcattttccagcgattcacacacccagttgggccaaaatatcatggattccgtctatccagctgcacccttggaggcgcccaagggatccgtcgagctgcaggcgacacccgagcaacaacaccttctgccaccggctccacccagttacgaccaggccacaaccactccggctgaaaccacgggaccagctccagttccagcgagcacatccaccacacagcacacggtcgtcgtggtgcccggttcaccgtacggcccggagcccatggacgtgcagtgcccgtactgccacaattacgcccggacacgggtctccttcaagcccaactcgcgcacccatctgatagccttgatattatgcctgttccagtgagtacccgaaatagataacactgtgtgtgggccagtagcccactttgggcactcgaaacagaaaaagctcaatttattcggaatgagaatagcatagaatagataaatttcattccttaccagagagcactcttttgtatttatatatgtatttttgatttcatttcatatctatgatatatttttagtagcttagcatcagaaacaaaggctatatattacatcaaatgatagtcttagccagcaataatcgcacagaatagaccttggctattaggtgtataatccacttgtcggtgactcacttccttttcttttacttccctacaggttgtactgctgtgtgtgtctgccgtactgcatttccagttgcatgaacaccaatcactactgtggcatgtgcgatcgttatttgggcacctacgatcgcaaatgagcaaccaaaaatgtttcgggggcgacctgttcatgtgtacatattttcttcaagtaattagttaataaatggactgcagcacgcaaactgaactaaagcgaagtatttcgtcattacaagtgacgctttaagagctttaaagtggcatagaattactattttgtgttagcgaaattaacccagttttcaaataagtataatattattgatgacctaaatatttaattttaaatttgctcttaaaaaccaaagtaaactggttttttaacttcaattattaggccattcttggttaagttattcagtaattttttcgatttaattgctgaaagcttttttgcttaatgttaaattatactctgctgactattacgcccttggaatcctatatatcagctttatttgccaaaagcctaactaattactgactatgctgaagtggctatctgtatctttatcggacatcctattcccgtacctgagataagttcgataaacaatgaagatcattgtgtgcactagataaagctcggtaaacagtattcgagagatactttcggttttgcaacagccccaaaactgattgctcaaccggatgggagcttttccaagctcgctccgatctgagccgaaaaaaaactgaaactgaatctctacctggatccaaattcgctggcagttgcgagcggcgttcgaagtgcaaaagacgccgtctagttgtaaatacgcaaagtaaacaacttttttttttcgcttagcgagaaccagaatctcttagtcattttaataagtcgaaaccatacccgaacttcgcactagagcaagggttttatagtgcgttaaccatggatcagaagcgagccatgctttatccgcaagtggatttcaacgccccgacggccccctcgccgacgccaacgagggagttgggcaatcccatcgccaacggcctgcccatcgaggctcctccgtcgtacgatgtggcggtgtctgttccggt

SEQ ID NO: 31544 - DNA, 862 bp, DROSOPHILA
ccaaacgaagatgcagtacaatcagcagccggcgggagcgccgggctatccccaccagatgcccccaccgagctatgagcaggtggtgcacgtgcaggcgccagttcgggtggttcaccacacgacagcacctccgcccgtggtgatcatacaacatcaagctgtattgccggtgggtccggatcccaccttcatcacctgcccgcattgccatgtccagaaactgacccgcgtggagtactcgcccagtgtgaaaactcactgcatggccgccattctatgcatcgttggcctctggtgttgtgcctgcctgccttactgcgccaccagctgcatgaacgccaatcacttttgcggcaattgcaataagttcgtcggcgtctacaacagcgattacgattcacacacccagttgggccaaaatatcatggattccgtctatccagctgcacccttggaggcgcccaagggatccgtcgagctgcaggcgacacccgagcaacaacaccttctgccaccggctccacccagttacgaccaggccacaaccactccggctgaaaccacgggaccagctccagttccagcgagcacatccaccacacagcacacggtcgtcgtggtgcccggttcaccgtacggcccggagcccatggacgtgcagtgcccgtactgccacaattacgcccggacacgggtctccttcaagcccaactcgcgcacccatctgatagccttgatattatgcctgttccagttgtactgctgtgtgtgtctgccgtactgcatttccagttgcatgaacaccaatcactactgtggcatgtgcgatcgttatttgggcacctacgatcgcaaatga

SEQ ID NO: 31545 - protein, 283 aa, DROSOPHILA
MQYNQQPAGAPGYPHQMPPPSYEQVVHVQAPVRVVHHTTAPPPVVIIQHQAVLPVGPDPTFITCPHCHVQKLTRVEYSPSVKTHCMAAILCIVGLWCCACLPYCATSCMNANHFCGNCNKFVGVYNSDYDSHTQLGQNIMDSVYPAAPLEAPKGSVELQATPEQQHLLPPAPPSYDQATTTPAETTGPAPVPASTSTTQHTVVVVPGSPYGPEPMDVQCPYCHNYARTRVSFKPNSRTHLIALILCLFQLYCCVCLPYCISSCMNTNHYCGMCDRYLGTYDRK

SEQ ID NO: 31546 - DNA, 2264 bp, DROSOPHILA
ataatccacttgtcggtgactcacttccttttcttttacttccctacaggttgtactgctgtgtgtgtctgccgtactgcatttccagttgcatgaacaccaatcactactgtggcatgtgcgatcgttatttgggcacctacgatcgcaaatgagcaaccaaaaatgtttcgggggcgacctgttcatgtgtacatattttcttcaagtaattagttaataaatggactgcagcacgcaaactgaactaaagcgaagtatttcgtcattacaagtgacgctttaagagctttaaagtggcatagaattactattttgtgttagcgaaattaacccagttttcaaataagtataatattattgatgacctaaatatttaattttaaatttgctcttaaaaaccaaagtaaactggttttttaacttcaattattaggccattcttggttaagttattcagtaattttttcgatttaattgctgaaagcttttttgcttaatgttaaattatactctgctgactattacgcccttggaatcctatatatcagctttatttgccaaaagcctaactaattactgactatgctgaagtggctatctgtatctttatcggacatcctattcccgtacctgagataagttcgataaacaatgaagatcattgtgtgcactagataaagctcggtaaacagtattcgagagatactttcggttttgcaacagccccaaaactgattgctcaaccggatgggagcttttccaagctcgctccgatctgagccgaaaaaaaactgaaactgaatctctacctggatccaaattcgctggcagttgcgagcggcgttcgaagtgcaaaagacgccgtctagttgtaaatacgcaaagtaaacaacttttttttttcgcttagcgagaaccagaatctcttagtcattttaataagtcgaaaccatacccgaacttcgcactagagcaagggttttatagtgcgttaaccatggatcagaagcgagccatgctttatccgcaagtggatttcaacgccccgacggccccctcgccgacgccaacgagggagttgggcaatcccatcgccaacggcctgcccatcgaggctcctccgtcgtacgatgtggcggtgtctgttccggtggctccagcggtttccgcaccagcaatcgccccagcacgaccaccgccagtggttgtcgtggagcagccagccccacaaccacccacagtggttccaacaggtgtgtagtttgcacatagttatagttcggctgtgaagctctactgacgtcactccctgctgttgcagatactctacacttgggtccaaatcgaagtagggttctctgcccagcctgtggagccaacaaaactacgaggatgacacacacggctaactccaggacccatatggtggcaggtctcctctgtttggtcgggtaagttgagtttcttataaaaaggagtagagtttatctgcttattgatttatcttaaatttatatatttcatgtctcatcctctttaaagattctgctgctgtgcctgttttgttccctattgcatgaacagttgccgcactggaaaccactattgtcgcaagtgtaacaccttcctgggagcctacaatccaaaggggatgaaccgatgataagactgccaagataaaacgtgatctgggggctagacagacagaacagatacaagttataagtaaacacaacgcagctgatgcttgccagcggctaaattaaggttgtatgtacataggccattggctagagcgcaaggcgtcaaaaagaatcatcattggtcatttaagcatatgtgaggtagcttaaaaacaatttaataagtttcccaaattcttctttacccataagcaccactatagtaaacataagcaaaaccgcttaccttcccattgttgctgaagcagctggcctttggctggctagaaaaataaaagcgtgggcgtaagcttcacaataaaatgcaaacacaaaacaatgacaagccacatttcaaaataaacgtagtttggcgcccaatcgaaaagtgagttgccagatcagcaccatacgctagccaacactggctgcgcgctactatcgaaatatcgatagcctggcattgagcacttctacgatatggcaatgttgccgcagccaaaaagacaattgcagaaagtttttttcacaacaaaaagccaccgaaaacgctccaattaagcaacaaatgcgtgccaa

SEQ ID NO: 31547 - DNA, 264 bp, DROSOPHILA
atggatcagaagcgagccatgctttatccgcaagtggatttcaacgccccgacggccccctcgccgacgccaacgagggagttgggcaatcccatcgccaacggcctgcccatcgaggctcctccgtcgtacgatgtggcggtgtctgttccggtggctccagcggtttccgcaccagcaatcgccccagcacgaccaccgccagtggttgtcgtggagcagccagccccacaaccacccacagtggttccaacaggtgtgtag

SEQ ID NO: 31548 - protein, 87 aa, DROSOPHILA
MDQKRAMLYPQVDFNAPTAPSPTPTRELGNPIANGLPIEAPPSYDVAVSVPVAPAVSAPAIAPARPPPVVVVEQPAPQPPTVVPTGV

SEQ ID NO: 31549 - DNA, 2690 bp, DROSOPHILA
caaatttaccaggtagtcctgcagctgcgtctttagctggctgttctccgcctccaggcgacgcttctgttgcttcaggcaggccacgtccacggccacgttgttgacgcgtcgccagaaggactccatttggggtaccactgccacctcgtcctggtacgttaaaccaatgttgaatgaagaaattacctactggcatttttactcaccttaagaagatcagtggctgggtcagtcaaggaaccattaccctgatcctctatatctcgaatctcgataatctccttggatatttccggcaactggaacatccgctcccgctgggtttccatcttggcacagaccgcagacaactgtgccagagtctcgcccttggccacagtttcctggaggaattccaaggcatggtagctctccacggacatcagcttgaacaactggtgatccctggccacctcctgttccacacaggtgcgtagctcccttagtcgctcggtcaactgctgtttgatggcttgccgctgctccagttggccctgttgcttgatgtagaactcctcggagaccagacgcaaattggtcagctggtctaccaggtgctcgatttcgtgggtctgctggctaatctggagggctgcctcctcatcccgctgcttcagatccacgtactccgagtaaaagccttcgatgtgctgacagtagcccgccagaacaccctgatactcctgccacagcttctccaatcgagcttcacctctggaggtgatctgctccagctgtagttgcatctggaagtggggttcaatttaacatgttttcataaacttttaaaataacctttattgtaaaatataatcatcgaagagcattgcacgcaattgtaaaattaagattgatatgtgtcttggttcattgtgcgtcagtcactctgtaatttggatgccattctccagaactataaatgatgtgggcatagctgctcctccattcagttcccaagatgaaacagttgattttcctgctgatttgtttgagctgcggcacctgctccatttacgcactgaaatgcagatcccaggagggactaagtgaagcggagctcaagcgaactgtgcgcaactgtatgcatcgccaggacgaggacgaagatcgaggacgaggtggacagggccggcaaggaaatggctatgagtacggttacggaatggatcacgatcaggaggagcaggacaggaatccaggcaacaggggcggctatggcaatcgaaggcagcgaggactaaggcaatcggatggcaggaaccacaccagcaacgatggaggtcagtgtgtggcccagtgctttttcgaggagatgaatatggtaggtgatccaagagattcctttcaaagtcgaaatccttcagagaagcaggagcttattcctttcaattctcacccacaggtggatggcaatgggatgcccgatcggcgcaaggtgagctatttgctgaccaaggaccttcgggaccgggagctgcgcaacttcttcacggacaccgtgcagcagtgcttccgctatctggagagcaacggaaggggccggcaccacaagtgttcagcggcccgggaactggtcaagtgcatgtcggagtacgcgaaggcgcagtgcgaggattgggaggagcacggcaacatgctcttcaattaggattaaactcaccccactttttaggtcctcgcagcggtccaagaaacgctcgtggttgtcccggatcccgccatcggtgttctcctccagctgatagaagacgcactccagttgctgctgcttctgggcatgcatctccttgaacgcggcggagtcctgctcccactggctcagcaccgcctgcttgtcgtcctcgtagatcgtccgaaagaactcgatgcgatctctatgggtatctgggtaaaggataagaaataaatgggttagaaatgaggcctagttgcgttgaatggtttgtgtccattttaattttcattttacaatgcttcttattgttcataaaatgtacatcaaaatactccagtaatttttggatttccaaatatttcaatgttcttattaacgaaagcattaatatacatgtgaaatccattccattcattttaagtatctttaaacatattgctgtagctgtgtatttagtttctgattaaaatgttatttttaaggatgttatcccaatcgtaccaactatcctggtgatattctccatgtgtgactgctgcagattggcgtacatatcctcggtggattctatgtgagcaatgaggcgatggatcacctggtccttgcgcttaagtgcctcctgaaagaaagactccacatcgacgatttcgcggcgcagctcctggattttcacctggcgcaaaatgctccgccactcctggttgattttagccatattgagtcgaccaaaagcatcctctcttttcagtttgttctattttaatgggaaaagtcataccatagggattttgattttgatttactgcaaattcgtggtgtgttaccttcatgtacatggaaatgagctgcattttccgccgcctcgtctcttcctccatgtcggccctcatttgcaaatacctggcccgctcctcctcggacatgttggccaatttgttgccttttcctttaccctttttgcccatgatttagt

SEQ ID NO: 31550 - DNA, 609 bp, DROSOPHILA
atgaaacagttgattttcctgctgatttgtttgagctgcggcacctgctccatttacgcactgaaatgcagatcccaggagggactaagtgaagcggagctcaagcgaactgtgcgcaactgtatgcatcgccaggacgaggacgaagatcgaggacgaggtggacagggccggcaaggaaatggctatgagtacggttacggaatggatcacgatcaggaggagcaggacaggaatccaggcaacaggggcggctatggcaatcgaaggcagcgaggactaaggcaatcggatggcaggaaccacaccagcaacgatggaggtcagtgtgtggcccagtgctttttcgaggagatgaatatggtggatggcaatgggatgcccgatcggcgcaaggtgagctatttgctgaccaaggaccttcgggaccgggagctgcgcaacttcttcacggacaccgtgcagcagtgcttccgctatctggagagcaacggaaggggccggcaccacaagtgttcagcggcccgggaactggtcaagtgcatgtcggagtacgcgaaggcgcagtgcgaggattgggaggagcacggcaacatgctcttcaattag

SEQ ID NO: 31551 - protein, 202 aa, DROSOPHILA
MKQLIFLLICLSCGTCSIYALKCRSQEGLSEAELKRTVRNCMHRQDEDEDRGRGGQGRQGNGYEYGYGMDHDQEEQDRNPGNRGGYGNRRQRGLRQSDGRNHTSNDGGQCVAQCFFEEMNMVDGNGMPDRRKVSYLLTKDLRDRELRNFFTDTVQQCFRYLESNGRGRHHKCSAARELVKCMSEYAKAQCEDWEEHGNMLFN

SEQ ID NO: 31552 - DNA, 2634 bp, DROSOPHILA
caactatcctggtgatattctccatgtgtgactgctgcagattggcgtacatatcctcggtggattctatgtgagcaatgaggcgatggatcacctggtccttgcgcttaagtgcctcctgaaagaaagactccacatcgacgatttcgcggcgcagctcctggattttcacctggcgcaaaatgctccgccactcctggttgattttagccatattgagtcgaccaaaagcatcctctcttttcagtttgttctattttaatgggaaaagtcataccatagggattttgattttgatttactgcaaattcgtggtgtgttaccttcatgtacatggaaatgagctgcattttccgccgcctcgtctcttcctccatgtcggccctcatttgcaaatacctggcccgctcctcctcggacatgttggccaatttgttgccttttcctttaccctttttgcccatgatttagttttttttttttacggctaccaaaaatcagcttatcaaatttcaaaggccaatctctgactaattaggcgagcaaagagccgccttggaaaataaataataaattgactgccggcgttgccatgacaagattcactagcccacccactccatataatttcgcttttcgtcgccaggtttgttgccataataatggatgcgaattaaattaatgcgaaacagtggaaaacgccattagggctgtccatcaaaggggaaccatttgacatataaaactgaggacgaaccgctggaaagctgtcatcatgctgagaattggtttcgtgatttgtgtgattatatcactgcgcttggtacgtactcataacaccgttttcaatttgttctggattggataatgttcgagggtgtttttaatggattatccacactagatcggatttattgtacataataattttgaaagttcaaggtccatcggggatccgtattcgagctactttttaatcctttaatatgtgcatatttctatgcagaatggactcgtggctgtccgagttcattgccggcacatggagcgtattcacgaggagaacatccaccattgctgcaaacatcaggatggccacgacgatgtcacggaatcttgcgccaagcagaccaactttcgtttgcccagtcccaatgaggaggccatcgtggatgtgaccgtggaccaggcgatggttggaacctgctgggccaagtgcgtcttcgatcactacaatctgatggagaacaacacactggatatggacaaggtgcgctcgtactacaagcggtaccatcaaacagatccggagtacgcgactgaaatgctgaatgcctacgaaaaatgtcacacacaatgtgagctcatgcaaaataaccatcaacatagtttaaaattgaatttttccattccaaattttagctgaagaggccaccgaaaagttcctatcacttccaattgttagggccttctccaccgccaagttctgtaagccgacctcgagtatcatcatgtcctgcgtcatctacaacttcttccacaattgtccagcgagtcgctggtcaaataccaccgagtgcgtggaaaccttggcctttgctaggaagtgcaaggatgtgctgactactatgtaagcactttagagtcctgcctcaggaaatacattttaattgggaaaacgaaatgattttccaatgattaaagcaaaacaatggctctcaattcatgtgctcttttggtttataagtaatggtgggtgattgaatgccaactcagcaatacatttaattaaatggatttattgttatcaaatcacttgcaaaaatacgatattaactaatgtcaagttgatcgtatttgtttaccattacatccctataaaaaaaaaaacatccaaatatacagaataattctgaatgcataacattttttcatctaaacaaaataattcgaatgtcgtaaatcgtaaatttaatgttctttattgcagaagaatgatattctcattattcacaaagtagccagcgagtcctggcacttcttgctgaaggccagggtatcctcgcactccttggtcttcgaccagcgatccgccgggcagttgtggaagaactggcggatgacacaggccaggacgacactagacttcggatcgcagaattgcttggacatttgcttgaagaggggcttcgacaggaacatggaggtattctcttcgccttttggtgaaaaaaatatcagttagccaagaagttcttgctgaaataacaactctgtacttttgccgtgacaatgatcaaaggcgttgatcatttccttggcatattccggatcgtcgggaaacctttcagtgaacaaacttctcacggcatccatgtccaggttgttgtccttcatcaggttcagtttgctaaagacgcatttgccaaaacaagtgcctcggatggctcggtccgccgtgatgtccaccagtgcctcctcgttttgattgggcagcgtaaaattggtctccctggcacatccttcgattagatcattgtgtccatcgggatgcttgcagcaatagtggatgtggtcctcgttaatggcctccgtattctcgcaatcaattttaattccaccagcaaactaagt

SEQ ID NO: 31553 - DNA, 570 bp, DROSOPHILA
atgcagaatggactcgtggctgtccgagttcattgccggcacatggagcgtattcacgaggagaacatccaccattgctgcaaacatcaggatggccacgacgatgtcacggaatcttgcgccaagcagaccaactttcgtttgcccagtcccaatgaggaggccatcgtggatgtgaccgtggaccaggcgatggttggaacctgctgggccaagtgcgtcttcgatcactacaatctgatggagaacaacacactggatatggacaaggtgcgctcgtactacaagcggtaccatcaaacagatccggagtacgcgactgaaatgctgaatgcctacgaaaaatgtcacacacaatctgaagaggccaccgaaaagttcctatcacttccaattgttagggccttctccaccgccaagttctgtaagccgacctcgagtatcatcatgtcctgcgtcatctacaacttcttccacaattgtccagcgagtcgctggtcaaataccaccgagtgcgtggaaaccttggcctttgctaggaagtgcaaggatgtgctgactactatgtaa

SEQ ID NO: 31554 - protein, 189 aa, DROSOPHILA
MQNGLVAVRVHCRHMERIHEENIHHCCKHQDGHDDVTESCAKQTNFRLPSPNEEAIVDVTVDQAMVGTCWAKCVFDHYNLMENNTLDMDKVRSYYKRYHQTDPEYATEMLNAYEKCHTQSEEATEKFLSLPIVRAFSTAKFCKPTSSIIMSCVIYNFFHNCPASRWSNTTECVETLAFARKCKDVLTTM

SEQ ID NO: 31555 - DNA, 2767 bp, DROSOPHILA
caaagtagccagcgagtcctggcacttcttgctgaaggccagggtatcctcgcactccttggtcttcgaccagcgatccgccgggcagttgtggaagaactggcggatgacacaggccaggacgacactagacttcggatcgcagaattgcttggacatttgcttgaagaggggcttcgacaggaacatggaggtattctcttcgccttttggtgaaaaaaatatcagttagccaagaagttcttgctgaaataacaactctgtacttttgccgtgacaatgatcaaaggcgttgatcatttccttggcatattccggatcgtcgggaaacctttcagtgaacaaacttctcacggcatccatgtccaggttgttgtccttcatcaggttcagtttgctaaagacgcatttgccaaaacaagtgcctcggatggctcggtccgccgtgatgtccaccagtgcctcctcgttttgattgggcagcgtaaaattggtctccctggcacatccttcgattagatcattgtgtccatcgggatgcttgcagcaatagtggatgtggtcctcgttaatggcctccgtattctcgcaatcaattttaattccaccagcaaactaagtcatgtatttgaatatatataaacagtgtgaatttcattcctcgaactcacccaaatcaggctgaaaaaactcaataaaatggtgcacttcattgctccgccgtttataccaaaatcagcccactacgacagcttatatagtcacccacatatcgtttaaataaaaacaggaaaccgctgccaatttgccaaatgtcgagccatcagactgtctgcaaatgtttctttatccgctcatttaattccagtcattacaatggacatttgttacatttaattaagcaatccaatttgggtttaaattcatttatccaaaatgatgagcacgcatggttttataaatgttatgaccatggtaaattaatcacattcgaaaagcaatggtcaacattgtttgttattggacgttcctaattctggtggccgtttcaaaggctcaggataatgaggaaactactgcagttgccatatcttcaggtgacttgactgaggataagtgtaacacatcggtgagcttactttaaaaccgaacagcaaacgtattaagtctaaaaattcaatttagagggctggctgctgttctgaactttatataggagaagaggaggacctggtcaagtgcttcgttatacactcacccaagttgccagtggatggggacgctgacatcggcaagacactgaggtttctatcggtaggtaattaaagctttatatatctattataacgaaaatatttgtatcttcagtgctttgtggagtgcctgtacaagcaaaagaagtacattggtaagagcgacaccatcaacatgaagatggtcaagctggatgcagaaaagacatttgtggatcggcccaaggagaaggattatcacattgccatgttcgagttctgtcgcaaggatgctgttggggtctacaaccttttaaaggccagtcctggggctaaggtgctcctgaaaggagcctgtcgcccctatctattgatggtattcatgtgcatcagtgactatcatcagaagcacgagtgtccctacttccggtgggagggcactgccaaggcaggaactaaggatatgtgcgaaaatgccaaagccgaatgctaccaaatagatggaattacactgcccacaaagagtcctgcctaagaatacgtattaaaaaaactcaaaaatgtcatgtaataaaattaagcttataaacgcagtatgttttttagttttaatcacacaccacacacataaattattcgcactgatgaatcagtttcagattcgcttggctcaagcgggagaccaggatgggctcaacaagctgattcgatcgccaggtgtcaagtggttcggcaatatccgtccgaaatttcgtggcaaggactccctgttcaattcctatcagacctacaggatattggctttttgcactgaatcctccgcattggtggcctatgccgagttccgtaactatccctccattgccgctttgcccacggattgctggttggaatggttgtccaccagatactggtactgatacaaggacttaaaacgttgaatatatcatctatttccgatatatcctttagcctatccatgtccattagctggctgaatgcgttgtttttcaacttttgcgtctacaagagcgatcagtccccggttctggttgagatcataaaggatgtgctctacagggagagcagggtgtggtttctgatcactgttaggtgtccgtatgtgccacaacccatccactttgtggaaaccttcgatgatttggaaaaaatatcccaggtcttttacccgctggaatatagcatggataagaataacaacacacagtccctgtacattgtggataggttcgtaattctgccgaggattacttaccggaaggcactgtaagctctgttctttgtgctccttgttcaaattgtatactatatcagaaatagcatttgaaattttaaattcaaatgcctcttaaaaagcagcagactactaatcagtttgtctgaaatcgatatcgcctactaagatattgttagatattgttaggcatttgaagaaactgtttcaataacattcttgttttgttttaaatatttcccatgaagggccgaagataacgacgatattatagcaatgc

SEQ ID NO: 31556 - DNA, 657 bp, DROSOPHILA
atggtcaacattgtttgttattggacgttcctaattctggtggccgtttcaaaggctcaggataatgaggaaactactgcagttgccatatcttcaggtgacttgactgaggataagtgtaacacatcgagggctggctgctgttctgaactttatataggagaagaggaggacctggtcaagtgcttcgttatacactcacccaagttgccagtggatggggacgctgacatcggcaagacactgaggtttctatcgtgctttgtggagtgcctgtacaagcaaaagaagtacattggtaagagcgacaccatcaacatgaagatggtcaagctggatgcagaaaagacatttgtggatcggcccaaggagaaggattatcacattgccatgttcgagttctgtcgcaaggatgctgttggggtctacaaccttttaaaggccagtcctggggctaaggtgctcctgaaaggagcctgtcgcccctatctattgatggtattcatgtgcatcagtgactatcatcagaagcacgagtgtccctacttccggtgggagggcactgccaaggcaggaactaaggatatgtgcgaaaatgccaaagccgaatgctaccaaatagatggaattacactgcccacaaagagtcctgcctaa

SEQ ID NO: 31557 - protein, 218 aa, DROSOPHILA
MVNIVCYWTFLILVAVSKAQDNEETTAVAISSGDLTEDKCNTSRAGCCSELYIGEEEDLVKCFVIHSPKLPVDGDADIGKTLRFLSCFVECLYKQKKYIGKSDTINMKMVKLDAEKTFVDRPKEKDYHIAMFEFCRKDAVGVYNLLKASPGAKVLLKGACRPYLLMVFMCISDYHQKHECPYFRWEGTAKAGTKDMCENAKAECYQIDGITLPTKSPA

SEQ ID NO: 31558 - DNA, 11424 bp, DROSOPHILA
atggacatttgttacatttaattaagcaatccaatttgggtttaaattcatttatccaaaatgatgagcacgcatggttttataaatgttatgaccatggtaaattaatcacattcgaaaagcaatggtcaacattgtttgttattggacgttcctaattctggtggccgtttcaaaggctcaggataatgaggaaactactgcagttgccatatcttcaggtgacttgactgaggataagtgtaacacatcggtgagcttactttaaaaccgaacagcaaacgtattaagtctaaaaattcaatttagagggctggctgctgttctgaactttatataggagaagaggaggacctggtcaagtgcttcgttatacactcacccaagttgccagtggatggggacgctgacatcggcaagacactgaggtttctatcggtaggtaattaaagctttatatatctattataacgaaaatatttgtatcttcagtgctttgtggagtgcctgtacaagcaaaagaagtacattggtaagagcgacaccatcaacatgaagatggtcaagctggatgcagaaaagacatttgtggatcggcccaaggagaaggattatcacattgccatgttcgagttctgtcgcaaggatgctgttggggtctacaaccttttaaaggccagtcctggggctaaggtgctcctgaaaggagcctgtcgcccctatctattgatggtattcatgtgcatcagtgactatcatcagaagcacgagtgtccctacttccggtgggagggcactgccaaggcaggaactaaggatatgtgcgaaaatgccaaagccgaatgctaccaaatagatggaattacactgcccacaaagagtcctgcctaagaatacgtattaaaaaaactcaaaaatgtcatgtaataaaattaagcttataaacgcagtatgttttttagttttaatcacacaccacacacataaattattcgcactgatgaatcagtttcagattcgcttggctcaagcgggagaccaggatgggctcaacaagctgattcgatcgccaggtgtcaagtggttcggcaatatccgtccgaaatttcgtggcaaggactccctgttcaattcctatcagacctacaggatattggctttttgcactgaatcctccgcattggtggcctatgccgagttccgtaactatccctccattgccgctttgcccacggattgctggttggaatggttgtccaccagatactggtactgatacaaggacttaaaacgttgaatatatcatctatttccgatatatcctttagcctatccatgtccattagctggctgaatgcgttgtttttcaacttttgcgtctacaagagcgatcagtccccggttctggttgagatcataaaggatgtgctctacagggagagcagggtgtggtttctgatcactgttaggtgtccgtatgtgccacaacccatccactttgtggaaaccttcgatgatttggaaaaaatatcccaggtcttttacccgctggaatatagcatggataagaataacaacacacagtccctgtacattgtggataggttcgtaattctgccgaggattacttaccggaaggcactgtaagctctgttctttgtgctccttgttcaaattgtatactatatcagaaatagcatttgaaattttaaattcaaatgcctcttaaaaagcagcagactactaatcagtttgtctgaaatcgatatcgcctactaagatattgttagatattgttaggcatttgaagaaactgtttcaataacattcttgttttgttttaaatatttcccatgaagggccgaagataacgacgatattatagcaatgcaagaggtcgagaacccagaaatgcgagaggagctgggcgactactacattgccgaggaggtaatgggacagaatccgaagagtatgcttgttgtggccgaaacaatcaatcagtcgcaggagtcagaaatggccatctttctgtggctgtcctcggatatagacattatgttctatgtgcgcaactacgagatggaacaatttggcaatctggtgaagccagcggatggaaggtccttccactacgagacgatgacggtgtcgtaagtgatggctttacgtgcggaaagagtaattccttaccgactgtcctgcagatcggtacagcgaagagcggaggctagcatgttcaccgcagatgccctcgacgatctgaatgcggtgacgattctgggaggactgcaaaaggttgacagcggtatgaggtgtgattatttattaatttgtaaggcaaatatccacaatgatttatatttctcaacagcgtggccagcctgggtaagatgaaggtcagctccattggcggcacaattgtggatacaaatgtggcgaatgaaaataagttctacatgcgcgaatgtctgtactccaagttcaagtacattcttgagagtgagttgtactgcgaatgccggatgctccgttcataacatgggtttatctagaactccacagcaccgattactatctgcggcacgaacaaagcgtgattaattttatatatccggccggaacggagcccgcaggtccggcggccatggcggcggcatcaaacgttttccttctcaggtgcattgtggcacgacaggatttcccactgccacgcctcttcaacgcaatggtggccattttcagcgcctatccggacagggattactgcatgatgctgatgtcggtgaagtacaaggcgagcaagagctatctggaggtgatgcagtactttatggtaggccagacttagtttaagtcaacgaaatagtttaaaatagttcatacaccagccagtcgcatcacggccaagtaatctgtccagcctggacgatgtattcataacacatcgcagcaccatctttggggagattagtctgtacaaactggaaaaggaggacgtggcacatgtgcacaagttggcacttgggaacttgcccagtaacacacaaactcctaattcaagcagcagcagcttctcgtactgctccaaggtaaacgagcgggaggagctggagcacgagctccatgtgctcgatgcgatcatgaaggatgtgctggagaatgagtttagtgagttcgccgtgttcacgattcggtgtgggatctctacgagatctgttagggaaaacactgcgattggttttgtgattgtgcgagaatttcacagtcatgaaaaactctttgaacactaccaccttcccaagcaagaatatcagttgaatcgacgaagggcagagatcatatcactgcgtttgcatcctcttttcttggttagtgccggtctgatatttagggatttggccaggaagacaagcttttacgattattatttcattcattctgtcgacgtaagtgaatagtgcgctagaaatttacttttgataaaattactctttagggctataagtacagcaacgacttgaaaaagatgatgatggtcgtagagccgaagcccattaaaaaggttccggtatttactagggtccaggcgaatcataaaaaaccgaggaaaaagctggatctaccaccgccaaacttctctagggataatttgatcatctatcgccacaaactcaatccggttaagtggtttaccaacagccaaaaactggtcatcattggattcagtgcagtgacgaaggcctttctgcgacagcttgtgtttcaatggaatagcaaggagtaagtatagggttacattgtttgcgatttcgaatatgagcctacaagacggattcgtttcgtctttttaatatgtttgatatttctcattagccacaagaactcggaaaacttcacctgtttgactaggcttcaagtgaccgtgatttgcagggcgggtattgtagaggcggactatgacagcctattcaagtgtccttattgcactaataggcaaggatgctatctttcgtaccgaaatgagtcatgctacgtgagagattgttgcatgcggattgatttgcgatgctgggtgcactttgtgccaggaaaggtcgaaaaggtcgataggtagggtagtcattaacttatggaacctagtgactgacagtgctctcaatatgcgtagagataaaaagtttgtgaagcttgactcgtgcgaaatttactatgacacgctattgctgatgtgtgaccggatgttcgtgcttcgctgtatagatgtgccggtgtactcgccacgaccttgcaacctcgtcgagattaacttccggctgaacaagttcctgctgttctacaaggttcgagcactcctggaggatatgccgcgaacgtatttggtcctggtttatggcaacaacttacacacctacgagtgcattgcctttctgatcggccacggtgtggattgttcgcggatggtgttcgtccagccacatcgcatcactggaagggatgcggacatgaaggaaaagtgtccatactgggacaaaaacttgcagatgatcatggacgacatcctagtggagaagggagtcaatatctttacggactatgactttcaccattacaatttgcataagtcaacagacttcattatggaggtgatatttcaacatttccccactcaaaaacagatgaccttcgaatgcgacctctttatctccttccaggagggacacctccatcaacggcacaagcaatgtaagtatgcttaatggctaaaatctttggtaaaagttgaaacttcttagggctagaaaatgccggcatcgagctcgacggtaatcaaattctggtaaacgagcgctatcagaccaatgatccagatgtctatgcagctggtagcttcattaaaatgcgtattacacccaactaccaatataaatttgtcagtgaaagagagttggcccgcaaggtgaaaaaggcgtcgtttaactcattttataatgtccaattcagatccccaattatttttagatcttacatcatctgggcattgttacggacaagaatttcgaggatcgattcgccgaacctgtgctcttccaagccattcttccgttgcggtacttcatcacaaaagtgaccatgcctcggagatacctcctttcccaagtgcctgtcataaaaaattgcaacctgaccacgtataagaacaaaaccttctgtcgtgtgggtctatcaacgcgaatgatggtggatgagatcgtggttgtaacaaaaaaagtaagactattttgtgcaataagtatattcattcgaataaatgttgtcactttaggagtgcaatttggacttcttgctgtacttttgtggcaagcacgagttgctcctgaacaagctaaagtcacgctatagagccaatttgattcactgctttttgaagttcttccaggagccctggacagagctgatcatgcatgatgactttgaggagctccaggcggagaataaggaactgctcagccccatggccatttcggcactttcagtgggttgaatgaggttcattcaatatattttccctttgctatttgaacctttacagcgtccaggtcgtggagccttgggcgaattgacggatatggatttcttcaccctgaacaagcgctacatcgagctcaagctactgactttcctaagggagcatcgaagagactttcgtcacaagttcgccctgcccgaagactttctcaaattggacctggctgattacgagcgatacatggatacggaggaaaatgattcgtcgtcggacttgagtgaaacatagttttcaaatgcaaagcagtctggttgtgtactttccgattttcatgtgcagtgctcagactcaaatacacattttactaatttaaaataaaaaaaatatgaccaccagcaatgataatatattaatcgtcacagcgggaattcgggatcagcggcgcatagaagacctctatgacgccaaaagcacttggcactttggggtgaaggaaacaccaccactggacactcttttcttaaaaaatcaggcgcagcgactgatagtctacaataagcaggagtatcacttgttgctggcctacagcgagtttgccaaccatccaaatattccggtgctcgcaaacgatctgtggctccattggctgaatgttcgcttttggtatgtcacttttgaatgaatcctaatttaagctctaggctcactaatgtatctcctccaatagcgttgatcttcccatcacgctgctcaatgcaatattttttaacttcttcatctgcaaggatggccacagccaaatgctcaaaaaggtcatcttggaggtcttctacaccgagcatttggtcaattatatgctggtgtttaagccaccagattgcccgccaggccaatacgatgccgttcaggcctttggcacaacctattacccaaagcactcaaaagtctcggagcagaagcatctgccagcggtcatcgtgatccaacggcgcagcaccatgccagtgttgtcctttcgcaaggcgctgtaagttggtgccagaaatctgaatccatgcctcctccttttcattacttcattaccagacccgaggacaatgacgatattgtcgaaatgatagattccgaggatccggaactgcgtaaaaagcacggcgacttttacatcgcagagcacctattgaatgcggaaggttccgattccgatcataacgataagatcataattgctgaggtgcgtaggtgtgtgttctttgtcccgaaactgacttaagtgaaatgttgcagttcgaggaggagattgccgataacgtcaagggagctggcctaatgtggctatctcagtcccttgatattaagatgctggccaccaactatcacttggaacgtttgggcaacttggtgcggtacacaccgggttgtacgcacgcccatgttggattcgaagtgatgtaggtgattcatgcactccattggaagaaatcttcctttcaattttacattcatatttagctcagtagaactgaagtcgtataaggaattgttcacaagaaagcaaatggaagaaaggtataaatcgcacgtgagtagaattaacacagatggacaggatgaaacgaggaatattttattcaaaaagtacaagcacatctacgagggtgagtaaaaatttaacgaggctaccacagaaaacgccaatcgagctttctctattataatcattaatatttccagaactccgagagggagtctactatataacagcgcatcaggacaaattggagatatctttcgatttgccagatggcgagaaatcgaccagcgagaatcggctgcaatatttggcaaaggcctccaatggtttcctgctgaagatgtttcagttgcatccactggtccgctatgagtacacattttactccttgtcggccatgttcagcgcctttccggatcatgattactgtgtgaccttggtgccggccaacgtgtccacgagtccttgccagcgggagctgctccgcttctttctggtgagtgaatatgggatttgaaattccgctgaaagttccttcacccttatccatccatccatcagccggttgcccatcgtccgagcagcaccgtttccgaaaacttgttcgtcgcgcatcgaagtacgctgtttggggaactccgcgtacatcgattcgaaagtcaggagatcgatgaaatcagaaccttgataagcaaacaggcccgcaaaagggaaagcttgtcggaagatgattctgaggatagtaaagggatcgacaattacacagaggacgttctgtccatatttgaggatatcataagggaaatcctcgaggatccaatgtgtgatctgacctgcttcaccattcgatgtggccaatcgaagaagcataccgactgcccgttggttggctttataatcctgaggtgggaatggtaactgtctaaaatatgtaactagcataattgtttcctttttagaccctttttggtatatgacgatataagcaagatattcatgatgccgagagaccagttttcgctgacgcacaaacgtggcgagattgtcatgtttaggctacatccatttttccagatgtggtgcaagacgatccttcgcaccgttgccttatgcgataattaccgagaactgtactacatacacttctttagcgtgggttatctattagttgtacaatgtttgaacgtatttgaaaaggtacctttgacttgtagggcatctcgctgcccaatgatctgatgtacaacatgatgcccattgagccccgccgcatgaagaagaatctgttcaactacaagtgcgtttccttaaggcgacgggtagcgaagggaaaaatgtcagttaatgtcagcatggatatctgcaccagtcgcatgcggctcttttgccacaatcttcagcccacaatgcacatgggcggcaagaattccctgcttatcgtgggcttttcgagcacgtgtatggcctttctgcggaccgtcatcttcgcttggaattcaaaggagtaagatgatataaccgtgatacctaacgaaagcttactgactcatcaaatgcctaatagtttgattaattataaaaagtacaactgcctgcccatggtggacatcacggtcctggtcggtcacggaattatagaatcggcatatgattgtgacttttcgtgcaacttctgtgcgaacgccaggaactgctatgtggacaccggaaacgtgaatccttttgtgagggatacaatgcagcggatggatgtgaggcattgggtgcgttttgtttccggtgaagtgaaaagtataaagaggtgcgtgactaaatatagttctataaatctttgagtttcatctacttaaataagtattccctttttagacaagaaaaggtggtggagctgtcggatggctgtcatctgtactacgataagctggtgctgatgggtgccacaaggtacgggtttgaggacaaagaatttaaggggcatccgattcccttgaactatgtggtcaacaatactcgcctggacaggattatcttttaccacaaagtctgtgaaatggtcgagttaatggagtcatactacattatagtctacggatacaatttgtgtatctacgaatgcattcacttcttagtcacacatggttgcaaggctcagaacatcatatatgtgcagcctcatgtgccgatagtaatggaggacctgggcattcccgaaaaggattctcgtctggatccgatcatcctggaaatgatagctgacttgggagttacgatatatttatcgaccaactacagccagtttattctgagtcaagataatatgaacattgagaaggtggagctgatcatgcatccatctaagaagaagatcgtgctgcactgcgacctatttgtcaactacaatgacaataccataagttcgagcatggagaacggtacggcagatcagaataacaaaatatttccatataattctttgttcttttccagttctctctgaagcgggtattgagataagtgaaaggaggatagtggtcaattcacgatattgcaccaatgatcgcaatatattcgccgctggtataaatgtgatcatgataccgaagccaaactttcagtatacctatggcagtccgcaagaaatggctgaaaaggtgagagtttatctaattttaggtatagtacatatacaaacaaatttagcttctttagttggcctacgaattgaacatgattaaggttgtgatgcagtcgcgatactccaagccgtacatgtttacgggaatcctgccaatgggctatcagatcatcaagatcacccaaccaaagcccctgcttataggacaactaccgattgaattttctgagaccttgactacctacgatgatggcgacttttgccgcattcgacttaacaataaactgattgtcatagagattgtctgcgtcaccaagaaggtaaacagtacgaaatttctattctacatataatttattacatttttctagccgaagagactttactttatggagtacttttgtggcaaacacgccatgctactcaatgatctgcgcggtcgctttcaagcaggttggattcagaattttctggatttctttcaacaaccctggacagagctcctgatgcacgacagattcgaggatctgcagttaaagaaccgcagacttctgctctcaatgctgctgatgaacaacaaggataccaataatcccaggaacagtttggaaaacacgcagaggctaaggctggaggaaaacgtgatcgattttgtgcgaacctatcgaaaggatttcactcacgaatttgcgctgccggaggattggggtgtctttaatctatgagcgggatgactttggatgtaccatacataaatactccgaaatgtataaataataatattaaacgcagatttttatttatatgtgtattttgtattgcatacaatgctaattaattaaaccaattgcaagtttttacattgctcaacatattaaaactataaataatcaaaagcgaatgctttcatttgggattagcctaaagatttcgttattcggttcattttgtttttaagttagctagctcgattagtataacatgttactctttaggtctcgttgttagcttaattacacatacatagtatactacaaggttttatgggcttctagaggggagagcaagtggaggcacgtcgtcgggattgatcgcgcctaattggtagcggactaaggccactggggaagacaatgacatggtggttgagctggcctcatatgccctgtaagtaccttcgtaactcctcctcagtgtcgaagatcatgacggggaacggcgatcctggcacgaattcgcctgcccatttgacctcaactcgatagtcacccggttcggttggatcgtactagagattgttgggagaatagttagatatctgtggcgcgatcgagatatagctgatcttaccttgcacagtatggtgcgatctttctgactctcacgctgcatctccacgcggaaagctcctttgggtccacggaccctaactgtcagctgaccagctccagctcctcgagtgtcgcagatgaagcgcgactggaaggtggccagcacgccatgctcgattccaggcccataaacgcggacctgtgagattagagatgaggattagctaatgctatgctattatgtatatacatatatgtatgtgaaccgaccttactggcatccggtgcaccggccactttcagtgcgaatggcgagccgggaacattttgtcctccgtacttgatggtcaggatatggcgacctgattcctggggcttgatgttcagtgtgaat

SEQ ID NO: 31559 - DNA, 7275 bp, DROSOPHILA
atgaatcagtttcagattcgcttggctcaagcgggagaccaggatgggctcaacaagctgattcgatcgccaggtgtcaagtggttcggcaatatccgtccgaaatttcgtggcaaggactccctgttcaattcctatcagacctacaggatattggctttttgcactgaatcctccgcattggtggcctatgccgagttccgtaactatccctccattgccgctttgcccacggattgctggttggaatggttgtccaccagatactgcctatccatgtccattagctggctgaatgcgttgtttttcaacttttgcgtctacaagagcgatcagtccccggttctggttgagatcataaaggatgtgctctacagggagagcagggtgtggtttctgatcactgttaggtgtccgtatgtgccacaacccatccactttgtggaaaccttcgatgatttggaaaaaatatcccaggtcttttacccgctggaatatagcatggataagaataacaacacacagtccctgtacattgtggataggttcgtaattctgccgaggattacttaccggaaggcactggccgaagataacgacgatattatagcaatgcaagaggtcgagaacccagaaatgcgagaggagctgggcgactactacattgccgaggaggtaatgggacagaatccgaagagtatgcttgttgtggccgaaacaatcaatcagtcgcaggagtcagaaatggccatctttctgtggctgtcctcggatatagacattatgttctatgtgcgcaactacgagatggaacaatttggcaatctggtgaagccagcggatggaaggtccttccactacgagacgatgacggtgtcatcggtacagcgaagagcggaggctagcatgttcaccgcagatgccctcgacgatctgaatgcggtgacgattctgggaggactgcaaaaggttgacagcggtatgagcgtggccagcctgggtaagatgaaggtcagctccattggcggcacaattgtggatacaaatgtggcgaatgaaaataagttctacatgcgcgaatgtctgtactccaagttcaagtacattcttgagaaactccacagcaccgattactatctgcggcacgaacaaagcgtgattaattttatatatccggccggaacggagcccgcaggtccggcggccatggcggcggcatcaaacgttttccttctcaggtgcattgtggcacgacaggatttcccactgccacgcctcttcaacgcaatggtggccattttcagcgcctatccggacagggattactgcatgatgctgatgtcggtgaagtacaaggcgagcaagagctatctggaggtgatgcagtactttatgccagtcgcatcacggccaagtaatctgtccagcctggacgatgtattcataacacatcgcagcaccatctttggggagattagtctgtacaaactggaaaaggaggacgtggcacatgtgcacaagttggcacttgggaacttgcccagtaacacacaaactcctaattcaagcagcagcagcttctcgtactgctccaaggtaaacgagcgggaggagctggagcacgagctccatgtgctcgatgcgatcatgaaggatgtgctggagaatgagtttagtgagttcgccgtgttcacgattcggtgtgggatctctacgagatctgttagggaaaacactgcgattggttttgtgattgtgcgagaatttcacagtcatgaaaaactctttgaacactaccaccttcccaagcaagaatatcagttgaatcgacgaagggcagagatcatatcactgcgtttgcatcctcttttcttgggctataagtacagcaacgacttgaaaaagatgatgatggtcgtagagccgaagcccattaaaaaggttccggtatttactagggtccaggcgaatcataaaaaaccgaggaaaaagctggatctaccaccgccaaacttctctagggataatttgatcatctatcgccacaaactcaatccggttaagtggtttaccaacagccaaaaactggtcatcattggattcagtgcagtgacgaaggcctttctgcgacagcttgtgtttcaatggaatagcaaggatgctctcaatatgcgtagagataaaaagtttgtgaagcttgactcgtgcgaaatttactatgacacgctattgctgatgtgtgaccggatgttcgtgcttcgctgtatagatgtgccggtgtactcgccacgaccttgcaacctcgtcgagattaacttccggctgaacaagttcctgctgttctacaaggttcgagcactcctggaggatatgccgcgaacgtatttggtcctggtttatggcaacaacttacacacctacgagtgcattgcctttctgatcggccacggtgtggattgttcgcggatggtgttcgtccagccacatcgcatcactggaagggatgcggacatgaaggaaaagtgtccatactgggacaaaaacttgcagatgatcatggacgacatcctagtggagaagggagtcaatatctttacggactatgactttcaccattacaatttgcataagtcaacagacttcattatggaggtgatatttcaacatttccccactcaaaaacagatgaccttcgaatgcgacctctttatctccttccaggagggacacctccatcaacggcacaagcaatggctagaaaatgccggcatcgagctcgacggtaatcaaattctggtaaacgagcgctatcagaccaatgatccagatgtctatgcagctggtagcttcattaaaatgcgtattacacccaactaccaatataaatttgtcagtgaaagagagttggcccgcaagatcttacatcatctgggcattgttacggacaagaatttcgaggatcgattcgccgaacctgtgctcttccaagccattcttccgttgcggtacttcatcacaaaagtgaccatgcctcggagatacctcctttcccaagtgcctgtcataaaaaattgcaacctgaccacgtataagaacaaaaccttctgtcgtgtgggtctatcaacgcgaatgatggtggatgagatcgtggttgtaacaaaaaaagagtgcaatttggacttcttgctgtacttttgtggcaagcacgagttgctcctgaacaagctaaagtcacgctatagagccaatttgattcactgctttttgaagttcttccaggagccctggacagagctgatcatgcatgatgactttgaggagctccaggcggagaataaggaactgctcagccccatggccatttcggcactttcacgtccaggtcgtggagccttgggcgaattgacggatatggatttcttcaccctgaacaagcgctacatcgagctcaagctactgactttcctaagggagcatcgaagagactttcgtcacaagttcgccctgcccgaagactttctcaaattggacctggctgattacgagcgatacatggatacggaggaaaatgattcgtcgtcggacttgacgggaattcgggatcagcggcgcatagaagacctctatgacgccaaaagcacttggcactttggggtgaaggaaacaccaccactggacactcttttcttaaaaaatcaggcgcagcgactgatagtctacaataagcaggagtatcacttgttgctggcctacagcgagtttgccaaccatccaaatattccggtgctcgcaaacgatctgtggctccattggctgaatgttcgcttttgcgttgatcttcccatcacgctgctcaatgcaatattttttaacttcttcatctgcaaggatggccacagccaaatgctcaaaaaggtcatcttggaggtcttctacaccgagcatttggtcaattatatgctggtgtttaagccaccagattgcccgccaggccaatacgatgccgttcaggcctttggcacaacctattacccaaagcactcaaaagtctcggagcagaagcatctgccagcggtcatcgtgatccaacggcgcagcaccatgccagtgttgtcctttcgcaaggcgctacccgaggacaatgacgatattgtcgaaatgatagattccgaggatccggaactgcgtaaaaagcacggcgacttttacatcgcagagcacctattgaatgcggaaggttccgattccgatcataacgataagatcataattgctgagttcgaggaggagattgccgataacgtcaagggagctggcctaatgtggctatctcagtcccttgatattaagatgctggccaccaactatcacttggaacgtttgggcaacttggtgcggtacacaccgggttgtacgcacgcccatgttggattcgaagtgatctcagtagaactgaagtcgtataaggaattgttcacaagaaagcaaatggaagaaaggtataaatcgcacgtgagtagaattaacacagatggacaggatgaaacgaggaatattttattcaaaaagtacaagcacatctacgaggaactccgagagggagtctactatataacagcgcatcaggacaaattggagatatctttcgatttgccagatggcgagaaatcgaccagcgagaatcggctgcaatatttggcaaaggcctccaatggtttcctgctgaagatgtttcagttgcatccactggtccgctatgagtacacattttactccttgtcggccatgttcagcgcctttccggatcatgattactgtgtgaccttggtgccggccaacgtgtccacgagtccttgccagcgggagctgctccgcttctttctgccggttgcccatcgtccgagcagcaccgtttccgaaaacttgttcgtcgcgcatcgaagtacgctgtttggggaactccgcgtacatcgattcgaaagtcaggagatcgatgaaatcagaaccttgataagcaaacaggcccgcaaaagggaaagcttgtcggaagatgattctgaggatagtaaagggatcgacaattacacagaggacgttctgtccatatttgaggatatcataagggaaatcctcgaggatccaatgtgtgatctgacctgcttcaccattcgatgtggccaatcgaagaagcataccgactgcccgttggttggctttataatcctgagaccctttttggtatatgacgatataagcaagatattcatgatgccgagagaccagttttcgctgacgcacaaacgtggcgagattgtcatgtttaggctacatccatttttccagatgtggtgcaagacgatccttcgcaccgttgccttatgcgataattaccgagaactgtactacatacacttctttagcggcatctcgctgcccaatgatctgatgtacaacatgatgcccattgagccccgccgcatgaagaagaatctgttcaactacaagtgcgtttccttaaggcgacgggtagcgaagggaaaaatgtcagttaatgtcagcatggatatctgcaccagtcgcatgcggctcttttgccacaatcttcagcccacaatgcacatgggcggcaagaattccctgcttatcgtgggcttttcgagcacgtgtatggcctttctgcggaccgtcatcttcgcttggaattcaaaggatttgattaattataaaaagtacaactgcctgcccatggtggacatcacggtcctggtcggtcacggaattatagaatcggcatatgattgtgacttttcgtgcaacttctgtgcgaacgccaggaactgctatgtggacaccggaaacgtgaatccttttgtgagggatacaatgcagcggatggatgtgaggcattgggtgcgttttgtttccggtgaagtgaaaagtataaagagacaagaaaaggtggtggagctgtcggatggctgtcatctgtactacgataagctggtgctgatgggtgccacaaggtacgggtttgaggacaaagaatttaaggggcatccgattcccttgaactatgtggtcaacaatactcgcctggacaggattatcttttaccacaaagtctgtgaaatggtcgagttaatggagtcatactacattatagtctacggatacaatttgtgtatctacgaatgcattcacttcttagtcacacatggttgcaaggctcagaacatcatatatgtgcagcctcatgtgccgatagtaatggaggacctgggcattcccgaaaaggattctcgtctggatccgatcatcctggaaatgatagctgacttgggagttacgatatatttatcgaccaactacagccagtttattctgagtcaagataatatgaacattgagaaggtggagctgatcatgcatccatctaagaagaagatcgtgctgcactgcgacctatttgtcaactacaatgacaataccataagttcgagcatggagaacgttctctctgaagcgggtattgagataagtgaaaggaggatagtggtcaattcacgatattgcaccaatgatcgcaatatattcgccgctggtataaatgtgatcatgataccgaagccaaactttcagtatacctatggcagtccgcaagaaatggctgaaaagttggcctacgaattgaacatgattaaggttgtgatgcagtcgcgatactccaagccgtacatgtttacgggaatcctgccaatgggctatcagatcatcaagatcacccaaccaaagcccctgcttataggacaactaccgattgaattttctgagaccttgactacctacgatgatggcgacttttgccgcattcgacttaacaataaactgattgtcatagagattgtctgcgtcaccaagaagccgaagagactttactttatggagtacttttgtggcaaacacgccatgctactcaatgatctgcgcggtcgctttcaagcaggttggattcagaattttctggatttctttcaacaaccctggacagagctcctgatgcacgacagattcgaggatctgcagttaaagaaccgcagacttctgctctcaatgctgctgatgaacaacaaggataccaataatcccaggaacagtttggaaaacacgcagaggctaaggctggaggaaaacgtgatcgattttgtgcgaacctatcgaaaggatttcactcacgaatttgcgctgccggaggattggggtgtctttaatctatga

SEQ ID NO: 31560 - protein, 2424 aa, DROSOPHILA
MNQFQIRLAQAGDQDGLNKLIRSPGVKWFGNIRPKFRGKDSLFNSYQTYRILAFCTESSALVAYAEFRNYPSIAALPTDCWLEWLSTRYCLSMSISWLNALFFNFCVYKSDQSPVLVEIIKDVLYRESRVWFLITVRCPYVPQPIHFVETFDDLEKISQVFYPLEYSMDKNNNTQSLYIVDRFVILPRITYRKALAEDNDDIIAMQEVENPEMREELGDYYIAEEVMGQNPKSMLVVAETINQSQESEMAIFLWLSSDIDIMFYVRNYEMEQFGNLVKPADGRSFHYETMTVSSVQRRAEASMFTADALDDLNAVTILGGLQKVDSGMSVASLGKMKVSSIGGTIVDTNVANENKFYMRECLYSKFKYILEKLHSTDYYLRHEQSVINFIYPAGTEPAGPAAMAAASNVFLLRCIVARQDFPLPRLFNAMVAIFSAYPDRDYCMMLMSVKYKASKSYLEVMQYFMPVASRPSNLSSLDDVFITHRSTIFGEISLYKLEKEDVAHVHKLALGNLPSNTQTPNSSSSSFSYCSKVNEREELEHELHVLDAIMKDVLENEFSEFAVFTIRCGISTRSVRENTAIGFVIVREFHSHEKLFEHYHLPKQEYQLNRRRAEIISLRLHPLFLGYKYSNDLKKMMMVVEPKPIKKVPVFTRVQANHKKPRKKLDLPPPNFSRDNLIIYRHKLNPVKWFTNSQKLVIIGFSAVTKAFLRQLVFQWNSKDALNMRRDKKFVKLDSCEIYYDTLLLMCDRMFVLRCIDVPVYSPRPCNLVEINFRLNKFLLFYKVRALLEDMPRTYLVLVYGNNLHTYECIAFLIGHGVDCSRMVFVQPHRITGRDADMKEKCPYWDKNLQMIMDDILVEKGVNIFTDYDFHHYNLHKSTDFIMEVIFQHFPTQKQMTFECDLFISFQEGHLHQRHKQWLENAGIELDGNQILVNERYQTNDPDVYAAGSFIKMRITPNYQYKFVSERELARKILHHLGIVTDKNFEDRFAEPVLFQAILPLRYFITKVTMPRRYLLSQVPVIKNCNLTTYKNKTFCRVGLSTRMMVDEIVVVTKKECNLDFLLYFCGKHELLLNKLKSRYRANLIHCFLKFFQEPWTELIMHDDFEELQAENKELLSPMAISALSRPGRGALGELTDMDFFTLNKRYIELKLLTFLREHRRDFRHKFALPEDFLKLDLADYERYMDTEENDSSSDLTGIRDQRRIEDLYDAKSTWHFGVKETPPLDTLFLKNQAQRLIVYNKQEYHLLLAYSEFANHPNIPVLANDLWLHWLNVRFCVDLPITLLNAIFFNFFICKDGHSQMLKKVILEVFYTEHLVNYMLVFKPPDCPPGQYDAVQAFGTTYYPKHSKVSEQKHLPAVIVIQRRSTMPVLSFRKALPEDNDDIVEMIDSEDPELRKKHGDFYIAEHLLNAEGSDSDHNDKIIIAEFEEEIADNVKGAGLMWLSQSLDIKMLATNYHLERLGNLVRYTPGCTHAHVGFEVISVELKSYKELFTRKQMEERYKSHVSRINTDGQDETRNILFKKYKHIYEELREGVYYITAHQDKLEISFDLPDGEKSTSENRLQYLAKASNGFLLKMFQLHPLVRYEYTFYSLSAMFSAFPDHDYCVTLVPANVSTSPCQRELLRFFLPVAHRPSSTVSENLFVAHRSTLFGELRVHRFESQEIDEIRTLISKQARKRESLSEDDSEDSKGIDNYTEDVLSIFEDIIREILEDPMCDLTCFTIRCGQSKKHTDCPLVGFIILRPFLVYDDISKIFMMPRDQFSLTHKRGEIVMFRLHPFFQMWCKTILRTVALCDNYRELYYIHFFSGISLPNDLMYNMMPIEPRRMKKNLFNYKCVSLRRRVAKGKMSVNVSMDICTSRMRLFCHNLQPTMHMGGKNSLLIVGFSSTCMAFLRTVIFAWNSKDLINYKKYNCLPMVDITVLVGHGIIESAYDCDFSCNFCANARNCYVDTGNVNPFVRDTMQRMDVRHWVRFVSGEVKSIKRQEKVVELSDGCHLYYDKLVLMGATRYGFEDKEFKGHPIPLNYVVNNTRLDRIIFYHKVCEMVELMESYYIIVYGYNLCIYECIHFLVTHGCKAQNIIYVQPHVPIVMEDLGIPEKDSRLDPIILEMIADLGVTIYLSTNYSQFILSQDNMNIEKVELIMHPSKKKIVLHCDLFVNYNDNTISSSMENVLSEAGIEISERRIVVNSRYCTNDRNIFAAGINVIMIPKPNFQYTYGSPQEMAEKLAYELNMIKVVMQSRYSKPYMFTGILPMGYQIIKITQPKPLLIGQLPIEFSETLTTYDDGDFCRIRLNNKLIVIEIVCVTKKPKRLYFMEYFCGKHAMLLNDLRGRFQAGWIQNFLDFFQQPWTELLMHDRFEDLQLKNRRLLLSMLLMNNKDTNNPRNSLENTQRLRLEENVIDFVRTYRKDFTHEFALPEDWGVFNL

SEQ ID NO: 31561 - DNA, 8410 bp, DROSOPHILA
cggacaactggggttggttcggctggccgtgtgcagctcctcaactcgtctaaatgctatgtatgtaagtagtagtgtggtgtgtcgtttagtatgtatatatatatatatatatattcactgccgtcaatgaagtatattattccttgttatagaaaagcactaaccattaaacattgcaactgccgtttcacttgtcgccttcaaactccactcaacaactccccacaagttcgagtcggagacaagtgctcgattgtgatcgtagatatgaaagagtttgcatacaagtatcgtaatcagtatcgtattgtatcgctatcaagcctattgactaggaccgattcaaaagcccccaaaacatgctgtacaaatggtgtactttggttctaactacattcgtcttgagtaaccaccgtctttgtgtgtacttgctatggcctgatctggtttatcatctgctataagttcctttgagtacgtattttaatgaagttctgctgggacacagatccctgctatgtagtgattactatctcctcgcgctcatgaagcaatatctatcgtacagcactcgcgtctcttaagtacaaaggttctcgtttcccattggggaaacatttctgtggtgcatggatggggaaggggcactgtgcctgtctatgagtctctacgctggtagatgtgataatggaaaaattcgtaattgctaaagctgcacaatgcccccatgattgtgacaagtgtggttttgtgtatctgagtgtaataccgaagattccactgcaacatgtttcctctttatctgctagcatcagttttcgaagacgcatgttgtagtggactccagacatcaattattctattcgataactgatgcagaaactttgagttcactcagttcctagactgatttccagttcgatatgaatgaagagttagactagatgctatctttaatcctaatccccctattcggagagtctcaaacacttcatccttaggtgttcttagcagtcatttgacgaggcgccggctcgcccgcctcggcgtaaagacaggatccctcgctgcaggagcaggtgtcgccctcgcgggagctattgcaacaatcgctggtgtactggcgctgctcgtactccgccagcatgttctcgttctcgctctccatgcacggctgcaccaccggggctcgtcgacggtggtgtcctccgcgttgtttggcactgctgccgtgctcctcgagctgcagctgccgcttgtgactctgcgagctcctcgagtgatccgagcactcggaggagcactggtagatctggtggttggaggaggtcgggtgcatcgggtggctattgggatgcaccggttggtaccagccctcgggtacgggaactggcggtgggggttgcatgggcgagggtgtggccaaggcatcgcagctgttgcaggcgcggctttgggcacatcgcgctgcattcagtccagcctggtactcgctggctgcatgacgctgtgtggcaaatggcaggtggttgggtggtacagctcctcctggacccgtggtggcaaagtaggccggtaactgtggcggatgttggtttgttggcgttatctgatagcggttctgggtgccgccagccactgccgacagcggattgctataaacgttttccggtggacaggcgacagcatattggggcgaaactccccaagctgaaaagccgcccgaggagctgctgtgtatggaggcgttcagaatgctgcaagggtattaaagtgttagtcacagaacccaaaggcaataacaactatttgaagaatgtatattaatgtacctttgatttgtagaaatgccggaacctgcgcttttggagctcttccgtgaagattcaggagatccttgtgcgtatccataggtagaagacggaggtgggtgttctggcggcgggggtagaaactctgaccagttgatcggttcaaccggatactgaagatagttggatttgacaacaggaaccgctggcacctgaccggcaaatgcgtcagaatagggcgaatgagttcccgagtccttatcggcacttatagatgttgtcttggtgcaggtctcactggaagaggtaccaatgatcatagtggtggcgtacggcgtgggattatcggggctctgaaagaatatttcctataagaaattgttgtgtgatgcaattcatatgatcctcaccttgcgacaattgtagaaggtggtaaggttacgggtgtcaacttctgcataatcggttcctccatcggagttattgtagttggattggctgctgtttacgtgggatagtagcttcgattcgcttaatcctgagtctttgtcagtatcggcagttcgccatccacgatgatggtctatccaaaggctctctttgctattgatgttcaatgcggttatttcgttgtcactgaccactagaaaattcaaatcgttatattgtattgaaaaaaaaaagttatttaaaatcagcactaaccacttaagtgacccaattccttggtcatttgatgcttgcgcttgaagtagaccatcgaaatagccgccgaaataaccaggactagaagaacgatgcagaccagcaccattagccatggtccagataggtagtcagtggtctttttatgagtggtgggattaatgtcgccaggtggtatgttgccattgttatgatacgtgagatcctgtccctcatgtcgcccatcatgggtgccgcttggatgtgcccgtggcggatgcacatgatgggtggggtccatgaatagtgatatctgtcgaataataagaagatataaaatgattcaaatgaaatgtctataaacttaccggtttggagtaaggtccatctcctgccttggtaaaggagttcaacctcacgctgtacacagctccggtggttaggttatttaggagcacagatgtggtggtagcattaagagtcatattggccagcaccttcatggtgttaccggcgctgacctcaatcttgtagccatacaaattgccattgtggtgctgggagggtggcggagtccaacgcacccaaccggctgtttggttgtacatgccaatctgaatgttatccggtggtgcggagggaactacaatcaagagaatataaatacccagcacttaacttagctagcttctagttgttaccatcttcataggtgagggctgtcttggagttactgggctgtccttcaattgtctcaaaaaagggtgttaggaagaactcatacttggtgtacttcttaaggtttcccaccacaaacgattctgcagaggcatccataacagtgatcgagtgatactgtgcggatggtacactggcatccttatagtgtatgcgcaggccctggacagaaaggtattgaaaagataagcttggtttgtttataaacaacaaaggatggacttacctctacatatttctcatcagcgctcacgtggagcatccactcaagtcttacggcactagcattgatagccgaggcatctattagctccaccgactgtttaaacacataattaagttttcggatttcgcttttagtgattatgttagcttacctttcccgtcagcaaagttcgagctgctgacaaatcattggcagaagctgcatcgaaatccgcctcaatggttttaatagtatttgataagccggaaggcacagaaataccctgagtattctcagctctaactaggaacacatacgaagtgccaggagtgagacccgagatctatatataaaaatagcagaatgtgtgagtcatgaggaaacttaaatattcacggcttgtcttacagtgacttgagtgtcgccaactcgttgggcagccacaatccaaccagtttgcagatccggactgaagtactctacagtgtatctgcaatacaaaatcaaatttattgatgatctcattaaatgggtgcgccgcgttaactcacccaatgattgggcccacagctccgggtttctcttggcttttagcccaacgaagactaatgctggtgcgactgacattcaggactttaggtgttcctggaggagcaggataagtgctaggatcagctgcccggtgaagagatgtagaaccgggtttttccacctaaagtgagaggtttttcattggttagttttgcatatggcttaggggattaaccctcaaacccaccgttagtgtggcagcccaggaagtttctcctcgttcgccagatgcagtgcaggtgtaggtaccagagtcactaagttgaaggtctacagggaaaatgaaattgtaataaatggaagccagaacttctatcaccatctcaccatcgactctcagtgagcttccttggatgatgctgtatcgattgcccgcttgtacggcatgtccatcgtggaaccacttaatacggggactgggatttccggtggcccgacagggtaaagtagcaactgatcccttgggcagtgtttgattggcaggtccgatttgaataatcggaggtggacgctcgtctaacgagctgacttgcaggaaaacccgtactgtagaggaatcgactacactgaaagcggaacacacatagtagccttcgtcttcctgccgcacatccgtaatctgcagagttccatcggcagccacatgctgcctcccgtgcgaactatttgggaacatgagagtggatactccttccttggtccagaaaacagatggcggtgggtttccggaggccatgcaaggtagttggacaacaccatttagtcccactttcttgttactgggtcttttcgtaaagttcggcggagctttaatgaaaacaattgaagattaaaacgcgattctttggtaatggaacttaatcttaccatggactataagagaagccctagcgctgatctgaccgacattgttgtgtgcctcgcagacataggtgccctcatcggtgggcgttatgttggatatctctaaacttttctcgtcgtgaaggattcgcgctctggacaccggaatattgccctcctcctttttccacaacactttcggcggcggatcaccgcccactgagcagtggaaagtggctgtctggccgtagagcatcacctgatccttgggctccttcataaagtatggtttgacctggacaatcagcttggcatagctgctctcgcgggtgcctaccagattctgggcaatgcacttgtagttgccctcatcaatgggctccacattgctgatcagcaggttgccaccgtccacaattcgaacgcgggagctggcgccaaacgacatggctttcaggtcgtccaagggaacgccgtcctaagagcacaaaaagcggtttagacaactgactttcgcagtctggttttcggaacccacctttatccaaatcagcgttggctctggaatgcctttgggcggcccacactccagcagagccgtctcgcctttggccactcgcgtgtctttgggctccacgcgaaaatcgtcgcgcaaaactagcgaagaaaaattgcaaaaatatcaaaaaagcacattataatcggagacaaagctgggcgtgtgggcagacaagttggagagcagactagagtggcggactaacttaccagctatctggagcgaggcatggcgactaacggcctggcccactcggttcttggccacgcaccagtactctccgccgtcctgttccttcttgccctgcattgtcctgtagaagaagagggcgccgtccttgaactggacgcggtgcgatttcttttcgttggtgctgacgggttcgccatcctgagagcggaaagaagagggggtgattgagttacgatttggttcggtttcgaaggctacacggaaaaaaacaactactcaaaaccacttatattttgtataatttttgaattcatttttgttttgatatttaaagataaataaatatacaatattgatatgaaaacattaagatcaagttttcttttgccagtgtaatggtgattcaagttagaaaagtattatttggtgggtaccttaaaccactcaatggtgggttccggcttgccctccactttgcagttgagcgtggcgggttcattcttcttaacgaccagatccgtgggatgctcgatgatacgtggcgattggtactggcctgaaaggagtaggaaggatgtggattagccactgggcctggggaggattacccaggatgggtttacctctgactgctggcaggccattgctggccaccaggacgaggagcagccaggcgggcaggagccacatcctgctgctccgactgcgagatgggttattagtggtgctcgtgctccgggcgatggcgtggttttcgggatgcatgggatgcattttatggtgttggtgctgttgcaatgacgactctacagatgacccaatgcagcggcgatcattttggcgttgtttttgggtcctgcgatgcatgataggtgatagtatgtgggttaactaaatgtgggcagctgttacatatgtaggcgtggcggcattatggctaggcatttatgggctttacttgctttttgctttttatctgtccaaaaactcgaaattatttctcgcctgctccacttacgcttgcatttccatgcgataagcacacacacacgcacacactcacgcacacttggacactcacacacccacacacatgtgtctatgctggttttccattaattttatttccgtatttatctgcctttgtgtttatcgctcagtctcagtcgcaccgacccgaaaatttacaatccaaattctgattcggagttttgatttcacgttctcacactttctttctaacgctttttttgtatcgttcgctgatttggtttttattttcctttttattttttggattttattaatcagccgcgcagtgtaagtttttgttggtatttattcgacgattgctcgcttttcggggttgttttctccatcatctctcctcgcgcacattttccacatttcccgaacgaaatttctttttggtaaaattacaagaacaagaactgccccgccacccctctcactcgcacacactgccgttctagctgcctctcgctcgcaccgcctgccgttcctgggacttccccccgttgttgttgtatctatatctataacagagtgttgtatctataactccttgtaatatttgctttacatccgcagcagctgcactttgtaatatccgaaaacgagtatctacttcaaatggaagcttcgcggttggatcgtactttcttgggtgcaaacttactccaatttaactgttggaaattaactattttcctgctctttagtgcgattcacggcgcagcgaaaactcacaattggacgtgggtcgtgtctgtggaaatttgagagcgcaacgcccggaatcgatatatcgatatattttggggtgtaccgaaaaggaatactcgaaaataccagaggacatatttatcagttgatctggtagcgccgcgtaaagtaactatttgaatctttaattgatttctattgtattgaaattgaaatcgaaagatataccaactatgttttaagatattaataaaatgtaaatatttaaattaatgtatgtattgtgatgttgaatggtttattaaaaaattccgttttattcagaatatctatataatttgtgtgtgattgcttaaatacgtatatattaatattcatgttcacggtagaaccaactgtaaaatactataaaaatatatagataattgttatggtagagaatagttcctacaccaatttaaggtgttttgtttaatatagtttccctgcattaatcaaataactacagagtctagcaaattattccattctggccaggttcatctttcccctagccaaagtcctcgaaagaaccacgttggagaggttggcttcgaaggcaggcgctcggctgcgtcctggatgcaagtggaaagtgggaggtgtgggcgccgctgggcgacgaccagtcggctgggcactcttcaccagcttgggctggagctgcaggcgcgacactctgtccacggacatgctcttgggccgccgggctagatagctatggacgtggctattggagccattggcaatgttcaaatttaccaggtagtcctgcagctgcgtctttagctggctgttctccgcctccaggcgacgcttctgttgcttcaggcaggccacgtccacggccacgttgttgacgcgtcgccagaaggactccatttggggtaccactgccacctcgtcctggtacgttaaaccaatgttgaatgaagaaattacctactggcatttttactcaccttaagaagatcagtggctgggtcagtcaaggaacca

SEQ ID NO: 31562 - DNA, 4355 bp, DROSOPHILA
acccacgtccaattgtgagttttcgctgcgccgtgaatcgcactaaagagcaggaaaatagttaatttccaacagttaaattggagacccaaaaacaacgccaaaatgatcgccgctgcattgggtcatctgtagagtcgtcattgcaacagcaccaacaccataaaatgcatcccatgcatcccgaaaaccacgccatcgcccggagcacgagcaccactaataacccatctcgcagtcggagcagcaggatgtggctcctgcccgcctggctgctcctcgtcctggtggccagcaatggcctgccagcagtcagaggccagtaccaatcgccacgtatcatcgagcatcccacggatctggtcgttaagaagaatgaacccgccacgctcaactgcaaagtggagggcaagccggaacccaccattgagtggtttaaggatggcgaacccgtcagcaccaacgaaaagaaatcgcaccgcgtccagttcaaggacggcgccctcttcttctacaggacaatgcagggcaagaaggaacaggacggcggagagtactggtgcgtggccaagaaccgagtgggccaggccgttagtcgccatgcctcgctccagatagctgttttgcgcgacgattttcgcgtggagcccaaagacacgcgagtggccaaaggcgagacggctctgctggagtgtgggccgcccaaaggcattccagagccaacgctgatttggataaaggacggcgttcccttggacgacctgaaagccatgtcgtttggcgccagctcccgcgttcgaattgtggacggtggcaacctgctgatcagcaatgtggagcccattgatgagggcaactacaagtgcattgcccagaatctggtaggcacccgcgagagcagctatgccaagctgattgtccaggtcaaaccatactttatgaaggagcccaaggatcaggtgatgctctacggccagacagccactttccactgctcagtgggcggtgatccgccgccgaaagtgttgtggaaaaaggaggagggcaatattccggtgtccagagcgcgaatccttcacgacgagaaaagtttagagatatccaacataacgcccaccgatgagggcacctatgtctgcgaggcacacaacaatgtcggtcagatcagcgctagggcttctcttatagtccatgctccgccgaactttacgaaaagacccagtaacaagaaagtgggactaaatggtgttgtccaactaccttgcatggcctccggaaacccaccgccatctgttttctggaccaaggaaggagtatccactctcatgttcccaaatagttcgcacgggaggcagcatgtggctgccgatggaactctgcagattacggatgtgcggcaggaagacgaaggctactatgtgtgttccgctttcagtgtagtcgattcctctacagtacgggttttcctgcaagtcagctcgttagacgagcgtccacctccgattattcaaatcggacctgccaatcaaacactgcccaagggatcagttgctactttaccctgtcgggccaccggaaatcccagtccccgtattaagtggttccacgatggacatgccgtacaagcgggcaatcgatacagcatcatccaaggaagctcactgagagtcgatgaccttcaacttagtgactctggtacctacacctgcactgcatctggcgaacgaggagaaacttcctgggctgccacactaacggtggaaaaacccggttctacatctcttcaccgggcagctgatcctagcacttatcctgctcctccaggaacacctaaagtcctgaatgtcagtcgcaccagcattagtcttcgttgggctaaaagccaagagaaacccggagctgtgggcccaatcattggatacactgtagagtacttcagtccggatctgcaaactggttggattgtggctgcccaacgagttggcgacactcaagtcactatctcgggtctcactcctggcacttcgtatgtgttcctagttagagctgagaatactcagggtatttctgtgccttccggcttatcaaatactattaaaaccattgaggcggatttcgatgcagcttctgccaatgatttgtcagcagctcgaactttgctgacgggaaagtcggtggagctaatagatgcctcggctatcaatgctagtgccgtaagacttgagtggatgctccacgtgagcgctgatgagaaatatgtagagggcctgcgcatacactataaggatgccagtgtaccatccgcacagtatcactcgatcactgttatggatgcctctgcagaatcgtttgtggtgggaaaccttaagaagtacaccaagtatgagttcttcctaacacccttttttgagacaattgaaggacagcccagtaactccaagacagccctcacctatgaagatgttccctccgcaccaccggataacattcagattggcatgtacaaccaaacagccggttgggtgcgttggactccgccaccctcccagcaccacaatggcaatttgtatggctacaagattgaggtcagcgccggtaacaccatgaaggtgctggccaatatgactcttaatgctaccaccacatctgtgctcctaaataacctaaccaccggagctgtgtacagcgtgaggttgaactcctttaccaaggcaggagatggaccttactccaaaccgatatcactattcatggaccccacccatcatgtgcatccgccacgggcacatccaagcggcacccatgatgggcgacatgagggacaggatctcacgtatcataacaatggcaacataccacctggcgacattaatcccaccactcataaaaagaccactgactacctatctggaccatggctaatggtgctggtctgcatcgttcttctagtcctggttatttcggcggctatttcgatggtctacttcaagcgcaagcatcaaatgaccaaggaattgggtcacttaagtgtggtcagtgacaacgaaataaccgcattgaacatcaatagcaaagagagcctttggatagaccatcatcgtggatggcgaactgccgatactgacaaagactcaggattaagcgaatcgaagctactatcccacgtaaacagcagccaatccaactacaataactccgatggaggaaccgattatgcagaagttgacacccgtaaccttaccaccttctacaattgtcgcaagagccccgataatcccacgccgtacgccaccactatgatcattggtacctcttccagtgagacctgcaccaagacaacatctataagtgccgataaggactcgggaactcattcgccctattctgacgcatttgccggtcaggtgccagcggttcctgttgtcaaatccaactatcttcagtatccggttgaaccgatcaactggtcagagtttctacccccgccgccagaacacccacctccgtcttctacctatggatacgcacaaggatctcctgaatcttcacggaagagctccaaaagcgcaggttccggcatttctacaaatcaaagcattctgaacgcctccatacacagcagctcctcgggcggcttttcagcttggggagtttcgccccaatatgctgtcgcctgtccaccggaaaacgtttatagcaatccgctgtcggcagtggctggcggcacccagaaccgctatcagataacgccaacaaaccaacatccgccacagttaccggcctactttgccaccacgggtccaggaggagctgtaccacccaaccacctgccatttgccacacagcgtcatgcagccagcgagtaccaggctggactgaatgcagcgcgatgtgcccaaagccgcgcctgcaacagctgcgatgccttggccacaccctcgcccatgcaacccccaccgccagttcccgtacccgagggctggtaccaaccggtgcatcccaatagccacccgatgcacccgacctcctccaaccaccagatctaccagtgctcctccgagtgctcggatcactcgaggagctcgcagagtcacaagcggcagctgcagctcgaggagcacggcagcagtgccaaacaacgcggaggacaccaccgtcgacgagccccggtggtgcagccgtgcatggagagcgagaacgagaacatgctggcggagtacgagcagcgccagtacaccagcgattgttgcaatagctcccgcgagggcgacacctgctcctgcagcgagggatcctgtctttacgccgaggcgggcgagccggcgcctcgtcaaatgactgctaagaacacctaa

SEQ ID NO: 31563 - protein, 1395 aa, DROSOPHILA
MHPMHPENHAIARSTSTTNNPSRSRSSRMWLLPAWLLLVLVASNGLPAVRGQYQSPRIIEHPTDLVVKKNEPATLNCKVEGKPEPTIEWFKDGEPVSTNEKKSHRVQFKDGALFFYRTMQGKKEQDGGEYWCVAKNRVGQAVSRHASLQIAVLRDDFRVEPKDTRVAKGETALLECGPPKGIPEPTLIWIKDGVPLDDLKAMSFGASSRVRIVDGGNLLISNVEPIDEGNYKCIAQNLVGTRESSYAKLIVQVKPYFMKEPKDQVMLYGQTATFHCSVGGDPPPKVLWKKEEGNIPVSRARILHDEKSLEISNITPTDEGTYVCEAHNNVGQISARASLIVHAPPNFTKRPSNKKVGLNGVVQLPCMASGNPPPSVFWTKEGVSTLMFPNSSHGRQHVAADGTLQITDVRQEDEGYYVCSAFSVVDSSTVRVFLQVSSLDERPPPIIQIGPANQTLPKGSVATLPCRATGNPSPRIKWFHDGHAVQAGNRYSIIQGSSLRVDDLQLSDSGTYTCTASGERGETSWAATLTVEKPGSTSLHRAADPSTYPAPPGTPKVLNVSRTSISLRWAKSQEKPGAVGPIIGYTVEYFSPDLQTGWIVAAQRVGDTQVTISGLTPGTSYVFLVRAENTQGISVPSGLSNTIKTIEADFDAASANDLSAARTLLTGKSVELIDASAINASAVRLEWMLHVSADEKYVEGLRIHYKDASVPSAQYHSITVMDASAESFVVGNLKKYTKYEFFLTPFFETIEGQPSNSKTALTYEDVPSAPPDNIQIGMYNQTAGWVRWTPPPSQHHNGNLYGYKIEVSAGNTMKVLANMTLNATTTSVLLNNLTTGAVYSVRLNSFTKAGDGPYSKPISLFMDPTHHVHPPRAHPSGTHDGRHEGQDLTYHNNGNIPPGDINPTTHKKTTDYLSGPWLMVLVCIVLLVLVISAAISMVYFKRKHQMTKELGHLSVVSDNEITALNINSKESLWIDHHRGWRTADTDKDSGLSESKLLSHVNSSQSNYNNSDGGTDYAEVDTRNLTTFYNCRKSPDNPTPYATTMIIGTSSSETCTKTTSISADKDSGTHSPYSDAFAGQVPAVPVVKSNYLQYPVEPINWSEFLPPPPEHPPPSSTYGYAQGSPESSRKSSKSAGSGISTNQSILNASIHSSSSGGFSAWGVSPQYAVACPPENVYSNPLSAVAGGTQNRYQITPTNQHPPQLPAYFATTGPGGAVPPNHLPFATQRHAASEYQAGLNAARCAQSRACNSCDALATPSPMQPPPPVPVPEGWYQPVHPNSHPMHPTSSNHQIYQCSSECSDHSRSSQSHKRQLQLEEHGSSAKQRGGHHRRRAPVVQPCMESENENMLAEYEQRQYTSDCCNSSREGDTCSCSEGSCLYAEAGEPAPRQMTAKNT

SEQ ID NO: 31564 - DNA, 3061 bp, DROSOPHILA
atttggtttttattttcctttttattttttggattttattaatcagccgcgcagtgtaagtttttgttggtatttattcgacgattgctcgcttttcggggttgttttctccatcatctctcctcgcgcacattttccacatttcccgaacgaaatttctttttggtaaaattacaagaacaagaactgccccgccacccctctcactcgcacacactgccgttctagctgcctctcgctcgcaccgcctgccgttcctgggacttccccccgttgttgttgtatctatatctataacagagtgttgtatctataactccttgtaatatttgctttacatccgcagcagctgcactttgtaatatccgaaaacgagtatctacttcaaatggaagcttcgcggttggatcgtactttcttgggtgcaaacttactccaatttaactgttggaaattaactattttcctgctctttagtgcgattcacggcgcagcgaaaactcacaattggacgtgggtcgtgtctgtggaaatttgagagcgcaacgcccggaatcgatatatcgatatattttggggtgtaccgaaaaggaatactcgaaaataccagaggacatatttatcagttgatctggtagcgccgcgtaaagtaactatttgaatctttaattgatttctattgtattgaaattgaaatcgaaagatataccaactatgttttaagatattaataaaatgtaaatatttaaattaatgtatgtattgtgatgttgaatggtttattaaaaaattccgttttattcagaatatctatataatttgtgtgtgattgcttaaatacgtatatattaatattcatgttcacggtagaaccaactgtaaaatactataaaaatatatagataattgttatggtagagaatagttcctacaccaatttaaggtgttttgtttaatatagtttccctgcattaatcaaataactacagagtctagcaaattattccattctggccaggttcatctttcccctagccaaagtcctcgaaagaaccacgttggagaggttggcttcgaaggcaggcgctcggctgcgtcctggatgcaagtggaaagtgggaggtgtgggcgccgctgggcgacgaccagtcggctgggcactcttcaccagcttgggctggagctgcaggcgcgacactctgtccacggacatgctcttgggccgccgggctagatagctatggacgtggctattggagccattggcaatgttcaaatttaccaggtagtcctgcagctgcgtctttagctggctgttctccgcctccaggcgacgcttctgttgcttcaggcaggccacgtccacggccacgttgttgacgcgtcgccagaaggactccatttggggtaccactgccacctcgtcctggtacgttaaaccaatgttgaatgaagaaattacctactggcatttttactcaccttaagaagatcagtggctgggtcagtcaaggaaccattaccctgatcctctatatctcgaatctcgataatctccttggatatttccggcaactggaacatccgctcccgctgggtttccatcttggcacagaccgcagacaactgtgccagagtctcgcccttggccacagtttcctggaggaattccaaggcatggtagctctccacggacatcagcttgaacaactggtgatccctggccacctcctgttccacacaggtgcgtagctcccttagtcgctcggtcaactgctgtttgatggcttgccgctgctccagttggccctgttgcttgatgtagaactcctcggagaccagacgcaaattggtcagctggtctaccaggtgctcgatttcgtgggtctgctggctaatctggagggctgcctcctcatcccgctgcttcagatccacgtactccgagtaaaagccttcgatgtgctgacagtagcccgccagaacaccctgatactcctgccacagcttctccaatcgagcttcacctctggaggtgatctgctccagctgtagttgcatctggaagtggggttcaatttaacatgttttcataaacttttaaaataacctttattgtaaaatataatcatcgaagagcattgcacgcaattgtaaaattaagattgatatgtgtcttggttcattgtgcgtcagtcactctgtaatttggatgccattctccagaactataaatgatgtgggcatagctgctcctccattcagttcccaagatgaaacagttgattttcctgctgatttgtttgagctgcggcacctgctccatttacgcactgaaatgcagatcccaggagggactaagtgaagcggagctcaagcgaactgtgcgcaactgtatgcatcgccaggacgaggacgaagatcgaggacgaggtggacagggccggcaaggaaatggctatgagtacggttacggaatggatcacgatcaggaggagcaggacaggaatccaggcaacaggggcggctatggcaatcgaaggcagcgaggactaaggcaatcggatggcaggaaccacaccagcaacgatggaggtcagtgtgtggcccagtgctttttcgaggagatgaatatggtaggtgatccaagagattcctttcaaagtcgaaatccttcagagaagcaggagcttattcctttcaattctcacccacaggtggatggcaatgggatgcccgatcggcgcaaggtgagctatttgctgaccaaggaccttcgggaccgggagctgcgcaacttcttcacggacaccgtgcagcagtgcttccgctatctggagagcaacggaaggggccggcaccacaagtgttcagcggcccgggaactggtcaagtgcatgtcggagtacgcgaaggcgcagtgcgaggattgggaggagcacggcaacatgctcttcaattaggattaaactcaccccactttttaggtcctcgcagcggtccaagaaacgctcgtggttgtcccggatcccgccatcggtgttctcctccagctgataga

SEQ ID NO: 31565 - DNA, 1005 bp, DROSOPHILA
atgcaactacagctggagcagatcacctccagaggtgaagctcgattggagaagctgtggcaggagtatcagggtgttctggcgggctactgtcagcacatcgaaggcttttactcggagtacgtggatctgaagcagcgggatgaggaggcagccctccagattagccagcagacccacgaaatcgagcacctggtagaccagctgaccaatttgcgtctggtctccgaggagttctacatcaagcaacagggccaactggagcagcggcaagccatcaaacagcagttgaccgagcgactaagggagctacgcacctgtgtggaacaggaggtggccagggatcaccagttgttcaagctgatgtccgtggagagctaccatgccttggaattcctccaggaaactgtggccaagggcgagactctggcacagttgtctgcggtctgtgccaagatggaaacccagcgggagcggatgttccagttgccggaaatatccaaggagattatcgagattcgagatatagaggatcagggtaatggttccttgactgacccagccactgatcttcttaaggacgaggtggcagtggtaccccaaatggagtccttctggcgacgcgtcaacaacgtggccgtggacgtggcctgcctgaagcaacagaagcgtcgcctggaggcggagaacagccagctaaagacgcagctgcaggactacctggtaaatttgaacattgccaatggctccaatagccacgtccatagctatctagcccggcggcccaagagcatgtccgtggacagagtgtcgcgcctgcagctccagcccaagctggtgaagagtgcccagccgactggtcgtcgcccagcggcgcccacacctcccactttccacttgcatccaggacgcagccgagcgcctgccttcgaagccaacctctccaacgtggttctttcgaggactttggctaggggaaagatgaacctggccagaatggaataa

SEQ ID NO: 31566 - protein, 334 aa, DROSOPHILA
MQLQLEQITSRGEARLEKLWQEYQGVLAGYCQHIEGFYSEYVDLKQRDEEAALQISQQTHEIEHLVDQLTNLRLVSEEFYIKQQGQLEQRQAIKQQLTERLRELRTCVEQEVARDHQLFKLMSVESYHALEFLQETVAKGETLAQLSAVCAKMETQRERMFQLPEISKEIIEIRDIEDQGNGSLTDPATDLLKDEVAVVPQMESFWRRVNNVAVDVACLKQQKRRLEAENSQLKTQLQDYLVNLNIANGSNSHVHSYLARRPKSMSVDRVSRLQLQPKLVKSAQPTGRRPAAPTPPTFHLHPGRSRAPAFEANLSNVVLSRTLARGKMNLARME

SEQ ID NO: 31567 - DNA, 2502 bp, DROSOPHILA
aatggctatgagtacggttacggaatggatcacgatcaggaggagcaggacaggaatccaggcaacaggggcggctatggcaatcgaaggcagcgaggactaaggcaatcggatggcaggaaccacaccagcaacgatggaggtcagtgtgtggcccagtgctttttcgaggagatgaatatggtaggtgatccaagagattcctttcaaagtcgaaatccttcagagaagcaggagcttattcctttcaattctcacccacaggtggatggcaatgggatgcccgatcggcgcaaggtgagctatttgctgaccaaggaccttcgggaccgggagctgcgcaacttcttcacggacaccgtgcagcagtgcttccgctatctggagagcaacggaaggggccggcaccacaagtgttcagcggcccgggaactggtcaagtgcatgtcggagtacgcgaaggcgcagtgcgaggattgggaggagcacggcaacatgctcttcaattaggattaaactcaccccactttttaggtcctcgcagcggtccaagaaacgctcgtggttgtcccggatcccgccatcggtgttctcctccagctgatagaagacgcactccagttgctgctgcttctgggcatgcatctccttgaacgcggcggagtcctgctcccactggctcagcaccgcctgcttgtcgtcctcgtagatcgtccgaaagaactcgatgcgatctctatgggtatctgggtaaaggataagaaataaatgggttagaaatgaggcctagttgcgttgaatggtttgtgtccattttaattttcattttacaatgcttcttattgttcataaaatgtacatcaaaatactccagtaatttttggatttccaaatatttcaatgttcttattaacgaaagcattaatatacatgtgaaatccattccattcattttaagtatctttaaacatattgctgtagctgtgtatttagtttctgattaaaatgttatttttaaggatgttatcccaatcgtaccaactatcctggtgatattctccatgtgtgactgctgcagattggcgtacatatcctcggtggattctatgtgagcaatgaggcgatggatcacctggtccttgcgcttaagtgcctcctgaaagaaagactccacatcgacgatttcgcggcgcagctcctggattttcacctggcgcaaaatgctccgccactcctggttgattttagccatattgagtcgaccaaaagcatcctctcttttcagtttgttctattttaatgggaaaagtcataccatagggattttgattttgatttactgcaaattcgtggtgtgttaccttcatgtacatggaaatgagctgcattttccgccgcctcgtctcttcctccatgtcggccctcatttgcaaatacctggcccgctcctcctcggacatgttggccaatttgttgccttttcctttaccctttttgcccatgatttagttttttttttttacggctaccaaaaatcagcttatcaaatttcaaaggccaatctctgactaattaggcgagcaaagagccgccttggaaaataaataataaattgactgccggcgttgccatgacaagattcactagcccacccactccatataatttcgcttttcgtcgccaggtttgttgccataataatggatgcgaattaaattaatgcgaaacagtggaaaacgccattagggctgtccatcaaaggggaaccatttgacatataaaactgaggacgaaccgctggaaagctgtcatcatgctgagaattggtttcgtgatttgtgtgattatatcactgcgcttggtacgtactcataacaccgttttcaatttgttctggattggataatgttcgagggtgtttttaatggattatccacactagatcggatttattgtacataataattttgaaagttcaaggtccatcggggatccgtattcgagctactttttaatcctttaatatgtgcatatttctatgcagaatggactcgtggctgtccgagttcattgccggcacatggagcgtattcacgaggagaacatccaccattgctgcaaacatcaggatggccacgacgatgtcacggaatcttgcgccaagcagaccaactttcgtttgcccagtcccaatgaggaggccatcgtggatgtgaccgtggaccaggcgatggttggaacctgctgggccaagtgcgtcttcgatcactacaatctgatggagaacaacacactggatatggacaaggtgcgctcgtactacaagcggtaccatcaaacagatccggagtacgcgactgaaatgctgaatgcctacgaaaaatgtcacacacaatgtgagctcatgcaaaataaccatcaacatagtttaaaattgaatttttccattccaaattttagctgaagaggccaccgaaaagttcctatcacttccaattgtta

SEQ ID NO: 31568 - DNA, 432 bp, DROSOPHILA
atgggcaaaaagggtaaaggaaaaggcaacaaattggccaacatgtccgaggaggagcgggccaggtatttgcaaatgagggccgacatggaggaagagacgaggcggcggaaaatgcagctcatttccatgtacatgaagaacaaactgaaaagagaggatgcttttggtcgactcaatatggctaaaatcaaccaggagtggcggagcattttgcgccaggtgaaaatccaggagctgcgccgcgaaatcgtcgatgtggagtctttctttcaggaggcacttaagcgcaaggaccaggtgatccatcgcctcattgctcacatagaatccaccgaggatatgtacgccaatctgcagcagtcacacatggagaatatcaccaggatagttggtacgattgggataacatccttaaaaataacattttaa

SEQ ID NO: 31569 - protein, 143 aa, DROSOPHILA
MGKKGKGKGNKLANMSEEERARYLQMRADMEEETRRRKMQLISMYMKNKLKREDAFGRLNMAKINQEWRSILRQVKIQELRREIVDVESFFQEALKRKDQVIHRLIAHIESTEDMYANLQQSHMENITRIVGTIGITSLKITF

SEQ ID NO: 31570 - DNA, 2716 bp, DROSOPHILA
gactcgtggctgtccgagttcattgccggcacatggagcgtattcacgaggagaacatccaccattgctgcaaacatcaggatggccacgacgatgtcacggaatcttgcgccaagcagaccaactttcgtttgcccagtcccaatgaggaggccatcgtggatgtgaccgtggaccaggcgatggttggaacctgctgggccaagtgcgtcttcgatcactacaatctgatggagaacaacacactggatatggacaaggtgcgctcgtactacaagcggtaccatcaaacagatccggagtacgcgactgaaatgctgaatgcctacgaaaaatgtcacacacaatgtgagctcatgcaaaataaccatcaacatagtttaaaattgaatttttccattccaaattttagctgaagaggccaccgaaaagttcctatcacttccaattgttagggccttctccaccgccaagttctgtaagccgacctcgagtatcatcatgtcctgcgtcatctacaacttcttccacaattgtccagcgagtcgctggtcaaataccaccgagtgcgtggaaaccttggcctttgctaggaagtgcaaggatgtgctgactactatgtaagcactttagagtcctgcctcaggaaatacattttaattgggaaaacgaaatgattttccaatgattaaagcaaaacaatggctctcaattcatgtgctcttttggtttataagtaatggtgggtgattgaatgccaactcagcaatacatttaattaaatggatttattgttatcaaatcacttgcaaaaatacgatattaactaatgtcaagttgatcgtatttgtttaccattacatccctataaaaaaaaaaacatccaaatatacagaataattctgaatgcataacattttttcatctaaacaaaataattcgaatgtcgtaaatcgtaaatttaatgttctttattgcagaagaatgatattctcattattcacaaagtagccagcgagtcctggcacttcttgctgaaggccagggtatcctcgcactccttggtcttcgaccagcgatccgccgggcagttgtggaagaactggcggatgacacaggccaggacgacactagacttcggatcgcagaattgcttggacatttgcttgaagaggggcttcgacaggaacatggaggtattctcttcgccttttggtgaaaaaaatatcagttagccaagaagttcttgctgaaataacaactctgtacttttgccgtgacaatgatcaaaggcgttgatcatttccttggcatattccggatcgtcgggaaacctttcagtgaacaaacttctcacggcatccatgtccaggttgttgtccttcatcaggttcagtttgctaaagacgcatttgccaaaacaagtgcctcggatggctcggtccgccgtgatgtccaccagtgcctcctcgttttgattgggcagcgtaaaattggtctccctggcacatccttcgattagatcattgtgtccatcgggatgcttgcagcaatagtggatgtggtcctcgttaatggcctccgtattctcgcaatcaattttaattccaccagcaaactaagtcatgtatttgaatatatataaacagtgtgaatttcattcctcgaactcacccaaatcaggctgaaaaaactcaataaaatggtgcacttcattgctccgccgtttataccaaaatcagcccactacgacagcttatatagtcacccacatatcgtttaaataaaaacaggaaaccgctgccaatttgccaaatgtcgagccatcagactgtctgcaaatgtttctttatccgctcatttaattccagtcattacaatggacatttgttacatttaattaagcaatccaatttgggtttaaattcatttatccaaaatgatgagcacgcatggttttataaatgttatgaccatggtaaattaatcacattcgaaaagcaatggtcaacattgtttgttattggacgttcctaattctggtggccgtttcaaaggctcaggataatgaggaaactactgcagttgccatatcttcaggtgacttgactgaggataagtgtaacacatcggtgagcttactttaaaaccgaacagcaaacgtattaagtctaaaaattcaatttagagggctggctgctgttctgaactttatataggagaagaggaggacctggtcaagtgcttcgttatacactcacccaagttgccagtggatggggacgctgacatcggcaagacactgaggtttctatcggtaggtaattaaagctttatatatctattataacgaaaatatttgtatcttcagtgctttgtggagtgcctgtacaagcaaaagaagtacattggtaagagcgacaccatcaacatgaagatggtcaagctggatgcagaaaagacatttgtggatcggcccaaggagaaggattatcacattgccatgttcgagttctgtcgcaaggatgctgttggggtctacaaccttttaaaggccagtcctggggctaaggtgctcctgaaaggagcctgtcgcccctatctattgatggtattcatgtgcatcagtgactatcatcagaagcacgagtgtccctacttccggtgggagggcactgccaaggcaggaactaaggatatgtgcgaaaatgccaaa

SEQ ID NO: 31571 - DNA, 600 bp, DROSOPHILA
atgaagtgcaccattttattgagttttttcagcctgatttggtttgctggtggaattaaaattgattgcgagaatacggaggccattaacgaggaccacatccactattgctgcaagcatcccgatggacacaatgatctaatcgaaggatgtgccagggagaccaattttacgctgcccaatcaaaacgaggaggcactggtggacatcacggcggaccgagccatccgaggcacttgttttggcaaatgcgtctttagcaaactgaacctgatgaaggacaacaacctggacatggatgccgtgagaagtttgttcactgaaaggtttcccgacgatccggaatatgccaaggaaatgatcaacgcctttgatcattgtcacggcaaaagcgaagagaatacctccatgttcctgtcgaagcccctcttcaagcaaatgtccaagcaattctgcgatccgaagtctagtgtcgtcctggcctgtgtcatccgccagttcttccacaactgcccggcggatcgctggtcgaagaccaaggagtgcgaggataccctggccttcagcaagaagtgccaggactcgctggctactttgtga

SEQ ID NO: 31572 - protein, 199 aa, DROSOPHILA
MKCTILLSFFSLIWFAGGIKIDCENTEAINEDHIHYCCKHPDGHNDLIEGCARETNFTLPNQNEEALVDITADRAIRGTCFGKCVFSKLNLMKDNNLDMDAVRSLFTERFPDDPEYAKEMINAFDHCHGKSEENTSMFLSKPLFKQMSKQFCDPKSSVVLACVIRQFFHNCPADRWSKTKECEDTLAFSKKCQDSLATL

SEQ ID NO: 31573 - DNA, 2246 bp, DROSOPHILA
cagccaggtcacaattagcgctgtttactaaggggtcttcagccttgctcatcacatatgtacacatacacgtatgtatgtacgtttttggcccaaccgaaaaagtaaaaaaaaaaaaataaaaccccgaattttatactcgaaaccgggcaagatcgcgcacaaaagctttagcttgttttgtgtattgtaactgctaatgggaactcgatgcgttggccttggcattcaaccggccaaatatggtcggttcaggtcgtttcagtgcggtgcgtgtgagaaaatccgtcgaagcgagtgacagttcaaaagtccctggacaaatgaaatgcattgttggcagtacacataagtccgtgtgagtactcttggcatcattgttaatgtaattgtcgttgctgccattggagttcaagatctgcgtgggcgattgagccgagttttatgagcccggccttttagggaaactcgcggaagagctcgaagccccagtttatgatggcgatttatacttttacgtgttctgtcaccagtcaatgcgctcgttatgcgattatatttagcttaaatgggatcagtatatgaacttcaaaaaccttgcttttaaagtgcttcttaattgcgatttataataatcgaaaattttatttgtatagagttcaattaaaaagtgttcattatttcacatattcatattttgttttctatccctaattacacttcattaagcagtgccactttttctatgtgcaactgccttcgcaaatcatttcctggctaaaattccagatctaaacgttttgtatttcactcatcgattctcaggccctgcttcatcaatagttctacgaattccacattcaacggagctagcccattgattgggtaattgttttttgcgcttgatcgatcagatattcagtcggcggcaggcattactcagtcggttagaaagtgttgcataatcggaatgtaaatatatctacaatatatctatggcttaactcacctgcattcccgtttcacgcaaatgctcgttgacccagttgcggaatgtgttcgcctggatctctacccagaggtcctcgttgccccgtatgttcatacccttggcggcggtgccctcgggactccgggccaccagaccggcatgggtgatcttctgcgtttcggtggttccatcggagttgtgcttgagcagccccgcatgcgtcaccttggcgccttttatgtccttgacgtccatcttcactgcacgtcactgcacttcacctgcgactcgcacatatgtatgtacagatgtaactcgcgttcgaaacactgatcgggagaaatggatagatcgcgatgagatacttctgatcgctgtaagttgtagctatgctattcagtttcggtttcagtatcagttttagtttcgtttgcacgcgctcgcggcccgaagcgaactggaactgcgcttagctggtcgatctgggcggctctgctctcttggcctggccaaaacaaacgatgacgtcatggccaaagctcaaagctccagagagcagcaggagaatttataaaaaaaaatgcggggggtttcgccagcgaatgtgtgtgtgcgaatatctctgaatctggctataaagcaaaactggtttcgtcgcttccaagccaaaacgaagcgagcgaaaaggaaaattgaatacaaaaataacaaaaaggcgaaaataatacaaaaaaaaagagtctgtaaaataacagaaatcacttagtttggaatttcgccgcggcaacagcaggcaaaaagcgagcagatctggtgggcagtactgtggatgccagtggttgtcgtgaatgtggctgtttgggcaagtctttcacaaacgttagaaggccaacatgtgtgtaaacgtgggagccaccccagaagataatggacgtaatcacagcaatgaaatctgccacgatcaattgtcaattgttcgcccgttttcacttgtcgcacttttacccaaacaatttgtgcaaaccgaaagttggccgtctgaatggcctttttggcatttttccacacggcgttgcgaagacaacgaggcgtcaaatgaccgtctaaccaacttaattataggaaatccggttgcgtttctaaacaagtcaattgccacagatcgcatatatcatagcacgtccagttctgagcgaggctggtatgcagattttgaatacgaatacgaatactatttattgacaaacacttttcg

SEQ ID NO: 31574 - DNA, 246 bp, DROSOPHILA
atggacgtcaaggacataaaaggcgccaaggtgacgcatgcggggctgctcaagcacaactccgatggaaccaccgaaacgcagaagatcacccatgccggtctggtggcccggagtcccgagggcaccgccgccaagggtatgaacatacggggcaacgaggacctctgggtagagatccaggcgaacacattccgcaactgggtcaacgagcatttgcgtgaaacgggaatgcaggtgagttaa

SEQ ID NO: 31575 - protein, 81 aa, DROSOPHILA
MDVKDIKGAKVTHAGLLKHNSDGTTETQKITHAGLVARSPEGTAAKGMNIRGNEDLWVEIQANTFRNWVNEHLRETGMQVS

SEQ ID NO: 31576 - DNA, 2465 bp, DROSOPHILA
aacagtatcccccactaagctctgactagcgaaatttgcagccaggcaccgtgacaccgagtgaaaaagtgcctgccatggttaaagttgggtttaaacttttgactggccgtggcgcgtggtttttgcccccgggagaaatgtatcattcgtgtcattaatcattcgtcatgtgggacggcgacaacatttcatttgcttatcatccggctcaaagtctttgggggaatgaacgcaacaagagcaggcctcaaagttgaatgaatcaaatgggctgtcggaaaacttatttctaagcctagaaatccctgacaagtcagtggcttcgcgtcccctgcgattgtagggatttgaggaggcggaggtagaagcattagacagaaggtgtggttaaataaatgttttcttatttgctgaaattacagcagtcttaattaggattttctcaaaaatatttcacagtatggttgaaatttaaaagtccaactatgatagcatttattcaatataattacttgaaactggacagggattacaaaaaatcctttcagctagtacaagagcatcctttcaatttatatgcccgcttgattttttatggccagcactccacagcacaactactgcccatcatcatcatcatcgtcatctaacatcattcctgtcccatggacggccactcaaaggcaagcgctgaattgacaaattgatggatggttctccaaacgttgcatgcttcagcatctctgctttccttattttttccctttattgccccttgtacgagtatatgatgcattattattccggaaaagtttgtgaccgcaacaacaacaattgcttgcctaagtgttttattagccatcgagaacagagtttgagttcggttgagttgagttgattgtcagttttcatacacatcggtttttccccatttctcctttttttttttgtattcctgattttcctgaactactttagggttttatttgctagtgccatgccttctttttccggcaatgagctgacgaatgagcatatcgacgaactgagggatgcctttgaaaagtatgatctggactcgaatggcacattatcagccaacgaggtgcgactggctctaatatcagtgggttacgaaatcactgaggcagagttgtacgatctcatccattcggtggctgtgagagacgaggagaggctggacttgaaaaaatttatacgcatgatggcgccccgaatggccaatgtggatagtgataaaagtctatgccggacctttaacatgattgaccgcgatcgcgacggctacgtcaccgtccaggatgttcgtgccattatggtcgtcctgggcgaagtcgtaaccgatgacgatattaaggatatctgccaagcagtcgatatggatggcgatggtcgcataagcttgcgcgatttcgtaggctttatgcacagccccatttgagctgagacagcaagcaaaattgaacatttttcatacagagtaagcaaacaaacaaaaatgtatctcacaaatctattgtagattataataaaaattattgttttcataattattaatatatttaatttttgtgtaaaaagccagtcagtgtttatgaattttcgtttaattttataatggttttttttttatttaaaatgttctttattttgtttttagtagggcttaatgtttgaagtacttaaaaattgaaattcaatacatagacgtacatatatttctgcctgctggcagaaaaaacgaaggcggctgaatggaaaacggaaggaaaaaattgagagcataaagccagaaattaattcaacagcacgtttcgtccattaagccgccagagctttgcttgctgactttgccatcctttcgccaccgcccctgccactccccctgcaggacatggacatggacacatgtgcaatggccgcacacacaaacacacatgcaaagtgttgtgtaaacaagtcagctgccagttggctgggcgctgcaggcggggctcacagtaggggaagagctagaagatgaagaaggagcttatccagaaggaacggccagcggaaatcaaggtgccacgcccccttttagacacgcccaccagcgtccaattgtgctttgtttgctacccgctggcaggagctgaccaaaccaccttgacccattgtcgtcgtgagtggctttaatatttttcagctgacgctgctcttaatgaaagcaagaaatgatgcccagcgctgtcgcatcttattctcgtttccgcttcctctaatgcgttttccgctagctctttgcactgaaaacaaattagcaattgtactcaatttgaaaaaggtatgcaagaaaattgttcaatgtgtgtcgaagcgtacttaattgcttgcttttagatatctgtagtatccttctggaattacacacaaatccattctatcacacttcttttttt

SEQ ID NO: 31577 - DNA, 465 bp, DROSOPHILA
atgccttctttttccggcaatgagctgacgaatgagcatatcgacgaactgagggatgcctttgaaaagtatgatctggactcgaatggcacattatcagccaacgaggtgcgactggctctaatatcagtgggttacgaaatcactgaggcagagttgtacgatctcatccattcggtggctgtgagagacgaggagaggctggacttgaaaaaatttatacgcatgatggcgccccgaatggccaatgtggatagtgataaaagtctatgccggacctttaacatgattgaccgcgatcgcgacggctacgtcaccgtccaggatgttcgtgccattatggtcgtcctgggcgaagtcgtaaccgatgacgatattaaggatatctgccaagcagtcgatatggatggcgatggtcgcataagcttgcgcgatttcgtaggctttatgcacagccccatttga

SEQ ID NO: 31578 - protein, 154 aa, DROSOPHILA
MPSFSGNELTNEHIDELRDAFEKYDLDSNGTLSANEVRLALISVGYEITEAELYDLIHSVAVRDEERLDLKKFIRMMAPRMANVDSDKSLCRTFNMIDRDRDGYVTVQDVRAIMVVLGEVVTDDDIKDICQAVDMDGDGRISLRDFVGFMHSPI

SEQ ID NO: 31579 - DNA, 2965 bp, DROSOPHILA
ataacaaaaacaggcactgggcgggcaagcgactgagtgagatagagcggagaaaaatgaaaaatcttcagcttaatgtgcggcactttgtcatggcctgccagccggaaacggaaacttgcgacaaacttgcgcaaaagttcaacaaaacgcttgaacggcctcactcacacagaaaaagggaagggaagtggatgtgaagggaagtggatggggaagacgggcttctgggtaaccatgagccatgaattgtcaataaatttgcctgccgcaaatcatcacaagttggttcggcttcggttgccctctgtcccacggccagcgaaacccaaaaaataagtggcattcgaagaaaaagcggcatttcgggcaaaaactaaacctcaattatttggtgcagctggcttggcaaatgaaaatatttgagaacacgaaatactttgacaaaagttggcgagcaaactttacttaaacatacttgagccctacacaaacacgcggccgagaagcgaaaagagaaaagtggaccggagcacggctcaaagtggaaatggaaacttaaaggacacaaaaaggaagtcaagccataaaaacattaccagaatccaactttaaacgcctccaggcgaggacgaagcaaaaacagcgcactcagctgccagatgaaccgcagcgaggcttacttaatatgcacatggaacaaattcgttaaaatgtaaaagatcagccacagagtgactgttttcgaaattccacttgggctccacctagtgtcggttattgtaattgctcataagtttggattaacttggatttatttatatttgtagcaataaattgcgtaactcagaattaatacataaacataataccatattcgtatcaatcaacaaatttagcttaagttcaaattaactcagttatcgcacatccctttattttttagttccccttgtatatggcaaagaaatgccaatatgtagccattttaataacagtgatggtaatccttagtggagcccatcggatgaagcgtttatcctcgcccaaatttcatggagacgaaaccctcgagttggccaagtacgtggtgtccatcagatcgagaaccccaaacaagtattttggtgacaatcactattgcggaggagggctactgtccaatcaatgggtgattactgccgcccattgtgtcatggggtaggtagttacctcagtaatggatcactggatcttaatatctatatcctcgatcctttagacaatccaagatcatgtacaaggctcgatggctgctggtggtggccggatccccgcataggctgcgctatacccccggaaaatcggtctgttcgccagtgtccagtctgtacgtcccaaagaacttcaccatgcacaacaccttcaacatggccctaatgaagcttcaggagaaaatgccctcgaatgaccctcgaatcggattccttcatctgccaaaagaggcgccgaaaattggaatcagacacacagtcctcggctggggaaggatgtattttgtacggctactcaaaattgcatgactgacaatgcttactttaatatatgctatctatgcttctatgattccagggcggacctttggcggtgcacatatatcaagtggacgtggttctcatggacaacgcggtgtgtaagacgtacttccgacactacggggatggaatgatgtgtgctgggaacaataattggacaatagacgcagaaccgtgcagcggcgacatcggatccccattactatccggaaaagtggttgtcggcatagttgcctatccgattggctgcggttgcaccaatattccgtccgtctatactgatgtatttagcggcttaaggtggatcaggcatacggcatatgactgggccagcatcactaagacaaatccaaccctcatgttcatactgttgtatgtacttcataggtgattaaatcgcatttgaaaattttagaaaatacactaatgatatatacaatataaactccagactagggtagcaaatgcattgaacttatggcataggcaacctggtaactcgatgggcacagctcttaatgggcgcaaagcgcggctggaaccgcgtccatgtgcatgtggctttaattgacattgcccacacactctgccagtagaagggcaataaagcactcaaaatctgttttccagagctggaaaattcgatgctgggctggcagtaagtaagtggaaacggttgatgcgagcgagaattgagtttgaacgggaggggagtctgctctccatcagtttcttcattctcgagcatggcattcataatggacccaaatggcaatggatacacgaattcagcttatgtttcttagcaggtaacaaaggccaggcacctgctcctcatttgcgtaatgaattttgtgcatcttgctctatttcgccttcttttttttgttttttccgaagagctccgtaggcaaatgcgtaatgacaacattaatgcaaacgacttcatttaattaaacgccctttttggcctgacagcaaaggaaactgcgaaactgggaaactgagaaagtgtgtaaggcaccatcatcattgcgactcattgggactcattgccagcatttgcccatcctcattcgcatccccctaccgaaatggttaaggatctcgtcctggcactcgtactcaacgtttggtatgcatgaatgcgtattaaggtgtgatagggggcgtgccactgcctatgtagtagtgcgcacgtgcgtgtaagcgatgcgatgcgaatctatatgagtgtgcgccagtgcgggtgtttgtgtgtgtgtgtgcgtaggaatgtatatgtgggcgtggccaggtgtaacatctggcccaaatggagcaaatggagcaaatggagcagatgtgacaagctcgccggcgaagaagccaattcaattaacggtcgccgg

SEQ ID NO: 31580 - DNA, 831 bp, DROSOPHILA
atggtaatccttagtggagcccatcggatgaagcgtttatcctcgcccaaatttcatggagacgaaaccctcgagttggccaagtacgtggtgtccatcagatcgagaaccccaaacaagtattttggtgacaatcactattgcggaggagggctactgtccaatcaatgggtgattactgccgcccattgtgtcatgggacaatccaagatcatgtacaaggctcgatggctgctggtggtggccggatccccgcataggctgcgctatacccccggaaaatcggtctgttcgccagtgtccagtctgtacgtcccaaagaacttcaccatgcacaacaccttcaacatggccctaatgaagcttcaggagaaaatgccctcgaatgaccctcgaatcggattccttcatctgccaaaagaggcgccgaaaattggaatcagacacacagtcctcggctggggaaggatgtattttggcggacctttggcggtgcacatatatcaagtggacgtggttctcatggacaacgcggtgtgtaagacgtacttccgacactacggggatggaatgatgtgtgctgggaacaataattggacaatagacgcagaaccgtgcagcggcgacatcggatccccattactatccggaaaagtggttgtcggcatagttgcctatccgattggctgcggttgcaccaatattccgtccgtctatactgatgtatttagcggcttaaggtggatcaggcatacggcatatgactgggccagcatcactaagacaaatccaaccctcatgttcatactgttgtatgtacttcataggtga

SEQ ID NO: 31581 - protein, 276 aa, DROSOPHILA
MVILSGAHRMKRLSSPKFHGDETLELAKYVVSIRSRTPNKYFGDNHYCGGGLLSNQWVITAAHCVMGQSKIMYKARWLLVVAGSPHRLRYTPGKSVCSPVSSLYVPKNFTMHNTFNMALMKLQEKMPSNDPRIGFLHLPKEAPKIGIRHTVLGWGRMYFGGPLAVHIYQVDVVLMDNAVCKTYFRHYGDGMMCAGNNNWTIDAEPCSGDIGSPLLSGKVVVGIVAYPIGCGCTNIPSVYTDVFSGLRWIRHTAYDWASITKTNPTLMFILLYVLHR

SEQ ID NO: 31582 - DNA, 8020 bp, DROSOPHILA
tgccacattaagtggcaaccactaatgcgccatttccgtggcactttcgagcagtttttattgccactcataccgtgtgtgtgtgtgtgtgtgtgtgcgttggtgtgtgggcctgggaaatggaatggaaatttaatgattcaccgcggccaactaattcacatgtcactgctgcaaaggtagtagaacaattcctcaaggtgtccgaccaaaaatagtcggagtagaagaccttgacacatcaattatgtgggtgaaaaggccaacaagtatatggtaattttccggctaacaattttccaagcaagacaaagcattttcatggaaaatcctgaaagtattctctattaaattgctttgaattcaaggagggactaaggtatttccacgactacaagaatttttcgcgagtaaaccaaaaagtatgctatagcaaatgcagcgaattttctcacgaaaatctagtcagagataatgaaaagacctttgctcaaaggttactaaataaaagaaaatagaattggaaaattcctaaagaaaaactaagctgtagtaacgaaattgtttggaattcttccccaaggaatgctaatcaagtttgaatcagacaaatggaaattctattttcacatatttgcttagctggaactctaatgaaaatgttgacttttcgctttatataagccaaacaaacacacacacacacacactttgggttatttattcatgtcagaagttggaagtgcgcgaacaggacgcaattattcctccttgcgaccctttgcttttgaccacagcaacggagacccgaattcaacacctttcgacctggccaagaattagtttgccaacgtggctcaagctagccagacgcaaaaagtacaaacaggttagaaagcaatcagaaagaaagtagtcaacggagtgtaacgtcactacaattgtcacactcacaatttcataccttttgactagtcaaacaatcgagtctaaagccaggatgtctaattccattgcagtgatgcccatgaatggacaggcgggtggacaaaatggacgcaagcgtcgggacaacgaaggtgcgtatttgaatggacttcgcatttcgatttccgcatccaggtgttcgatttccacgattgctccactaaatcattcagcgggtgggcgatctaatatgctgatacgacgacctgcggggcgttacccacttttgcactgcgaaaaagtttggcgccgaccttggggcatttcaagttggcaaaaacttttcgccggcggaaattgtctcaagtttccactaatgccactttaagcgagccgatgtcggagtcacaaactcgaacactcattgcatttattttcgttttaatttagttttcagttctttttcggcttctttggctgctttttcggcaaattgcatgcaagcacgaacgagggcgaaaatgaattggaaatcgcaatcgggtcgcgggggtggggcggcgaaaattaatttccacgttttcaatttccatttctcggctaatagatttctcggtgaagttatccaccatcaggatctggattcacgagaaggacattggcaagttgacgcgtattttatggggtggccagggcaacagactatgccaacaggccagcaacaatggtcgagtgaagcgcttcctcgcagccgttccccatgtcatggtgaggaagtcctgcgcgtatcctttggctcttctttaacttccgaccatccgcacagaatgccatcaaagatctgcaccaggcggtcatcgacaacaatctggagaccgtgcaggcgcagctggagccaccggtgcccagtgcactggtcacctgcaaggacggcaatggcttgaacatcatacacaaggccgccggactgggccacaccaagctgctggaatacctggtgggcatttggcccgagggcgcccatgagacggacattaccggaaagacgccgctccactgggccgccagtgccaagaacaacatgcgatgctacacactgctcacccaagcgggttgcgacgaggaggccgtcgattatgtgagtgggtgggaatgttcccttcatttggtagtaggtatcgtaggtatcctggtaaatctgaagtaatgtaagagatcctttgatcctttgccgtaatttggttttgacacatacaacatccactgaatatagcttaagagtgggtgcagatgttgctttgtggtcggtaggcaattaaaatgattcattggggcaatttcagaaaatgaagaccccctcatactatcgccacaagccgcacgaaatcgagcgcgccttcctggtttatgtgccggatgcacctcgcgtctcccccgacagcgccaccgattgggacgccttgtgcgatgagagtggagtggacaacggagcggggggcgatgccagctccaaggtgagtgggtgtcacgggtaactcattcccaactgctccttctcctttcgccactagaaactggacatcaaggtgccgccttctgtgaatggccgaaaatcgctggacgacagccttgagaacacctcggagctagacaccaacgacgggtaagtggatgaatggctgactgggtggctaggtgcttggttggtgggtcttaggcccctaagattaagcttacgcttgcctgccttttgctgacaaaatgctgcgctgcccatttgatttgtgtttgtggtgtgtgttttgtatggggcatggctttgagagagaattttttgcattttgaaaccgcagtacgagtgccaatgaggatgacgatctgtccaaggtggatgcggagccggaagcggaagtcgcctcgccattgcagcgccgaccggaaacgccggccaccttcaacacgatcaatggcgatggcgatggcgaagacagcgagccagaggtaagtcatcccgcctctttcgttataattttccatattttttcgtatcgctttcgatggttagcggcttgcttgcacactttgagaatggcttttggtgtttgcaacttaattaattagctttttgggggctggagacactgtgaaagtaagccattgtcggctcccgccatttcccttctccactctctcgccgtcggcacttgcgctttttgtttagagcccagataaaccatttcctgctgtatatataggctgagatcgaaggaccgtagagcgaaactgttgaatcacttggaaagcaatcagtcgacaattgtttacttttacagaatattggaagagctgtaagcgcgaatggaggcggagaggcagaggaaaacggagttgggcaggacgaaggaggcggaggagatgcggtaatcgtggagaatggcgaagttcgcgaggaggctccggaggaggatcagccaacagagcccgaggacgtgggaaaacccgaggagtctgctactgagagtgagcttgaaggaaacaaaaagactgaagtggagccagaggagccagaggagccagtggagcatgtggagcatgtggagcaggcggtggaacaggcggagcaggtggaacaggcggagcaggtggaacaggcggagcaggtggaacaggcggagcaggtggagcatgagaagcaggagacagtggatgagccggagagcaacgctaaggatgaagcggatccggaagttgccgccatgtccgtcgaagaaagggaaccagagtcagagaacgataacgatgacgatgatgaggtacagatgggcgtgctctaagtgtccgcaaacgttttgtagtttattcacgtttgttgtgtgtgccgtttgctcaacccatttacccctcttcaatgtgaacctctaaaatgaaacgcaaaaaactcaaaaaaaaaaaaactgaatttgaaaagtaatataccaatctgctgcagccaggcactcaaattccattcattccaatttgttttaccactgcaagagccacagcaacagcaacaacttcagccgcaacccaatcagcagcaaaatgcgaaactttagcaatcaacttcaacataagcccgcttagataatgaaataaccgtaaccgaagcaaaatttcttgatatatctctatacatatacatatatatatattttgtaaagcaagtgttatgttctcttctttccaataacaatatatttagccgtaggcattgtagtaacagtaaccaattaaaaatggaaagcaaaacctgcaacttgtgtcttttgtttatcgtttttctattgcacccgagacctgcccaacaatccgtgtgtttgtttccatttccatttccgtttccgcatccgtatccgttgtttccctttcagtttcacttcagtgtgttattgccttagatcgaatcaatgccagtgtctgcccccaatttgtgcttatcgattgcctgaaatcagcagctgtttacccacagatagactttataataatgcactcattccgaccgccgtacatttgaaccgaaatagtacatatgtgcagggcaagtcgctcgttttcactttcgaacggccgacatttcgactgggagacggataatcggacggagactctgaggttgagtcgggtgcagagtcggttctcaactgtcagaggcatccagttgttggtggatccgaatgggaactgaacatgcaaacgtcaaaacagttgcaggcattagatatgtgatatttgatatatggcaaatataccttatatatatatatataatcgttgcattccctcgagttagtggtgggtggttcttatggcagctataatgactattcccagctgcatttcaataaagatggggatacgtggcgtatgcgtgatattgcgtatacgctacgtggactccgaaacaagttaatttggattgctcggtctgattgaagggcttaaattgcactctttattacgttgcaatattcctaactatagttatatagtcaatgggctcagaactggcattgtcacctgtagcagcacttagtccttgtaaaaattaacgtatcctgttcaatgttttttatgtctcttcgcactttgtagccatgtccaagtcactgtcacaaccatataaacatacaatcttaagtggtgaaataactttaaacaggatgtaatagcttcggacagcaaaggagccaatccccaggagggtcagcaaccaggagccggagcacagccaccggaggacgacggcaatgagtcactcacatcagcaatggccattgagggctttgtgcacggtgcacccgaggattatacagttcagtctcaaactgcagttgatgaagtatacaatgctatccctatctttctatctgtctatctatcgccctttgttgctggctcaccaggcttcttttgggttcgcacttaagtcactcataaagcaaaccatcgagttctttatatacccagaatcattccagtccatcacccttagcgctttcaaagatgcacttttcgtcttggcgagacgtgttcgtgttcatcctctcattggacacctgcttactgttttccgtagaatgagcgcattaagcgcattgtggagtccggagacttggagcagctggccgagattgtgctgaatggcgagggcggcagcttggtgggcctgaagtcgccagaaccggaaatacaggcctttctcaacaacgtgcccagctatatggtaagcgagccgaaaggttcctttcgaaaaggaaggaaggcgcactaattacgccttgcatcatgttttcactctggcaggagaaaatacatcgcgtgcacgacgcggcacgtgacggaggtttgctggcactgcagcaggctctggatcgccggaagtttgccattgcaaagaacgacatatcgcccaacggctccacacccttgcacgtggccgtcctctttggccacacgggtaagtccgcccggattctatttatatgattggttgacccctattcccgacctagacatcgttcggtacttggcgtcccgctttccggagaccatgacaattacggataatgacggacgcacgccgcttcattacgcagccacaattaaggacaacggccatttctacaacatgctcctgcagttgggcgccaatcccaaatcactggacaaggtaagttaaagtgatggggggtgcttgagtaagagtatgtgaaacatatgatggtgctgcaggaattactttaatcgcgtttataaaggtgcctaagactatagaacaacgcatacttttatacctataatcactgggaatttgtgttaaacatagattttatctgagactcctcctattattttggtagtattctaaagttagctcaaattcttatatatatattttccatgagaatgctaattacccaattaattcaatagtttccccaaattacgctaataataaagaacgtaaaaatataaaacaataccttaagtataagaaaaacgacaccgtttagttttgagtttattgggaacaagtgcagctgtagtcggctaatagcattagaaatgtcaaatgaaaattgttttaaaatttctgcccactgccccaaccgaaatcgaaagtgggccaaggctcaaccgattggcccacttgactttcaaatgtctgcagcagtgggaatcaatatgccatacataagggattaggacgatgtaaataatgaacggagtttgatttaaaattcaatacccaaacacacgcagctgggccactcggccgagttttacctggacaaggagaaggcgaaaaacattctcaactacaccgagctgctcaatattttcggggcggaggaactggagaaccagttgctcaatgaccagggtaaggacaccgggggccgtgagccaccggcagctgttccagcgctccaacttgaccgttcaccaggcaccaccaaccacatcaagtccagcacccacccacccattacacccgctccagatagcgctatgccatgccgctttgctttgcctctgtggctttagtggcgttttgttttcacactcgctttcgctgcccacacacgaacacacacatgcacaccgacggtaaaccgaaataattaaatacatttgtttgccaagtcaaacagtcggagtgggagtgagagtgagtgtggatgggggaaatcgggggctataaattgcggctcaggggctaaccgaactcggcgcgagctttggccaagtcagtcatcgattttcggtcgcaccgtgcacacactgcgtatacgtgttggatacccgtgttcggttgctcgtttcaaatggagggaaatcgcaatgaatttttcaacgaaatcattggcaatattgatgaaatattcggtatgtaggcaaaacgcaccatctcgcccagcaccagcgccttttttcttgatcacccaccccggcaatcctttcatccgtatccgtcatggtctcggtgttcgtatatgcatctgtgtctctgtctacgctttggtgtctaactgtgtatgtgtgtgttgattgataaccaaccgtccaacccaaaacaaataaattatcatctatgctgctccggataaccatgagcagttcccgacgatctgcacagtgcccgacgggagctgcaggatggcgagatctcaaggaccttggagcgctgctttagcgtcattacggaatcgggtaaattgctgagcggcactacggcatcggctctatcgcatcgaaagccactgagtgcatcctcgctgcagctttcggtgaccagctatctgagtagattcctcaaacgtggcgtctacgacaagatcaagcgccgacagacccgactcgatcacaatctcttcgatgtcctgtggccagcgatgcggaaaacatcgaaggcgcgccacttggaggaggacatcaactgcgggattatagctccagatttcgatgtgtttgtggtgttccaagagttcttggtgccgttgcttaaggacatgcattgcctgagtatcgatgctgatttcaaacc

SEQ ID NO: 31583 - DNA, 2367 bp, DROSOPHILA
atgtctaattccattgcagtgatgcccatgaatggacaggcgggtggacaaaatggacgcaagcgtcgggacaacgaagatttctcggtgaagttatccaccatcaggatctggattcacgagaaggacattggcaagttgacgcgtattttatggggtggccagggcaacagactatgccaacaggccagcaacaatggtcgagtgaagcgcttcctcgcagccgttccccatgtcatgaatgccatcaaagatctgcaccaggcggtcatcgacaacaatctggagaccgtgcaggcgcagctggagccaccggtgcccagtgcactggtcacctgcaaggacggcaatggcttgaacatcatacacaaggccgccggactgggccacaccaagctgctggaatacctggtgggcatttggcccgagggcgcccatgagacggacattaccggaaagacgccgctccactgggccgccagtgccaagaacaacatgcgatgctacacactgctcacccaagcgggttgcgacgaggaggccgtcgattataaaatgaagaccccctcatactatcgccacaagccgcacgaaatcgagcgcgccttcctggtttatgtgccggatgcacctcgcgtctcccccgacagcgccaccgattgggacgccttgtgcgatgagagtggagtggacaacggagcggggggcgatgccagctccaagaaactggacatcaaggtgccgccttctgtgaatggccgaaaatcgctggacgacagccttgagaacacctcggagctagacaccaacgacggtacgagtgccaatgaggatgacgatctgtccaaggtggatgcggagccggaagcggaagtcgcctcgccattgcagcgccgaccggaaacgccggccaccttcaacacgatcaatggcgatggcgatggcgaagacagcgagccagagaatattggaagagctgtaagcgcgaatggaggcggagaggcagaggaaaacggagttgggcaggacgaaggaggcggaggagatgcggtaatcgtggagaatggcgaagttcgcgaggaggctccggaggaggatcagccaacagagcccgaggacgtgggaaaacccgaggagtctgctactgagagtgagcttgaaggaaacaaaaagactgaagtggagccagaggagccagaggagccagtggagcatgtggagcatgtggagcaggcggtggaacaggcggagcaggtggaacaggcggagcaggtggaacaggcggagcaggtggaacaggcggagcaggtggagcatgagaagcaggagacagtggatgagccggagagcaacgctaaggatgaagcggatccggaagttgccgccatgtccgtcgaagaaagggaaccagagtcagagaacgataacgatgacgatgatgaggatgtaatagcttcggacagcaaaggagccaatccccaggagggtcagcaaccaggagccggagcacagccaccggaggacgacggcaatgagtcactcacatcagcaatggccattgagggctttgtgcacggtgcacccgaggattatacagttcagtctcaaactgcagttgatgaaaatgagcgcattaagcgcattgtggagtccggagacttggagcagctggccgagattgtgctgaatggcgagggcggcagcttggtgggcctgaagtcgccagaaccggaaatacaggcctttctcaacaacgtgcccagctatatggagaaaatacatcgcgtgcacgacgcggcacgtgacggaggtttgctggcactgcagcaggctctggatcgccggaagtttgccattgcaaagaacgacatatcgcccaacggctccacacccttgcacgtggccgtcctctttggccacacggacatcgttcggtacttggcgtcccgctttccggagaccatgacaattacggataatgacggacgcacgccgcttcattacgcagccacaattaaggacaacggccatttctacaacatgctcctgcagttgggcgccaatcccaaatcactggacaagctgggccactcggccgagttttacctggacaaggagaaggcgaaaaacattctcaactacaccgagctgctcaatattttcggggcggaggaactggagaaccagttgctcaatgaccagggtaaggacaccgggggccgtgagccaccggcagctgttccagcgctccaacttgaccgttcaccaggcaccaccaaccacatcaagtccagcacccacccacccattacacccgctccagatagcgctatgccatgccgctttgctttgcctctgtggctttag

SEQ ID NO: 31584 - protein, 788 aa, DROSOPHILA
MSNSIAVMPMNGQAGGQNGRKRRDNEDFSVKLSTIRIWIHEKDIGKLTRILWGGQGNRLCQQASNNGRVKRFLAAVPHVMNAIKDLHQAVIDNNLETVQAQLEPPVPSALVTCKDGNGLNIIHKAAGLGHTKLLEYLVGIWPEGAHETDITGKTPLHWAASAKNNMRCYTLLTQAGCDEEAVDYKMKTPSYYRHKPHEIERAFLVYVPDAPRVSPDSATDWDALCDESGVDNGAGGDASSKKLDIKVPPSVNGRKSLDDSLENTSELDTNDGTSANEDDDLSKVDAEPEAEVASPLQRRPETPATFNTINGDGDGEDSEPENIGRAVSANGGGEAEENGVGQDEGGGGDAVIVENGEVREEAPEEDQPTEPEDVGKPEESATESELEGNKKTEVEPEEPEEPVEHVEHVEQAVEQAEQVEQAEQVEQAEQVEQAEQVEHEKQETVDEPESNAKDEADPEVAAMSVEEREPESENDNDDDDEDVIASDSKGANPQEGQQPGAGAQPPEDDGNESLTSAMAIEGFVHGAPEDYTVQSQTAVDENERIKRIVESGDLEQLAEIVLNGEGGSLVGLKSPEPEIQAFLNNVPSYMEKIHRVHDAARDGGLLALQQALDRRKFAIAKNDISPNGSTPLHVAVLFGHTDIVRYLASRFPETMTITDNDGRTPLHYAATIKDNGHFYNMLLQLGANPKSLDKLGHSAEFYLDKEKAKNILNYTELLNIFGAEELENQLLNDQGKDTGGREPPAAVPALQLDRSPGTTNHIKSSTHPPITPAPDSAMPCRFALPLWL

SEQ ID NO: 31585 - DNA, 5656 bp, DROSOPHILA
ttatctgagactcctcctattattttggtagtattctaaagttagctcaaattcttatatatatattttccatgagaatgctaattacccaattaattcaatagtttccccaaattacgctaataataaagaacgtaaaaatataaaacaataccttaagtataagaaaaacgacaccgtttagttttgagtttattgggaacaagtgcagctgtagtcggctaatagcattagaaatgtcaaatgaaaattgttttaaaatttctgcccactgccccaaccgaaatcgaaagtgggccaaggctcaaccgattggcccacttgactttcaaatgtctgcagcagtgggaatcaatatgccatacataagggattaggacgatgtaaataatgaacggagtttgatttaaaattcaatacccaaacacacgcagctgggccactcggccgagttttacctggacaaggagaaggcgaaaaacattctcaactacaccgagctgctcaatattttcggggcggaggaactggagaaccagttgctcaatgaccagggtaaggacaccgggggccgtgagccaccggcagctgttccagcgctccaacttgaccgttcaccaggcaccaccaaccacatcaagtccagcacccacccacccattacacccgctccagatagcgctatgccatgccgctttgctttgcctctgtggctttagtggcgttttgttttcacactcgctttcgctgcccacacacgaacacacacatgcacaccgacggtaaaccgaaataattaaatacatttgtttgccaagtcaaacagtcggagtgggagtgagagtgagtgtggatgggggaaatcgggggctataaattgcggctcaggggctaaccgaactcggcgcgagctttggccaagtcagtcatcgattttcggtcgcaccgtgcacacactgcgtatacgtgttggatacccgtgttcggttgctcgtttcaaatggagggaaatcgcaatgaatttttcaacgaaatcattggcaatattgatgaaatattcggtatgtaggcaaaacgcaccatctcgcccagcaccagcgccttttttcttgatcacccaccccggcaatcctttcatccgtatccgtcatggtctcggtgttcgtatatgcatctgtgtctctgtctacgctttggtgtctaactgtgtatgtgtgtgttgattgataaccaaccgtccaacccaaaacaaataaattatcatctatgctgctccggataaccatgagcagttcccgacgatctgcacagtgcccgacgggagctgcaggatggcgagatctcaaggaccttggagcgctgctttagcgtcattacggaatcgggtaaattgctgagcggcactacggcatcggctctatcgcatcgaaagccactgagtgcatcctcgctgcagctttcggtgaccagctatctgagtagattcctcaaacgtggcgtctacgacaagatcaagcgccgacagacccgactcgatcacaatctcttcgatgtcctgtggccagcgatgcggaaaacatcgaaggcgcgccacttggaggaggacatcaactgcgggattatagctccagatttcgatgtgtttgtggtgttccaagagttcttggtgccgttgcttaaggacatgcattgcctgagtatcgatgctgatttcaaaccgcaacctcgactggcctattttcccatggacaatggcgaaaggctcaacacagcggctttcgtcttcgacgatgaatcgcagctggtcacccgctgtttggttgaagtctccaggaatttggatcagttggagctacccctgaacctcaccattggccaattggagcaagcggaacgtctgatgatgagcaaaatatttaccacccattttgcggatgccattggcgaaacggattcgggaaactattacaccatgaccgaactcttggaacccgactctgaggtgacgatgatgctcagtagcctcggtctgatgattccactcttagatacaaaggatctggtgcaggctgccgagtctacagccttcaatggagctctttggccatacggcaggggtgcctttgtcaattcagccaacaatatggctgtgtggctgaattgtcaggagcacttgagaataatctccacgactagcagcaaagagccagcggatatgggagctgcttacacgagagtgggaagagccataacctacctggaaacccaactgcatttcaaggagagctatctcctgggttacctccagtccaggcccagttacttgggcaccggactcaagatgacgaccatagtgaagctaacgaatctgatgaaggagatggacaacctgcggcacttgtgctcggtgcggggattgagtatggtgaccaatcgcctttcaaaactcaccgtgcgccttgtcaatatgcagagcatgggcgttgtggaatacgtgcttttccaggactactgcactgctgtcaccaatatcctgtccctagagaaggacatgtcgctgacgaactccaagcacatcgccaccatgctggtgaagatcttcaagcgcaagaagaacagcatcgtggatcgcaactagaagaaagcactagattccagctcaatgtacataccaacaaaaaacaatacctccgcacattaaatcactaatacatatgctaaatttgattgatacctgccacgagccctcatctcaaaaactcctccgctttcgctgcgtttaaggttaatccgcaatcgtaagttccgctttgagttacacctacatagtcgtatccgtatccgtgtcttgcccgaagactgtgaacttgtcacgattataatatgatttgcaaagtctcttgagttcaaccatcggcatcctcatcttcgtttgtttactccccaaccgccaaaaaaaatactactcccctctcgctttgtgtacatagattactgggactcgatccattgagtgtgactgaagatatcctgggccattggagtgactaatccagcttgtttttcacacaggtcaggcgcagccagtgagctttcaggccaatccaatcttcaagacggagcagggaaaatacctggctgattgtaagtattttggaaatgcggtggttctctgacgtgacacaaaatttaacgacattccgttaggtagttaattttagataagaaagtggtaatgtttcttagcatatgaggtttatttgtaaacggtgttctagttgcagtgcctagtttaaacttgaaatgaagtcaggcaacatttgtctagaaccaatttaaagtttagttaaactcgataagcttatctatactctttctctcaatcagctctcgccgatcctttgatcaaggccctcactgaaatagccaacaaaagacccagagatcccgttgcctatctgaccaactacctgcagcacttcatgggcgaccgcaagccaatgaccgaggtccaagttcactcgggcagcagcaaggccagtactagttccacatccaccctggcattgcccaagtcgaatgccagctcgaaccaaagattgggcaacacacgcaatggtcctggtcccaccaatgccgatctcatcgagctggatgctcgatctgtagccgaggatgaggatgcggaaggagcactggcggtgcagcacatggaggagcgggatgagcacggtcaaagtatgctacacttcgcatgtgcccgctctcatcggaggggagctctctacactctgattgaggagtcgggcattgacatcacctaccgggatgagctatatcgaactgctagagatgtctcgctccaagcgaatcagccgaacaatgcggccgagatcgatcgatatgtcatggcacaggcagttattggtaggttataccaaacattatccttcctcctaactaactgcgtataaactgtactttcccaaacaaggcgacgtcgaacctttcgaacaactcgctctacaaggctacgatcacatcctggacatcgaagacgaaaatggtcagtctataacagatgtggtgcagtcccgacagaacgctgctcttggagagttcctggccaaccttaaggcattggaggaatctcgcgaagagctgcatcaaatgatcagggaaaataacatggagcgagtggttgagttgaccaatgttgccaatgccaagtggttgataagaaccaagaactattatggtaagagtggacttttaaagttaaagaaagattttcttaaacttattccaataaacttcaggtcgaaccgccctgcacatagcagtgctgaaggagtccgaggaaatggttcagcacatggtgaaaatctgtcccgagggcttgaaaatcacagataacgtaaggaacctaaagtaatgtcttaaatttagtatctaaacatggtcaatttccagttggaacgcactgttctgcattacgccatgggtaccaatgcgctggagagtgtgagtcggatactaattcagaacggggccaagcgaaccgccaaggatctcaaaggacgacagccaagctattacttcatcaacaaagcggacatactacgcctgcaggaggaggaggaggagagccgctgagagatcggattaagcaatatgtatagtatatagtatacaataaagtacaagtatatagaaatccgcttgtacagttgcttgtactttgtatgccaaatttatagctgaaccagtttgtttggcactatgcagattggggtttccgggcatgttggacgtcatatatacaatatacataggcgctatccgttcaagatcaagtttgaagaaaggtttccgataaggtgcttgttcatggcgcccatgctagatgaaacactttcgctatcagtcgaggtgcttcacactttattatctgattccatggggggacggggtctggaacgtctggcccactagtctgaaggatcccacgggcaagcatgatccagataattggcattgccattggccgacgataagatataacttaagcctcggccactgaagaggctcaacagataacgcggcactgagtgacaacagttggctcttggaaatcaatgacgtcttcgaagttctgtgactgcttagaggagccctgcccttctcatgcgtatcgcatccggatttcaatcgctgtaccacccaccacccaccgactgacactatcagtgggccgtagtggaaccgccgctatcgtcattccaattcaaaatcgcgctctcattgttgccctcttccttatcaatatcgtatttgcaaagtgccctgatttggtgtccattaaacgggtatcacttgaaagctgacggcgggttcgattagctcttcaacgaaatgggaggtgttaaccgagctggctgcaggttaggagttgagtttagttttgatctctagcgggtgcggttcaatataagcagtgcgcggatatgacggcggaaacgaatacgggttagtaagggtccttggacgatcctttggatcctagaaaagagaaacttaagtttgtttttttcttttgttattttactttaatcactttccttctttaatttgcttatttattatgaaataaata

SEQ ID NO: 31586 - DNA, 2514 bp, DROSOPHILA
atggagggaaatcgcaatgaatttttcaacgaaatcattggcaatattgatgaaatattcggtattgcccgacgggagctgcaggatggcgagatctcaaggaccttggagcgctgctttagcgtcattacggaatcgggtaaattgctgagcggcactacggcatcggctctatcgcatcgaaagccactgagtgcatcctcgctgcagctttcggtgaccagctatctgagtagattcctcaaacgtggcgtctacgacaagatcaagcgccgacagacccgactcgatcacaatctcttcgatgtcctgtggccagcgatgcggaaaacatcgaaggcgcgccacttggaggaggacatcaactgcgggattatagctccagatttcgatgtgtttgtggtgttccaagagttcttggtgccgttgcttaaggacatgcattgcctgagtatcgatgctgatttcaaaccgcaacctcgactggcctattttcccatggacaatggcgaaaggctcaacacagcggctttcgtcttcgacgatgaatcgcagctggtcacccgctgtttggttgaagtctccaggaatttggatcagttggagctacccctgaacctcaccattggccaattggagcaagcggaacgtctgatgatgagcaaaatatttaccacccattttgcggatgccattggcgaaacggattcgggaaactattacaccatgaccgaactcttggaacccgactctgaggtgacgatgatgctcagtagcctcggtctgatgattccactcttagatacaaaggatctggtgcaggctgccgagtctacagccttcaatggagctctttggccatacggcaggggtgcctttgtcaattcagccaacaatatggctgtgtggctgaattgtcaggagcacttgagaataatctccacgactagcagcaaagagccagcggatatgggagctgcttacacgagagtgggaagagccataacctacctggaaacccaactgcatttcaaggagagctatctcctgggttacctccagtccaggcccagttacttgggcaccggactcaagatgacgaccatagtgaagctaacgaatctgatgaaggagatggacaacctgcggcacttgtgctcggtgcggggattgagtatggtgaccaatcgcctttcaaaactcaccgtgcgccttgtcaatatgcagagcatgggcgttgtggaatacgtgcttttccaggactactgcactgctgtcaccaatatcctgtccctagagaaggacatgtcgctgacgaactccaagcacatcgccaccatgctggtgaagatcttcaagcgcaagaagaacagcatccttgtttttcacacaggtcaggcgcagccagtgagctttcaggccaatccaatcttcaagacggagcagggaaaatacctggctgattctctcgccgatcctttgatcaaggccctcactgaaatagccaacaaaagacccagagatcccgttgcctatctgaccaactacctgcagcacttcatgggcgaccgcaagccaatgaccgaggtccaagttcactcgggcagcagcaaggccagtactagttccacatccaccctggcattgcccaagtcgaatgccagctcgaaccaaagattgggcaacacacgcaatggtcctggtcccaccaatgccgatctcatcgagctggatgctcgatctgtagccgaggatgaggatgcggaaggagcactggcggtgcagcacatggaggagcgggatgagcacggtcaaagtatgctacacttcgcatgtgcccgctctcatcggaggggagctctctacactctgattgaggagtcgggcattgacatcacctaccgggatgagctatatcgaactgctagagatgtctcgctccaagcgaatcagccgaacaatgcggccgagatcgatcgatatgtcatggcacaggcagttattggctacgatcacatcctggacatcgaagacgaaaatggtcagtctataacagatgtggtgcagtcccgacagaacgctgctcttggagagttcctggccaaccttaaggcattggaggaatctcgcgaagagctgcatcaaatgatcagggaaaataacatggagcgagtggttgagttgaccaatgttgccaatgccaagtggttgataagaaccaagaactattatggtcgaaccgccctgcacatagcagtgctgaaggagtccgaggaaatggttcagcacatggtgaaaatctgtcccgagggcttgaaaatcacagataacttggaacgcactgttctgcattacgccatgggtaccaatgcgctggagagtgtgagtcggatactaattcagaacggggccaagcgaaccgccaaggatctcaaaggacgacagccaagctattacttcatcaacaaagcggacatactacgcctgcaggaggaggaggaggagagccgctga

SEQ ID NO: 31587 - protein, 837 aa, DROSOPHILA
MEGNRNEFFNEIIGNIDEIFGIARRELQDGEISRTLERCFSVITESGKLLSGTTASALSHRKPLSASSLQLSVTSYLSRFLKRGVYDKIKRRQTRLDHNLFDVLWPAMRKTSKARHLEEDINCGIIAPDFDVFVVFQEFLVPLLKDMHCLSIDADFKPQPRLAYFPMDNGERLNTAAFVFDDESQLVTRCLVEVSRNLDQLELPLNLTIGQLEQAERLMMSKIFTTHFADAIGETDSGNYYTMTELLEPDSEVTMMLSSLGLMIPLLDTKDLVQAAESTAFNGALWPYGRGAFVNSANNMAVWLNCQEHLRIISTTSSKEPADMGAAYTRVGRAITYLETQLHFKESYLLGYLQSRPSYLGTGLKMTTIVKLTNLMKEMDNLRHLCSVRGLSMVTNRLSKLTVRLVNMQSMGVVEYVLFQDYCTAVTNILSLEKDMSLTNSKHIATMLVKIFKRKKNSILVFHTGQAQPVSFQANPIFKTEQGKYLADSLADPLIKALTEIANKRPRDPVAYLTNYLQHFMGDRKPMTEVQVHSGSSKASTSSTSTLALPKSNASSNQRLGNTRNGPGPTNADLIELDARSVAEDEDAEGALAVQHMEERDEHGQSMLHFACARSHRRGALYTLIEESGIDITYRDELYRTARDVSLQANQPNNAAEIDRYVMAQAVIGYDHILDIEDENGQSITDVVQSRQNAALGEFLANLKALEESREELHQMIRENNMERVVELTNVANAKWLIRTKNYYGRTALHIAVLKESEEMVQHMVKICPEGLKITDNLERTVLHYAMGTNALESVSRILIQNGAKRTAKDLKGRQPSYYFINKADILRLQEEEEESR

SEQ ID NO: 31588 - DNA, 4437 bp, DROSOPHILA
aaaatatatgtaaaatcaagggggctgctaggagcaatgtactaaaaattgtcgaaagcattcgggactgtggaaaaatatggcaaaagttgcaaacgaactttttgcccatgactcgtacgcttcggttgaacctatctacatactatgtacttctgttttttttttttttacatccccgctccatgaaagcgttaaagcgtggccagacattaaagccaagtctttgccatgaaaggaggcgataaatgtcgattacagttctggccaataaacaaggcaacttccactaaattctcaatgtgctgcacaacattgggccattaaatgcatggcgaatacacagtactatagtaagtaggcgagccaaagtttcattgctgacaaattgaaggcagtttgcttatgtcgtgggaaatgcgatgcgacagccaaacaaccaaacaggatcgcctgaaataaatctaagctgcgagtcctgagtttctgtgctctgtgtccgtaacgagccaaagtggcccaaatgcggatttatgccccgctcaatgataaattgaatttcactcaaaattaactataagccagaacgagaatcgtgctgccagcaggggaaaaacgctgccacatatgcgccctataaaatgtgacaagaaaactaacgaaggactcggcgctcatgtggctttggctaaaacaacacacaacacacaaccgcagtcgccgctccgcttcgaatgaaattaggccaaaaacccaggcagccacttggcttgacaattgcctaagcatatttgtcatttgattgatttattccgcagggccaacaacagctgccattaggttggccaagattgtttcttatttgtttgttttgtcctcgccgctcgcatcatgcccttccgctaaggcgcttttctcaaatcaaatctccatcgctttcattaggcgacagatttccatattttagcagggctcccagtactaaacctactctggcttcttagatctcgaagacgaagtattttcgcagatcctacaaagcatttagggaaggattttagcaaaacatcttcaaagaaatatgctatctaaaaataagcgaaataaatatattaagaagcaaccgaaaacaccaagtactaggctatacatctttgtaaatatttaaatatctatgatggaacagcaatcccaaagaatttgctcatctctaagtaaccgatttagtagctactagtttcgtttgtcccctagtgtgagttacataaatggaacacttttaacggcatgcaagacgggttcattaggattttcacaaaggtcacagtagtgttgcaggtgatggtggtggttggtaattggtggtaggtctacatttggtgactttcgggtgctagattctcgcatttggaggccaaagttgtacacgtggatgttagggtggtggatagttggggggcactcacctgttgagtagcgcggcaggggcgcgtcgccggtggcgaggcagccgccataggagaaatggtgactgctggatcctgtgcccgagaccacggctatttcatccagctcatggccgggcgaggtgccggcggataccaggcgggtggatgaggtcgccgagttgccctgcgaattcttgcgtccacgtagcgagagcaccagccttttggctgtggacatgccaacgattgtcgtcgcttggccgccgatccttctgctcccagcacccagtgtcctccgctctggccactcctgtaacggcaatggaaggcggagaatggtgaatggtgaatgttgaatggtaaatggcgaatggtgactggtaaatggcgaatggaaatgcgaaactttttcaatattcccatggcgctgggccgcctcggctcgccgtggctgacttcgctatttatttcgttaataatttagaacagagcttcaaaagatatgataatttctgcacagcgagctgggaggatgtgcttggatgagggcctggaattttcattttcatttccattttcatgctttgccagctcaagacatcgacgcagacggagggcttcttaaattatgcaaatgcttgcaatcaaggctacagaaatgccacagaacaacacacaaaaaagcagagctgcgaaaaagaacatcgcacaaaatgattgcgacatggaaattatgaataaagggattagcatatgagggggatagggtaatgtcgcaacgattaatggcttaagcatgaaactcaaatcccttgaaaagcgcgtttagtattgatttaaacgccaatcaatctgctcgatgggaataaactactataaatttactttttaattgctccatttaacagatttactatgataacacaaaattccgtctcaggagaattatgttatagcaaccacatactcaaagcaaagcctaagcttatattttgatttccatttgagttttagctaatgaatccttttgaatacgccagaggagcagtgtcgaccgacagaaagcactcattgacagtttggtttattctagaattcaaagaaagaaaagaaggggaaaaccgaatgatagacatgaacacaggcgaatacacaaaacccaatgcatacacactgaaaaccaaaaaaggcagacccttcctttccgtttccttatcattttaatatttaataagcaatgcgcagaagggaagtgcgagaggccccaatgaaatgggggaaactcgactcaacagcgactctaaatattcagttgagtgtaaacttgataagttgtgtctctggcaaacgtggggcatatgttggctttgcagggagtccttttgccgcggagtgggtaatgcacattattctatgcccatatttacatattatgccactttaaatgcccgcgctggctttaaactcttttcgtaaatgccttttgactgggcgtatacgtaatgccacacacaccctctggaaaaagagcacagttacacacattcaacttccctttttgggatacgtgacgaataacaaatttgtgggattttgcagcattttgattgaatgttgtcgtcgctgcgggaaacgccgaggaaattgggatggaaaggcgaacgagatccaaatacaaatatgatttatgagccgcagtctgcaagccaatcgtatcgtatatgtggggcggactactaactgcagatgttgcacaaacacaaaccagaaaaatcggataagaacttacgctcgacttagttcacatccggttcctgtgctccaagcccatgattatggaaaggcgatcaaaatacaccaaggatcaggtatgctgatatttatgcagtacttgatgacatactcccaacggaaattagtttacatgaaattgaagtgggtattaatagaaaacataacgtgagtgcgtcttacccatccctttaccatgattatgcaaaggtaactagaataacattgtggaaaacttcctgccacctaaacagtgttccattttccttggtcaaagcccaaaagacaatcaagtgttgcccaaaccaacgtaaacatgaaaattgcctgggaaacccgaactcacaactttcaaatcccaaggagggagaaaatcttgtgacagcgagaataaagtaagtaagaaggcggaggaaaagctgctgctggctgggccaattgtttgcattgtgcaagtgtcaacagcatttgcaattccgttgcaatttttagcatctttcgagctttggctgcaaagtaacccaaaatgcgaagtaaaaattgcacttctgtcccggttttgcacctcatgcgccgctttctatttttctatttgctgtgaaaatatggtaatttccagcaatcgaaggtggaaaacaattttcatatcattctcaattcgctgggtctcactggaatttaagctaatactgacttttacaattgcatatgctatgcacatagactttacaaatcaatataatatgcatgtgggcaaatacaattgaaaatgcttataatgcacaaatacgattccaatttcagtgtcaaaattgtttttgccagagctgccagcatttaatggcctctgtgccatttcagcagcatcagcagaaaataactagcttttgtttttagctaattaatgcaatccctttgaaataattgccaagaaccagatcccactggcaccccgtccatttgtccagatcacattgcaaaagacagacagcttcgtgcataaaaaatgtaccaccatcaatctcggaattcgtccaaaaacagttgcaggataaaccggagaaccggcgaaaaaaggctactaattagaggcaagaatcgcgattcctagccaacacaaataggaaattactctacgaaaaataccagccacagaaaaagaagctgattgtccaagtgattataccctctgcaaggg

SEQ ID NO: 31589 - DNA, 432 bp, DROSOPHILA
atggtaaagggatgggagtggccagagcggaggacactgggtgctgggagcagaaggatcggcggccaagcgacgacaatcgttggcatgtccacagccaaaaggctggtgctctcgctacgtggacgcaagaattcgcagggcaactcggcgacctcatccacccgcctggtatccgccggcacctcgcccggccatgagctggatgaaatagccgtggtctcgggcacaggatccagcagtcaccatttctcctatggcggctgcctcgccaccggcgacgcgcccctgccgcgctactcaacaggtgagtgccccccaactatccaccaccctaacatccacgtgtacaactttggcctccaaatgcgagaatctagcacccgaaagtcaccaaatgatctgcgaaaatacttcgtcttcgagatctaa

SEQ ID NO: 31590 - protein, 143 aa, DROSOPHILA
MVKGWEWPERRTLGAGSRRIGGQATTIVGMSTAKRLVLSLRGRKNSQGNSATSSTRLVSAGTSPGHELDEIAVVSGTGSSSHHFSYGGCLATGDAPLPRYSTGECPPTIHHPNIHVYNFGLQMRESSTRKSPNDLRKYFVFEI

SEQ ID NO: 31591 - DNA, 2699 bp, DROSOPHILA
ccgcacgcgcactcaactcatcataaattacttcaataatggcgcgataaccgagtctcaagagcaattcagatttattttcccacctgtactatgtaggcagaaagtagcagctttaataccagttcgttttgttattgcaggacccgttctgggaatgaggcatgtccaggcgctactgatcttcctcaatataactaccgtattcataggccgcctaaatgtgggcgtgtctgtggtggcaatgaccaatgcggaaaccacgaacccgaactttccggtaagaatagggatcctataaagaaaatactacttagctcactagattctctactaggaatacgattggacggaggcagagaagtcgtatatattctccagtttcttttggggctacatcttgacccaatttataggtggctatctctgcaagcgctttggagtcaagagtgtaatgttttggggtgtctttgtatctggtgtctgcagtgcattgaccccgctcttcatcggttttggcggatggcaggcctactgcggaattcgcgtggttatgggcttggcacagggactagtttttccctgtattcatcaccatttggccaaatggtcacctccggcggaacgaaatcggttgggagctcttagtcacactgggatggagtgcggcaatgtaagtgccatgttcttgagcggaatgatagccaaaagtgccattggttggccaggaatatcatatgtctccgcaggattagccttcgcctggtgtgccatttggttcgtttttgccgctgacaatgcagtggaatctcgttacataacccaggaagaactccactatatcgaatcgtctctgaagcacaatgaggactatcacaagaccgtaattcccgtaccatggatggcgatttggacctcggcaccatttcttgctcttacgctgacgcgttgttgcgcgacctggggtctgagcaccctccaggcccaaatcccaacttatatgaacggagttctggatatggacatgaaaagcaatgcattcttttcggcattaccatttctggccatgtggattatgtcgtatgtgtacctgataatcgccgatgttctgctcgccggaaacaggctgagtttaacggccctccggaagaccttcaactcgttggccttctggattccttgtgccactttgattggaatcggattcctggatcaggagcagaagaacctggcaattgctttgatgaccatcagtgtcggtgtcaacagtggagcaacaatcggaagctccttgaacaccatagatctatccccgaatcatgcgagtattctaatgggaatcttgaatacggctgttactgtagtgcctatagtaacccctttgattgttggagttattgttcatgaagacgtaagtttgcactgttagtgtttataaacagggcagtgataaataagtataaataagaagactttctgttgattgtttcaggataaccgtgctgagtggcagatagtgttcataattgcggcagtacttttttttgtcggaaactcggtgtacctatactttggaacggctgtttcacaaccctgggatgctgaagactacctcacagtaaaggtgccagagctagctaaagttccagctatccatgaagctggtaaaggtattgatgaccttccacgaagtccttgaattgaagttctatcgatagcacttaagtcttcagttaacatagaaactatttaaaacaacaaagcaatcaaaataatttagagtattattattaaatttaataagatttaagatctacatcagtacatttcatttgtttattaaacgtataagtaaaacgatttgtttgaattaaaatgtttgagcgttatttgcttatcaaaagtcgtcaaatttaccaaaggtgcggccataaatcaatccaataatggtatggcagtaactactcttgatattaccaattgattttggaacgccacacgaccaggcaatgctgttctaaacaacctcgtttaacagtagaaaaggaactgcaggtaggatattttcgtcaagatatctaaaattaactattaaaggtgcaaaaccttggcttctttcttgactaagtaacctgaaggccgaaatgcccacctattcgaaaaagggttctcgatatggccatgaaaaagcaatgcattctttttggcgctaacattttaggccatgttgcttatgtggcatctatcttttaccgaatcgtgccagaatccttactagaattgtagaaatggatgaaaataatgatttattgattgatttacaatattctgactaatgacataataactagtttgtaaagtacaacaattttttaatgacgctttttaattcaatggttaaattcgcccgctgtatgaccttatcacctgacgtgtcgtatcagataagcaacatttggcttatcgtctaattcaatttggatttaaatccactctatgttcgtggtctcactcacttaacttcccacagtgattccgatcggtcgtttaaaagaagtcaggaggtgttttgttgaccaaatcaaaaatgacggccgagacaaacaaaggtgcgtgaaaggaaatccttcggttcggataagagtttgtgaatgaattgacacccaacgaacttgacacagtggaaaaccccttcatgg

SEQ ID NO: 31592 - DNA, 618 bp, DROSOPHILA
atgaacggagttctggatatggacatgaaaagcaatgcattcttttcggcattaccatttctggccatgtggattatgtcgtatgtgtacctgataatcgccgatgttctgctcgccggaaacaggctgagtttaacggccctccggaagaccttcaactcgttggccttctggattccttgtgccactttgattggaatcggattcctggatcaggagcagaagaacctggcaattgctttgatgaccatcagtgtcggtgtcaacagtggagcaacaatcggaagctccttgaacaccatagatctatccccgaatcatgcgagtattctaatgggaatcttgaatacggctgttactgtagtgcctatagtaacccctttgattgttggagttattgttcatgaagacgataaccgtgctgagtggcagatagtgttcataattgcggcagtacttttttttgtcggaaactcggtgtacctatactttggaacggctgtttcacaaccctgggatgctgaagactacctcacagtaaaggtgccagagctagctaaagttccagctatccatgaagctggtaaaggtattgatgaccttccacgaagtccttga

SEQ ID NO: 31593 - protein, 205 aa, DROSOPHILA
MNGVLDMDMKSNAFFSALPFLAMWIMSYVYLIIADVLLAGNRLSLTALRKTFNSLAFWIPCATLIGIGFLDQEQKNLAIALMTISVGVNSGATIGSSLNTIDLSPNHASILMGILNTAVTVVPIVTPLIVGVIVHEDDNRAEWQIVFIIAAVLFFVGNSVYLYFGTAVSQPWDAEDYLTVKVPELAKVPAIHEAGKGIDDLPRSP

SEQ ID NO: 31594 - DNA, 7779 bp, DROSOPHILA
taggcatcgtgtggtgccttactttcttgcgatatggcgccaacagcccatccgaatcgaaattcatttctctggcggaacgaaagcacattcaatttgccctcgagcagaatcaggtgattcgcggtgcaactcctccagtaccgtggctccagatcctcacctctcgtccatttatcgtcctggcgttttgcaaaatgagccaggcgtgcagcttctacacgctgatgcaacagattccgcgctacatccacggtatattccactacagcattgcggcaaatgccctgctctcagctctgccctttgtggtcatgctgatgtcatcctacggattcattttcctggctgaatacctaacccgtcgtcgagacatttcattgcctatcctacggaagaccattaattcctttgccacatggacccctgctgtagccctggttatcctatcctacgtcagcgatcagaatgtggtgggcagtatgttttgtctgattgcagccacagctgccatttccggacaggccattggcagttcccttaaccacgtggacttgtcgccaaactttgctggactcctgtttgggatgagcaacacactgatgtctgcggctggtgtgatatcgccaatcgtcattgggctgaccgtaaccaaagaggtaagtaatttggatagttaagtaaattgattaactttattttatttcagtcggatcgatcgcaatggcgaacagttttccttggcatttcggtgattctgttcctcggcaacttgatgtacctaatctttggtcaaatgaccgtccagtcctggaatgattccccatccaaagagaccgaaacagaagcatcaccaaagccccaggcatcggctccctcagttgccgaggaaacgatatccgtcgagagatttaactatttgtaaatgtatatttgtaataacgtaatcagtgctaatgttgttgtataaaaacagtttaaaatcacaatggtatttatgtcacgtatctcctgctgtgtggaaatcggtacgaccgaaatttgtatctctaagataataaacggaggaatcgttgattaaggacatcacgatggacttgaagcccaaaatggatgccagcttgtatttgagaaccacggacttgatcagtcccaccagctgaaccatcgactcttcctgttttgagttcgtggcattactttggatgtgcagcaaataactgaaataatataatcataacaaggaggaagataaagtcaggccagccaaacacataccccttaacaatctgttcgattacatcatcattgatgcgctgatggcacagatattcctgcagataattgactccctgaagcacaacgaattgagacaagatggcttcgctccaactaatatcataaccataggcgcgactcagaatcagagcttgaggtacgctagaatagaaacataatgacaaccaattatttaaatagttagtcctttgatgtaaagcttttgcataccttaaatggacgttgactagctcccgaaactgttccctagaacgcactccaatgacgctgacacacaaatgattcgcgttattgctgtgccttttttcgagtgctttgttgcacagatccagttgcatggccatcagctcggctcgagaaacactttgctgggcgagcagaagcttgttatccaacaaatagttctccgttgcatgtgtgtaattttccaaggcctgttgcaacagtgtttgaacctctacggagcattttagcttattggactgcgcggcaaaggcttgaattttggtaacaatctcttgggcctccgtagtccacatctccgccaactctttgtacatgaggaagtgcagcgccgctaggcgcagaagctctttcccattctttggttggtactctctgaggtaacttagaatcgcctgtcgaagtccacctttctggtcctcatcaaactgtcccaacaaggactcaaactgctcgttttcaatcagggaatcaaagcagtagaacatctcgcggtagcgcgcaattccaatcagcaaacggacaatcagtgaccacgacttggcctgggctagtttggtattaagtgctttagctttctggaggacgcttacaatgccttccatggagcactcgtgcacgaaacacaggtgcgccttgatcaacagctccacgtagatctgattttgttttttgtgtgacaaaacctggggaatgcctgacattgtacccgtcggagaaggagtgggtaatccgtagagcgttattatctttgaaagattttcgaatgcttcggtctcctcaaaaggcttgccctcctggtagcggcgataagtctttagagcatcacagtactccagcaaacaattacccagcatagtagaattgggcgccagttctaggaacaggtggaaatcccgatcgatgctgtggccccagagatccgcgttccttaaggcatttcgcggctgctctctggcatggaatatataaaaacggggacgtacgatacaggtggtcagctccaaggccaaacattcggcaatctgttgaaattcgattaaatatcacaatgattgagcttttgaaatatatagtacttacttcttttggtgtcattctcgtggaaatttgtatatcactgacaactagtagccgctgtagacaatcttcagcagcggcgctcttcaaaaggataccagtatccttggttcgcaacacatcaagatattctttgtccaagtacatggctgccctgtacgcaaggacaatacgtcgtccaagctcaacgccatactttaactttgacccaatgcccagcaaggtgtccagtgtctgctgtttctctttggaggggatctcttcaaactccatcgccacgctgtccgaacaagtatcagaaaggtcactgtcccagcgcgttatcacattttggtttaaggtgatccgattaaacttaggaaacgcactcttctcgatttctccgagcaactggcgttccttgcttgacagattactaatgctggtcataccttcggccaatgccattgcaaatacgataaatcgaaggtcatttggacgaaattcgaaaagctcttgaagacgcagtgcctccacaatgtcacccttgtccaatagggtgtttagtaaagtattgagccggtcttccatctcagaagtaagcacagttttatcagctatgctgaggtcatcaattccagctagttctttaagttccgaaaaggatttataaagcacacagcgctcttgaagcatgatttgctcaaaatactccgagtggtaaatggataactgagggagctgctcttccggcagctgcaaatagcacaaaaccatgtcgtactcaatttgatcgcgatcaaaggattcgtttgggaacaggtgatgctttttgatgacgcccagtgtactttgcaacagctcatatcgccggaggctcacttggccaacgacggaagctgcctgcagcaggaagttcaccaagatggcgggagccaaagcgtgttgttgaatgtccttttcgtactcctcgtggggtctgagttgtccggcttccagctccgtcatccatttaccatacacaatgtcagtcaacggcaactgtagcaatgtggccaattgcaaagcttcctcataagctcgtgcctcagtcagggcatctaccagtcgcttgtactcggggctatccctcctcccgagctgctcgagatcaatggatagttcccttagccaggtagcagcgactccgaaaactttatgcagaaggcaaaaatccagaagatcacaaatatcgcccacatccgaacgacaaatgcactcaaggaagcgctgctgctgcagtatgcagtcaaaattcgactgcaattggataagcagcaggccaatggagcgctgcatcaactgctttctgggcaggggaccacacagaggcaaagcgactgaatcctggctccagctaaaaaagaactggcgcagctccacaattgttgcatcactaaagtcttcctggtggccagtcagttgaagaaagcggcacagatgcgtgagtttgcagtcctgaaagagaaataggctgttattaaacaaagatatagatgttcatacctaccggatgaaagatttctaggctgtgtaaaagggcattcagatgtccgccagcgacagcgcctctaatgactgaccacacccattctgatcggttctcatcgcgcaccttggatgcctcctgaagctgcaggctccactgtccgctggccaccgaaagccaaacgatccagcaccaatcccggttttgctcgctgattgtggctgccagtacagccaagataggcagctcctggcggatgcagtgccttaagaggtttatgctactgcaatgcgaactgttcccaaccatcatctccaaaaactttggtgtggtggcaataagctcatctggaagactattggtactgcacagtattatggcaaatacgtcctggcgagctgtgtgtgttaacaaagtgcaaagggattgatccgtattcctctgaagctgctgcacgctggaatcctgattcgaactatgtgaggagttggtcatcgtttcctgagaggagttggtttgcgtttccccgctacgacgagtcggtcgctgtaaggtccttttgtggtggcgatctccagacgattcgtaactcaacgctcgtagcagatgcactccgattggagatgacttgaagtgcggcaagagcttcttaagttcacttaaaggaagatcaaagaattggaagactagtagcaagtgccaccaattatttttggaggcgtagcgtttaagcaaatccattggaagttttcctggagtgtcccttatagctagacgcattagggactgatatagttccaaaggaaattcgctgggattggcctcgagcatttccaccaagtccctatcccattcaccaaggagttcggagtaactttgtccggtttcgcacttcggtagcttcctttgcagcagcagaaaactccttagtggctgggtatcgaagcccagcatctcgcaacaggctacgcaatgggtaaccaactcgtcatcgccagcgtgctgcaatgctatctgggtgacagtctcacaggcgtggaacagctgcgtctttgttatttgaccataaagctgaagttgctctgtaataaggtagtatacagcataggcgcttctctgttgcttcaggtaatgggtgtaattcaattgagatttcctggcatatcgctgactaagacgcgcgtttgagaagcataccagttcaccatgtccagcggttgctaggagcggcagattcacgtgtttgaacttcatgaagagatcgtgtgccgtgggtaggccgaaattgcagctcgtcggcccatgatcgaagcgagcaatcagggatttgagatacggaacccgacccaagttggtagaggtcaggaatccctctaaagagcgcacacttggctcctgaccaagaaaatcgtagaaggtcagcaggggatgcccttcgaaggagtcgactgtgtcgtgagttttctccaagtatgcttgaacgctcttggatatctgaaatacatttaaattgacataattatacacttaacacacttaaatatagagtaaataatatatttgcgaatcattatctgttctgacttaccaactcgaagccctcgttctcggtcaatgaatttgtttttatgtcgacgattagattaatcaggggctcctggtgcgtttcagtgccggccagcagttccagcgaggcgataggcacgcattccatgaggagcagcgagtattggccgcggtccagcaggtatttcgccagtggctggcggctaaggagatccgcgtgctttcccaagcactccatggtgcaaaggcgacgcagcagagaaggaatatcttcggactcgtccatgaaaaagtatcccgcacgcgcaaagaagtttcgcagcacttcgctgggctgctgcagttcctccacggcgtactcgtacatggtggcatctattttccacgcggtgaagctctgttccaagggagaaagcgtttcctgggacacaaagccctcctcctgaaggcgacaccagcgttggagctttgcttgctcgtcactgtctaccaggtgctgccagaccatgtctttggacagggatcccaacagagattcattgccattggcgaagtacaattctacgaggagcaactgcagtgcctgctctggtaatgtcatcatggcttctatgtgcacacggggcagctgtgttcgatgcttggccaccaaggcctcgcactcccggagttgctgcaccaaggaccagtggtaggccagtactggctcttcctgctcgtacataaggggctcccgactgcgcaggtgatccagcacaaactcacttaactcctcgtcctggcactcgcaggcgaactgaaaaaagaagcacttcacatctctgtccacgttccggatcacgtcctccgccttgcagacaagtctctcggagagcagtcgctgcacataggcctgcaccacgtcgtagaagtagtggcggtactccgaaacgggaatctttctcttctgcgcccagtactccatgcacaggtcgatgtgctcgcccttggtggccacctccttgatgatggtcacctcgctaatgcccctccagttcttgaagattttgtcgcgggcctgagcctgcgcctgggcggaatgcatcttggtgggcggagttcttggaatgttctgcgggctttttcacatctctttgttgcaatcaacagttgataatagcgaaaacagctgtatgttctgcttcttcttctccggaaccttatctagttccgagtgcaagtacagtaagcactgaaaataatgacgcacaaattgtattaaatggagccacattttaactaaaaatatctgaaactttgttcagtccattgctgtcgaggaacttttgtctcttacccttttgccacaacgggaagtttaagtttattattattattaagtttatcaatgtcaaagagtaaagtttttaaaatattcaaatcatttaatgtcatctactataagatattcaaaaaaaatttacttaaatattgtggaataaatatagcgatagagtaaaaaaatggccccatccctttctagcacacgtaatttcttttaaaagaaaagttgctgattaagtttttggaatttccggtgtgaacacgacatctgattggccagacctgccaacttgttcgaggtgggtgtaaaactccgatggtatgagtacctgctaggattttagcaaagttcgaacccaatccgtgctcattcttggttataattaggttattttttcgatattttgaggtatatttctacgatagatcggcggtcacatcgtatttccctccttttcgttttcgtttccggcgaagtaagtataataaaatctccacgttttttttaatgctaataattgaaacatctcattggcaaactagcgaataatcttggaataaccagtccgcgagcaacaaaatgtcgaagagaggtaaaaatccgaacgaaccgcgccgctaagcgtgcgaaatgtgacgcgccggatgtggagagtgtcgaagttgtggtgtgcaaaactaataaccctctgtttttcggtctcatccaggacgtggaggtaccgcgggaggcaagttccgcatctccctcggtttgcccg

SEQ ID NO: 31595 - DNA, 5448 bp, DROSOPHILA
atgcattccgcccaggcgcaggctcaggcccgcgacaaaatcttcaagaactggaggggcattagcgaggtgaccatcatcaaggaggtggccaccaagggcgagcacatcgacctgtgcatggagtactgggcgcagaagagaaagattcccgtttcggagtaccgccactacttctacgacgtggtgcaggcctatgtgcagcgactgctctccgagagacttgtctgcaaggcggaggacgtgatccggaacgtggacagagatgtgaagtgcttcttttttcagttcgcctgcgagtgccaggacgaggagttaagtgagtttgtgctggatcacctgcgcagtcgggagccccttatgtacgagcaggaagagccagtactggcctaccactggtccttggtgcagcaactccgggagtgcgaggccttggtggccaagcatcgaacacagctgccccgtgtgcacatagaagccatgatgacattaccagagcaggcactgcagttgctcctcgtagaattgtacttcgccaatggcaatgaatctctgttgggatccctgtccaaagacatggtctggcagcacctggtagacagtgacgagcaagcaaagctccaacgctggtgtcgccttcaggaggagggctttgtgtcccaggaaacgctttctcccttggaacagagcttcaccgcgtggaaaatagatgccaccatgtacgagtacgccgtggaggaactgcagcagcccagcgaagtgctgcgaaacttctttgcgcgtgcgggatactttttcatggacgagtccgaagatattccttctctgctgcgtcgcctttgcaccatggagtgcttgggaaagcacgcggatctccttagccgccagccactggcgaaatacctgctggaccgcggccaatactcgctgctcctcatggaatgcgtgcctatcgcctcgctggaactgctggccggcactgaaacgcaccaggagcccctgattaatctaatcgtcgacataaaaacaaattcattgaccgagaacgagggcttcgagttgatatccaagagcgttcaagcatacttggagaaaactcacgacacagtcgactccttcgaagggcatcccctgctgaccttctacgattttcttggtcaggagccaagtgtgcgctctttagagggattcctgacctctaccaacttgggtcgggttccgtatctcaaatccctgattgctcgcttcgatcatgggccgacgagctgcaatttcggcctacccacggcacacgatctcttcatgaagttcaaacacgtgaatctgccgctcctagcaaccgctggacatggtgaactggtatgcttctcaaacgcgcgtcttagtcagcgatatgccaggaaatctcaattgaattacacccattacctgaagcaacagagaagcgcctatgctgtatactaccttattacagagcaacttcagctttatggtcaaataacaaagacgcagctgttccacgcctgtgagactgtcacccagatagcattgcagcacgctggcgatgacgagttggttacccattgcgtagcctgttgcgagatgctgggcttcgatacccagccactaaggagttttctgctgctgcaaaggaagctaccgaagtgcgaaaccggacaaagttactccgaactccttggtgaatgggatagggacttggtggaaatgctcgaggccaatcccagcgaatttcctttggaactatatcagtccctaatgcgtctagctataagggacactccaggaaaacttccaatggatttgcttaaacgctacgcctccaaaaataattggtggcacttgctactagtcttccaattctttgatcttcctttaagtgaacttaagaagctcttgccgcacttcaagtcatctccaatcggagtgcatctgctacgagcgttgagttacgaatcgtctggagatcgccaccacaaaaggaccttacagcgaccgactcgtcgtagcggggaaacgcaaaccaactcctctcaggaaacgatgaccaactcctcacatagttcgaatcaggattccagcgtgcagcagcttcagaggaatacggatcaatccctttgcactttgttaacacacacagctcgccaggacgtatttgccataatactgtgcagtaccaatagtcttccagatgagcttattgccaccacaccaaagtttttggagatgatggttgggaacagttcgcattgcagtagcataaacctcttaaggcactgcatccgccaggagctgcctatcttggctgtactggcagccacaatcagcgagcaaaaccgggattggtgctggatcgtttggctttcggtggccagcggacagtggagcctgcagcttcaggaggcatccaaggtgcgcgatgagaaccgatcagaatgggtgtggtcagtcattagaggcgctgtcgctggcggacatctgaatgcccttttacacagcctagaaatctttcatccggactgcaaactcacgcatctgtgccgctttcttcaactgactggccaccaggaagactttagtgatgcaacaattgtggagctgcgccagttcttttttagctggagccaggattcagtcgctttgcctctgtgtggtcccctgcccagaaagcagttgatgcagcgctccattggcctgctgcttatccaattgcagtcgaattttgactgcatactgcagcagcagcgcttccttgagtgcatttgtcgttcggatgtgggcgatatttgtgatcttctggatttttgccttctgcataaagttttcggagtcgctgctacctggctaagggaactatccattgatctcgagcagctcgggaggagggatagccccgagtacaagcgactggtagatgccctgactgaggcacgagcttatgaggaagctttgcaattggccacattgctacagttgccgttgactgacattgtgtatggtaaatggatgacggagctggaagccggacaactcagaccccacgaggagtacgaaaaggacattcaacaacacgctttggctcccgccatcttggtgaacttcctgctgcaggcagcttccgtcgttggccaagtgagcctccggcgatatgagctgttgcaaagtacactgggcgtcatcaaaaagcatcacctgttcccaaacgaatcctttgatcgcgatcaaattgagtacgacatggttttgtgctatttgcagctgccggaagagcagctccctcagttatccatttaccactcggagtattttgagcaaatcatgcttcaagagcgctgtgtgctttataaatccttttcggaacttaaagaactagctggaattgatgacctcagcatagctgataaaactgtgcttacttctgagatggaagaccggctcaatactttactaaacaccctattggacaagggtgacattgtggaggcactgcgtcttcaagagcttttcgaatttcgtccaaatgaccttcgatttatcgtatttgcaatggcattggccgaaggtatgaccagcattagtaatctgtcaagcaaggaacgccagttgctcggagaaatcgagaagagtgcgtttcctaagtttaatcggatcaccttaaaccaaaatgtgataacgcgctgggacagtgacctttctgatacttgttcggacagcgtggcgatggagtttgaagagatcccctccaaagagaaacagcagacactggacaccttgctgggcattgggtcaaagttaaagtatggcgttgagcttggacgacgtattgtccttgcgtacagggcagccatgtacttggacaaagaatatcttgatgtgttgcgaaccaaggatactggtatccttttgaagagcgccgctgctgaagattgtctacagcggctactagttgtcagtgatatacaaatttccacgagaatgacaccaaaagaaattgccgaatgtttggccttggagctgaccacctgtatcgtacgtccccgtttttatatattccatgccagagagcagccgcgaaatgccttaaggaacgcggatctctggggccacagcatcgatcgggatttccacctgttcctagaactggcgcccaattctactatgctgggtaattgtttgctggagtactgtgatgctctaaagacttatcgccgctaccaggagggcaagccttttgaggagaccgaagcattcgaaaatctttcaaagataataacgctctacggattacccactccttctccgacgggtacaatgtcaggcattccccaggttttgtcacacaaaaaacaaaatcagatctacgtggagctgttgatcaaggcgcacctgtgtttcgtgcacgagtgctccatggaaggcattgtaagcgtcctccagaaagctaaagcacttaataccaaactagcccaggccaagtcgtggtcactgattgtccgtttgctgattggaattgcgcgctaccgcgagatgttctactgctttgattccctgattgaaaacgagcagtttgagtccttgttgggacagtttgatgaggaccagaaaggtggacttcgacaggcgattctaagttacctcagagagtaccaaccaaagaatgggaaagagcttctgcgcctagcggcgctgcacttcctcatgtacaaagagttggcggagatgtggactacggaggcccaagagattgttaccaaaattcaagcctttgccgcgcagtccaataagctaaaatgctccgtagaggttcaaacactgttgcaacaggccttggaaaattacacacatgcaacggagaactatttgttggataacaagcttctgctcgcccagcaaagtgtttctcgagccgagctgatggccatgcaactggatctgtgcaacaaagcactcgaaaaaaggcacagcaataacgcgaatcatttgtgtgtcagcgtcattggagtgcgttctagggaacagtttcgggagctagtcaacgtccatttaagcgtacctcaagctctgattctgagtcgcgcctatggttatgatattagttggagcgaagccatcttgtctcaattcgttgtgcttcagggagtcaattatctgcaggaatatctgtgccatcagcgcatcaatgatgatgtaatcgaacagattgttaagggttatttgctgcacatccaaagtaatgccacgaactcaaaacaggaagagtcgatggttcagctggtgggactgatcaagtccgtggttctcaaatacaagctggcatccattttgggcttcaagtccatcgtgatgtccttaatcaacgattcctccgtttattatcttagagatacaaatttcggtcgtaccgatttccacacagcaggagatacgtga

SEQ ID NO: 31596 - protein, 1815 aa, DROSOPHILA
MHSAQAQAQARDKIFKNWRGISEVTIIKEVATKGEHIDLCMEYWAQKRKIPVSEYRHYFYDVVQAYVQRLLSERLVCKAEDVIRNVDRDVKCFFFQFACECQDEELSEFVLDHLRSREPLMYEQEEPVLAYHWSLVQQLRECEALVAKHRTQLPRVHIEAMMTLPEQALQLLLVELYFANGNESLLGSLSKDMVWQHLVDSDEQAKLQRWCRLQEEGFVSQETLSPLEQSFTAWKIDATMYEYAVEELQQPSEVLRNFFARAGYFFMDESEDIPSLLRRLCTMECLGKHADLLSRQPLAKYLLDRGQYSLLLMECVPIASLELLAGTETHQEPLINLIVDIKTNSLTENEGFELISKSVQAYLEKTHDTVDSFEGHPLLTFYDFLGQEPSVRSLEGFLTSTNLGRVPYLKSLIARFDHGPTSCNFGLPTAHDLFMKFKHVNLPLLATAGHGELVCFSNARLSQRYARKSQLNYTHYLKQQRSAYAVYYLITEQLQLYGQITKTQLFHACETVTQIALQHAGDDELVTHCVACCEMLGFDTQPLRSFLLLQRKLPKCETGQSYSELLGEWDRDLVEMLEANPSEFPLELYQSLMRLAIRDTPGKLPMDLLKRYASKNNWWHLLLVFQFFDLPLSELKKLLPHFKSSPIGVHLLRALSYESSGDRHHKRTLQRPTRRSGETQTNSSQETMTNSSHSSNQDSSVQQLQRNTDQSLCTLLTHTARQDVFAIILCSTNSLPDELIATTPKFLEMMVGNSSHCSSINLLRHCIRQELPILAVLAATISEQNRDWCWIVWLSVASGQWSLQLQEASKVRDENRSEWVWSVIRGAVAGGHLNALLHSLEIFHPDCKLTHLCRFLQLTGHQEDFSDATIVELRQFFFSWSQDSVALPLCGPLPRKQLMQRSIGLLLIQLQSNFDCILQQQRFLECICRSDVGDICDLLDFCLLHKVFGVAATWLRELSIDLEQLGRRDSPEYKRLVDALTEARAYEEALQLATLLQLPLTDIVYGKWMTELEAGQLRPHEEYEKDIQQHALAPAILVNFLLQAASVVGQVSLRRYELLQSTLGVIKKHHLFPNESFDRDQIEYDMVLCYLQLPEEQLPQLSIYHSEYFEQIMLQERCVLYKSFSELKELAGIDDLSIADKTVLTSEMEDRLNTLLNTLLDKGDIVEALRLQELFEFRPNDLRFIVFAMALAEGMTSISNLSSKERQLLGEIEKSAFPKFNRITLNQNVITRWDSDLSDTCSDSVAMEFEEIPSKEKQQTLDTLLGIGSKLKYGVELGRRIVLAYRAAMYLDKEYLDVLRTKDTGILLKSAAAEDCLQRLLVVSDIQISTRMTPKEIAECLALELTTCIVRPRFYIFHAREQPRNALRNADLWGHSIDRDFHLFLELAPNSTMLGNCLLEYCDALKTYRRYQEGKPFEETEAFENLSKIITLYGLPTPSPTGTMSGIPQVLSHKKQNQIYVELLIKAHLCFVHECSMEGIVSVLQKAKALNTKLAQAKSWSLIVRLLIGIARYREMFYCFDSLIENEQFESLLGQFDEDQKGGLRQAILSYLREYQPKNGKELLRLAALHFLMYKELAEMWTTEAQEIVTKIQAFAAQSNKLKCSVEVQTLLQQALENYTHATENYLLDNKLLLAQQSVSRAELMAMQLDLCNKALEKRHSNNANHLCVSVIGVRSREQFRELVNVHLSVPQALILSRAYGYDISWSEAILSQFVVLQGVNYLQEYLCHQRINDDVIEQIVKGYLLHIQSNATNSKQEESMVQLVGLIKSVVLKYKLASILGFKSIVMSLINDSSVYYLRDTNFGRTDFHTAGDT

SEQ ID NO: 31597 - DNA, 4112 bp, DROSOPHILA
aaatattaatttttaatcctattgatacctgtaatattgtattatttttataattatattattatatgtggccactctcttccttgtaataatatccttaaagggatccctcttttcgacgttttgttaccttttgtttgcaataaaacaccccgagttatttgaatttaccgcccagcaaacctgtccaggtgtggcacccctgcctggaaatcagttcagctttagcgcctgcgcagtgaccatcgctcagctgatttggcgcaggacgtagttgtgccgccatagaacgccgtggagttcggcgctaccaaacgaaagctccgctctcccacgagcgtcccgttggcttccagtgttaaaacatgaaaagctgcgcctggcagcgggacaacagtgtgccgccgaagataccaacaccaactattggtatccgccagcagaactcacgcgctacgccgagagtacgaactccacttttggcacagttcgcccccgcggactccattccgcacgcacacactatcgcagccgtagatgttcgtgtatgtgggctgcaaaaagtcgatttttcgctaacaaaaagtatcctgtcctgtgtgggcaaaactttaaatggcccgggccataaaaggagattgccatagttgcgacttgcagtgggagatgtcctgcgaggagctgctgcgtccgaggtgctgagctcgttgggccgagaaaagtttgtgccagtcagtgcccgtatccccagaaaaaagcatccccctgccattctgcttctgtgatgagattggtgataatgagtgcaaccaaaggcccccatgtatccacataaaagcgcaagccgaaaacagacagcaccgcgataagtagaaacgtccaaccaccacagaagtattcattgccacgcacaacgacggcgcgtcctcgcggaacgggaggatcacgagcgacaggatctggagtgcccagcgacgctgaggcaaactagtcggctgtcatggcgggctggcgaggacgaggcctacgcgccacgctgctggccgtgctcgcgttactctcgggtgagcagttctcgcatacatcctttttgggttcctccaaactaatcctgtactcctcctactccgcccccatgccgcatagtcactcactcggtgcgcatcaccaacctgcgggtgccacgcacctacacgctgttccgagaccacgaacccgatcctctggtgctcgactgcgaggtggagatcgggccgcgggagcaaggattcgtcctcaaatggctgttcaataaccactccatctaccagtggataccatcggtcaaggggttcgccatggtgagtcactcggggtctttggtcgcaccgaattaattaagattaatcgaactctgtctttgtcttcgatttgttcttgttcttgcgcctgtagggcttcatgaagtcgaagatagacaccaaaatattcactatggagggcagtcccggtgttatatcgataaagaatcccgactggaacatgacgggggagtacacctgtgcagtgcagaccttcgagtccacggataagcggagtgcccgcctgcaaataatcggtgggtgtcacgaccacggccaaaagaaaaaggatcggcggtgaaagatgtgcggtggcgatgggaatgggaatgggtagcaggtggtggtgggggtcgaaaggtctaaggtggtggttctgcctctggttctgccgggtaacctgcacccgcccccatcttgacttggcccccgccaccagggtgtttgcataggtgttctcgtgtcggtgtttacacagggagacaaaaattatgatttatgtacttaaaagccattaacaaaagccgagaaagccttactctaatgcgctggcctttattctgtcccactattagcattcattctctcgcatatcatcttgtgcctgggcaattctaatttaaattttcaacgtacctttttaaggaacttatattctattatatttcatgatattactttctattttgttttaaagcaactttgttagctatatatatatatatccataactacggtttgaatattttaatcttagttagtatctgaagttgttttcagtgctgtaggacaactgtaattggcttagtcagggcgttcccaatcgagttccccttttaaatgctagggtcagtacttttttttgctagtgcaggtgctgggcgccgtctgtgtggcacgtgtgattcgctttcatatttgcatgcgtgtcatgtggcagtctctgcggtgtccggaaccacggcttgtttgtgctgttttgtgcttttctttgggacactgttttgcttggtattgttttgtttcgttgtttagtttgacacttgattaattctcacgactttttgtctttcggctcctgtccgccggctccaccacacacccttcgtccaatctgctccaattgcgacagttcctgaatcggatttcatgctggaagcgcggatgagcggttcgcgtatggacgtggacatcatgtgtgcggtccagcacgtcttcccgcaacccatgctgtctgtcatgtaagaggatccactgtccccggcaatttaaggccggtgaaatccaatagcgcaaggacctaatcgttccctccgcaggtttgacacccacatactggactcggtactgacgcagttggaccaggaccccagtggcctctacagcatgaccgttcgcacccgcattcctagagatcaactcgagtcccccaccccaatcacctgtgcgtttatcctagttggcaccaactacaccaagcgccgggagactattttctatggtaagtacaggtaagcctggataacactttgcttataaggacaagttattcattcatgcatcatagcattaaagtagtaagctagatttgtttgaaatttttaacatctgtccgtttctccatccttatagaaaacctagttttaaagttaacaaaattgaatacataatctaatattttcttctttacagataaggcctcaactatacaacgcaagtggacaacggtcgccgtagtcatgtccatcgcatccttagctctaagcagttagtttggtagtgtcctttttatgtaggctacattcgtttttatgtttggactaggaactttgatactccttaatttttaatagacttttaacggataaacgtaattttttgcggtatttttaaaaaaaagcgcttattttgtacatgcatgtatttgtaaggataacgaaacacaaaacaaaaacaaacaccacaatgcgtaagcaaacgaacccataaagacaaaaaggacaacagtaaagcataacaagaaattcttgtattcatatatttaccacataaataaaatatatatgatagttatatacgatgtataggtctaattgagtacagaaacgctaataaaaaaaatacgaaaagaaacattaaaagtgcattaaaccaaccgccttcgtcgtcgtttttctttgctaaaaaactaaacaaattttaaaattgtatttttattgtaaaattacgctgtagattggactcaagtcacacatataataaaaaaaagtctcagcatgactaattaaatccaaattacttttgtttatggcatctatggattggtttaaatgaagtttgtttttaataattcgttttaatcatgtgggcgttacagggccacagggtgttataaaatttattaacataaattattatttactatttttatgtttgtatattatatttccacgcgtcaaaggcttataagctttaaaaacattgctatttgcggattttacaacagtgcggatgctccgcttcaccgtctgactgtgaatgcaaccctgcgtgcctgttcctgcgcacacccttccagccctgccgaccttccagccttccagtgtgcctatgagtatgcagtgaaaatgacagcagtggcagaggagccatcaacatcaccatcaccgtagacagcagaaacgttgacgccagcgccagacgagagccaaggttcctgccacccagttagcccactcgattggataatcgccgaggatcggaaaacgtgaa

SEQ ID NO: 31598 - DNA, 841 bp, DROSOPHILA
atggcgggctggcgaggacgaggcctacgcgccacgctgctggccgtgctcgcgttactctcggtcactcactcggtgcgcatcaccaacctgcgggtgccacgcacctacacgctgttccgagaccacgaacccgatcctctggtgctcgactgcgaggtggagatcgggccgcgggagcaaggattcgtcctcaaatggctgttcaataaccactccatctaccagtggataccatcggtcaaggggttcgccatgggcttcatgaagtcgaagatagacaccaaaatattcactatggagggcagtcccggtgttatatcgataaagaatcccgactggaacatgacgggggagtacacctgtgcagtgcagaccttcgagtccacggataagcggagtgcccgcctgcaaataatcggtgggtgtcacgaccacggccaaaagaaaaaggatcggcggtgaaagatttcctgaatcggatttcatgctggaagcgcggatgagcggttcgcgtatggacgtggacatcatgtgtgcggtccagcacgtcttcccgcaacccatgctgtctgtcatgtttgacacccacatactggactcggtactgacgcagttggaccaggaccccagtggcctctacagcatgaccgttcgcacccgcattcctagagatcaactcgagtcccccaccccaatcacctgtgcgtttatcctagttggcaccaactacaccaagcgccgggagactattttctatgataaggcctcaactatacaacgcaagtggacaacggtcgccgtagtcatgtccatcgcatccttagctctaagcagttag

SEQ ID NO: 31599 - protein, 154 aa, DROSOPHILA
MAGWRGRGLRATLLAVLALLSVTHSVRITNLRVPRTYTLFRDHEPDPLVLDCEVEIGPREQGFVLKWLFNNHSIYQWIPSVKGFAMGFMKSKIDTKIFTMEGSPGVISIKNPDWNMTGEYTCAVQTFESTDKRSARLQIIGGCHDHGQKKKDRR

SEQ ID NO: 31600 - DNA, 2891 bp, DROSOPHILA
cgctcgaacggctcagcaggttccgcaggtcgagcactaggtcatgactccggctggacgtggacgtggacttggacaaccgggcagctcccgcgctcccgtgcagcttggttcgattaacggagtagtagtgcggctttctgctgaagttgcctaggtacaggtagggctgtcacatcacatcacacgcagttccccgattccaagtgttgggtggtagaaatggagcagtcaggtgggcgaatgaatgtattgtcatcgggcagcacttaccacggagtgtgtggtggtggaaaacattgccaaaactacaaatttcaataaattacaagggcaggctcaggatcgcggccagcagacgacacagctgtaactttacttgacagcgaaaatgtcataatctcgtcgcgtcgtgcgcgttgcatccctggttctggtggtgcgcgactttccacctcttatcaaagcacgcgttctccaattactggcaattttcaaaagtgtattcgtttgtcgactggtggttttgattttattcgatttttaatttggtttatatatctaaactgcctctccgtacagtcaacgctgctgatagtgttgctaaacttacataaatatataaaattttgtataaataaaatgaatgataatcagcgcaaactttgcattctataaaatgtgatttgtttactactaagatcaaatgaaagtctattccaaattttacttatattgacaacaaattccattgtatcaactgtaaatgaatgttgtctttgttatttagttttaacttcttaaagaaaaaggtttttaaccagtttaggatagacaaagagtccctatcgcaaccatcgtgcatagatcgaccatcactagttctggagatgtgcagaagtcactggcccgtttcgccggcgaccagggttggcaaatcggctgcgccggtagttggtccgttatacatttcacaaattccacattaaattgtatcagcatggactccccgctgaacgatggctctcaccatccaccgccgcacgctccccaccccctggtgagtgctctacggtccttaaactgccactacccaaacgtttgcatctatttcaggcggactatcagttttctgcggaggaggtgaaggcgttacgtgagtgcaacactgagtctttcttccagcgcagcctgcctttcggcactggactgggcctgctggcctacttcggcgtcaagaacggctatttgcagggacacgtcaagtacggcgccgtgcccaaggtcgtgatgggcgtcattctgggctactttgtgggcaagttcagttaccagcagaagtgtgccgagaagatcatgcgcctacccaactcccatctgggcgagctgctgcgtcagcgtagacagggcggcggtgtcatcagctccatcacaccggacgagaatctgggcagggccttcactctggcccccttctcgccgagctcggcggacgtgtacagcgatgaggcgtatcagcccgggaggagcacttctctcaatctggacacggaatcgcgccctactttgtccggccttgacgacatctaccgccccaccctggactgtaagctcatctaattcttcgcattccctattatgattctgtacattctccttcccagcagctggttcaatgctggaggcagagttgcccttggagccgtctaagccgggccagtcttacgaggacctgcgacgaaggaaccgagaagagtattcgaagcaccagcagagtccatactcgcgaccttacgaaccaccagttgccgttcaacagcgacccgtggagcaggcacaaagtgaacccgctggaaggaagaaccaatacggcgactcctggactgattaaggtattgttattttgttggacattaaacgcgcataaagttctgtgaaaattcgttgtctatttacatttttttttggggttggaatattcaattactttctagcctggtcgtagttttctatgtaccacttaaccgaggcgttgattgccgtttccaagtccgtaaatgcgtagtctggcaggaaggagcgaagcttggcattagacgcagtctttttgtactgtccatccgacttgctcgtatcacagaccagtcttccctggaataaatcaagttaatatcttgccttgtctcaaatttcgctttttaacccacattaaaattaaatgcttttgcaacggcttgggccacctcgaagatcgtcacctcctgcacttcgtccgcgcttaggatgatgggctccacactttcgtagttcctgagcacccagatcatcagctccgccaggtcccgggagtatacaaactgccgtagtggcatgccgcttccgaaaacggtgaacaccttgtcgttttcggggacgtcagtcttctccgtaaccagctggtgcatcctatagatcatgcccggaataacgtggctgacctctggattatagttgtcgtggggaccgaatatgttgcacggaatgaccgaggtgtacacccggccatatttatcgtggtaggcgtggttctgcacgtctatcagtcgctttgcgtaggagtaaccataattggaggggtgcggcggcccattgtgcaccatggtctcatctatggggtagctggttttgtccggaaaaatgcatgtggacaggcaggacaccaccttcacgcatccctgctcgtgtgccgtttgcaggacattgtcgttaatgagcaggttgttgcgctaaaagtggattcgcatgaaatgggttttggaatcatctgtgagaccaggagctcaccaagaagtccaggttgttgttcatgttgtggaacaggcctccgaccattgcagccagatggatgacat

SEQ ID NO: 31601 - DNA, 774 bp, DROSOPHILA
atggactccccgctgaacgatggctctcaccatccaccgccgcacgctccccaccccctggcggactatcagttttctgcggaggaggtgaaggcgttacgtgagtgcaacactgagtctttcttccagcgcagcctgcctttcggcactggactgggcctgctggcctacttcggcgtcaagaacggctatttgcagggacacgtcaagtacggcgccgtgcccaaggtcgtgatgggcgtcattctgggctactttgtgggcaagttcagttaccagcagaagtgtgccgagaagatcatgcgcctacccaactcccatctgggcgagctgctgcgtcagcgtagacagggcggcggtgtcatcagctccatcacaccggacgagaatctgggcagggccttcactctggcccccttctcgccgagctcggcggacgtgtacagcgatgaggcgtatcagcccgggaggagcacttctctcaatctggacacggaatcgcgccctactttgtccggccttgacgacatctaccgccccaccctggactctggttcaatgctggaggcagagttgcccttggagccgtctaagccgggccagtcttacgaggacctgcgacgaaggaaccgagaagagtattcgaagcaccagcagagtccatactcgcgaccttacgaaccaccagttgccgttcaacagcgacccgtggagcaggcacaaagtgaacccgctggaaggaagaaccaatacggcgactcctggactgattaa

SEQ ID NO: 31602 - protein, 257 aa, DROSOPHILA
MDSPLNDGSHHPPPHAPHPLADYQFSAEEVKALRECNTESFFQRSLPFGTGLGLLAYFGVKNGYLQGHVKYGAVPKVVMGVILGYFVGKFSYQQKCAEKIMRLPNSHLGELLRQRRQGGGVISSITPDENLGRAFTLAPFSPSSADVYSDEAYQPGRSTSLNLDTESRPTLSGLDDIYRPTLDSGSMLEAELPLEPSKPGQSYEDLRRRNREEYSKHQQSPYSRPYEPPVAVQQRPVEQAQSEPAGRKNQYGDSWTD

SEQ ID NO: 31603 - DNA, 2966 bp, DROSOPHILA
gcaaattgaaatttgcataattattgcagcatctttttgaatgtgatgtccctctcagctgcctcccaaatagtttcccccccctttccactgccacctcctgccaaccatcgcctaatttgctcattatgtttagtgtgatgaggcagttagtataaaaaacagaaggaaactcgggcgagaggatgaactccacattaaatttggtttcactgtgctacccgtttaaggaagaaaacttgtttagtggggaatataagagttattttttacagttgattattatttcattttaagattgatcggctgggatattcaaaagctaaaagtgcagttccctgttccctgtttgttttaaataaataaaaaggaaggcaaatttacgcgatgttcaacgaaatagctgtgttaattagctaatgacccacatgcagtttacacagtcattcttcagataattgggacattctttattttgctccccagtgcttcattgagctcattttaaattcagtcgagttaattggacagtcatgcacctgttgctccgtgaactttgcccaggactgacctttccagcggagttcgtgcacatgcattaaaatgccacatgagctcattggggcgaccagcccggccaacagctccgtgatgccacctcactagccgtcccgtcaaacaagctaatttttgatgatatccacaggcgctcaaagcgcaggaggaggaggaggatgggtggtcaggatatgggtggactgacagactggctgcactggggagagagcactaaaagcctgtcgctggctgcaaattgaatcagtcgtcctgtgtttcgtccttcgtccattcgagtgtctgtgtgtgtgtgtgtgtgtgtgtttgtgagtgtgtgagttcgcctggggcgtgttttagtgtccagcgggcggcgtgcgcgctctcatgaaatgtgaccgcaattgcggttcgttagctgcatttcagctagtccgcatccatgtcatggcgtcgtgatgcagcggcgccaccaggagctctgcctctgctccacctgcacgtgctgccgccaaaaaagcaaccccaatggggcggaccatgggggctgggtattccgggggctgtgaccatagccagcatggccaaagcgctgtgcttaagtggtccaagcgaccgaaagcactttgaccatgcggtggtggccaaatccccgacgggcttcctccaatccacacactattctacggcttctaaacaggagccgcacgatatacgagtacttcagtttctgcagaccaacgcaaatggaaaatgaatacctctacgtattctcattaaagacttcaagattttactccaatttattaggcgtttgtaaaccgatgagtaacctaaacctacccacattcgtcatcaattctaaatgctcatggcctccacattccgatcaaatggtttaaagctctgtgagaatcgaatccccagacgaataccaaactgactgggattatttatgttgaaaatatcaaacgtttgaggattgcccaagcacttaacggcaattagccttggggccacacacacacacctgtggattcaggacgtagcccatccttcccgtagccactgagggggtggacactccacctgcgtccgcaatcacagctcaatgctccggccagctcgacgggatttgcgcatcatcaaatgaccaacttgaggtaattaccaacaaagagcaggagacacgcacgcagatattcagcagccccagtccgagccccatcctcacatccttttactccgaagctaccaatccgaccgggcacgcagggaaaaaacttctggcctggcccccgtttggtgtctcctttcagcgccggacaacgtgacaagcatgccgaataagccggagacggagatggagatggagatgggaactgagttggaggcggagaccaagtagcagacccgtagttcgaccgaaggaaagctgcacaatttaaacggatctcgtcctggatttcaaggatatgtcgcattaacaatgccctgacctactgatgagtgccaaatgagttgttagaggaatggcatggaggcgggagcccaagtttccccagcccaccttgcggcactgcgagtgttggtcctttggggtatgggcctgcgacttttgttgccaaactaaatattgttaggcaaagtaaacgacgttgtagactttgtgccaacggaggctgccaagacagaggcgtttgccaggggatgcaagggtcttggttatacttcttatatccgagcaaaggaatcatggcaaaatatgtacgatttattaaaattgattgatgatactataccacttttagtttttactaataatatcttatttacaaaaccctaaatacatcagaactcagagcttccacattggattgcgttaaagaaaatactaccaaagagtattcctaattgatacccatatcgaaaagaagcaaatataaataaatacattaagagttgctgggaaatgttctaaagaatcccaaacagctcaaagatgcaacggataagaaatgacgagcatcctgttaattccctcatctcaattttcgcatcagctggaattcgccctcgcattttcccccctgtggaaatttgcgttggaggtctctgctttcggcgtgctttttccaaggacctgggcgagtgcctcacgtctattaccgttaaccgaaacccaatgccattgcggccattcaagtcgacatcctatcagggcggctgctccttcgggggcacctgccgccccacccttccctttcgccagcacctgctgcttggatttctggcctggcttcttctattggagatttccttcctcattttccgtctgttccttatgtgtgggtgcgtttatattctgttccttttttcccaccattatgaaactgaagccgggctgt

SEQ ID NO: 31604 - DNA, 489 bp, DROSOPHILA
atgtcatggcgtcgtgatgcagcggcgccaccaggagctctgcctctgctccacctgcacgtgctgccgccaaaaaagcaaccccaatggggcggaccatgggggctgggtattccgggggctgtgaccatagccagcatggccaaagcgctgtgcttaagtggtccaagcgaccgaaagcactttgaccatgcggtggtggccaaatccccgacgggcttcctccaatccacacactattctacggcttctaaacaggagccgcacgatatacgactcaatgctccggccagctcgacgggatttgcgcatcatcaaatgaccaacttgagctaccaatccgaccgggcacgcagggaaaaaacttctggcctggcccccgtttggtgtctcctttcagcgccggacaacgtgacaagcatgccgaataagccggagacggagatggagatggagatgggaactgagttggaggcggagaccaagtag

SEQ ID NO: 31605 - protein, 162 aa, DROSOPHILA
MSWRRDAAAPPGALPLLHLHVLPPKKQPQWGGPWGLGIPGAVTIASMAKALCLSGPSDRKHFDHAVVAKSPTGFLQSTHYSTASKQEPHDIRLNAPASSTGFAHHQMTNLSYQSDRARREKTSGLAPVWCLLSAPDNVTSMPNKPETEMEMEMGTELEAETK

SEQ ID NO: 31606 - DNA, 2435 bp, DROSOPHILA
agcagccgtgtcttgcaccatccttcagcttttcactggcaacttttcaccatttgatacttttcggtttgatttaaattggtttcgctcaagagtcgctcggtgtgatttgttatcccttttgcggatgtttgtcatggttacggatgagcaactaataaagatttccagcatcccagacttattgaaaacgttgtgaaggagatgggagagtccccatacacactgtaactactattgtagatatttaccaaaccaagaagtacctttgaaagaggagcttcctcacttgatcatcctgtattttaaaatcatatattttcagtggcaaaaaaccgtaccagatgtttcagcttccacgccgatttcatttggcctacatgatgggatcctaggctcaatcatcccaagcaatttgtgcaaatcccttctcattttgacttcataatccttgcaaccaaaacaaatagacgattatctttcacggcttgtgcgtgaccatgatgaaagggggaaaggcttctggatggttattaccaactgtccaaattgctggagatttgctgccacgccccagcagttaagagagcaaaagccaaagtgggaaaccaatcgcatattcagagagtttggctttcgtggcatacggacaagtgacaatcatcccacttaattgaattctgcgctgcataataaatcaacttaatgcgatccaagtacccagtcgagttcctcgcggacgcgaagccattcaaaatggagagcagggaaatcctttggctgcggttataggtagctcgagcagatccagcggcaaataaacaacaataacacacgatgcccacttttccacccgcccagtaatttccacacttgtgctgacacattgaaagggctttgggttttatttatgaattgagaaattgacgtcctctgccgagcggagtggagtggaatggactgggttcccgaggaggcttaggcacacggtgctcgatttttattgccgccaaacaagaggcttaggcacaggcatcaccaccactaccactaccaccaccaccaccaccaccatcatcatcgtcatcatcatccacatcaaatgaacaaaactgaatgaaatgagccacgaaacattggtgtgtggcacttgctgtttgtcccaaccctctggtacaaaaaaaagccgggataaatcgagcgtgaaatattccagctcgtccggaggattgcgatccggatgcggggcagtgaggatggttaaatcgaatccattgttgtgcttgccacttgttggcaggttggagaacggagatcccgaaacagaatttgcggctgcagttgtgcaatttgctcgctgcctgctgtgatttttcccattgtcctgggcaatcctggggtggcttgcccgctgattctcgacgtccttgtccatcaaattgagcgtcacttaagtattcaagtgcctgtatgtgtatctcccacgaccagagccccagcctgacttgttttctgcgccttcagatacttcaaagatttaataatcacataagaagtgaagctattaaacctgccatccctcgccattctcgaacttcttacgcggcctcaagtgtttgcctttgcgatccagcaggtgccaccgaccctcagatgccgtccaccgatgcaggatgcgacaggatgcgccatctcaagcgcaaattagaggggatccccttcgtaagatgtacacttgtcgaaggacataaccactttcttaaattagtagttgttggaaatgtcgtacaggtgctgaaatatttcgatatatacagataatgataatattaataaacaaaataataattaaataataattagatgctgccatagccattttgatttacttgaatatcaaatgaagatatcttatgacctctttttgttcccagtgcataatgaaggcggaccatcgtcggtggctagcaactgtgtcctttgtttgagccaaaagtggcgattgtccttgccgaatccttgcagtcaaagcaattcaagtgtcaaatcttttatttgccttttgcagatttcgcaataaagatttgtattgtcaaagtctgggttcagccaagccagagaccaatcccgaatcggtatccgcagtccttacccctcctgcccactgagcgctccgtttcatccgcttggcatatcctttgccggcttgcttgtgtgcaataaatttgctgacaaaagagggattattgctggatcatgccgctgttgctgcagcgcgggatgaggacgcaggatattcatgtagatatatatagcccggagatggagctggcggtgaggctgagcaggatgtgctcctggtggctggttcctgtcagcgtgcattcctcggcgttattgtttggccataagttaattgttcccctgcgaaagct

SEQ ID NO: 31607 - DNA, 435 bp, DROSOPHILA
atggacaaggacgtcgagaatcagcgggcaagccaccccaggattgcccaggacaatgggaaaaatcacagcaggcagcgagcaaattgcacaactgcagccgcaaattctgtttcgggatctccgttctccaacctgccaacaagtggcaagcacaacaatggattcgatttaaccatcctcactgccccgcatccggatcgcaatcctccggacgagctggaatatttcacgctcgatttatcccggcttttttttgtaccagagggttgggacaaacagcaagtgccacacaccaatgtttcgtggctcatttcattcagttttgttcatttgatgtggatgatgatgacgatgatgatggtggtggtggtggtggtggtagtggtagtggtggtgatgcctgtgcctaagcctcttgtttggcggcaataa

SEQ ID NO: 31608 - protein, 144 aa, DROSOPHILA
MDKDVENQRASHPRIAQDNGKNHSRQRANCTTAAANSVSGSPFSNLPTSGKHNNGFDLTILTAPHPDRNPPDELEYFTLDLSRLFFVPEGWDKQQVPHTNVSWLISFSFVHLMWMMMTMMMVVVVVVVVVVVVMPVPKPLVWRQ

SEQ ID NO: 31609 - DNA, 2315 bp, DROSOPHILA
gtcttttttctttgtgcaaccgcccagaaatctcaataaaagccacctgagcagcgcagtaattgaagaccaaaccaagcttaacatcagattgcagcctctgtagatgtgctgttaagtccgaaatcaatcaaaatgtgcaccgctggcgtggttgatggtggtgctggggccactacaggtggtgctgatgcggctgataatagtggagctgcgcccgccccaagttcgacggccttgaaccccccacaggtaaataacacacgactatgctcacctactcgcacgagcgtggtcaacatatgtacattttttttggggtttcgcgcttgattcgctttgttgttccatgggtggatcccccggccctgtcccgtcgctcccctcgctgccaaactaaaccttatctgacgacaaaataatactcacgttgccatcaaaaacaaacatcgacaaaaaccgctgaaaaccgaaaccagtttacttttggtccgccgatttaaccgggactaggtctgggtctcgaatattatgcgatcggtcatctgtgcggatagagctcataatcaggttttatataaaagactagtgcagcctaaagtaagtctttcggcggagttggtcagaaactatttgaaagtcaagatcagggtgacttcgaatggttttcaatggaggttatggaaataaattgcttttgaagtggggaaacaggttaaaagatctgattttaagctaagtatgtttttcttgtggtgcacatcatcaatagttttaagtgcaaaagatcatttaataaaacctaaggtcgtattaacgaagtttcgtcacagaactaaatgaaatgaaatctgatcatgttcaaattcaatgttacattacttctgcgaaccaactgtcagtttaacaaaaaatagacaaaacccataaacaaacaggcagacagccgaaccattgaagcgccaagggtcaaaagagttgagcttgagatttgaataccatgatgacgggcaccgacgatagtccgttggtggaggagggcggtccgaaagccaaccagtatcgactgaccatttggcacaaggtaatctgaagaccacggacacacacagagagatcatagaacgtactatacaatatatctattgcaccacataattaggttgtgttctttatgctgggactcatctcggcgctgaccatctgcgttctggtcagattgtcgaaccgattggcctccgatgccgaaaagaaggccttgatgcacttccgagaactttcatccggccggaatggtcaccgctttggccactagatgttgttgtttgtccacataccactctatatattttctgtgtgtttgcttttcactgttttggtttgtttgtttgcaaattgcttaaataaagtgctaattgattgatgcgggttgggttatggaactacggtggctagagtgcaaattaaacaacaagcaattagctgaagatcaggaaaagctttgaatcaacttcatctggaggtgtcagacccggggggttattctatttgctatctaagacccgtatcgcctatgtgggcttacgcggcgtatgagtgatgcagtcgttgttctccttctcgcagttggcaatctaaacacatgcatctttactaaaattgtgactttgtaggtctccatttccatgaacgaaccggaaaacctgaaaccacctgccaaatccaacttccgccgttatcttcagtggatcctagcacctgtcctgaccgccatttccggtctgatcctctactaccaagggccttggtatggagtggccacgctatatgccgcattgatatccatactgctggtgcgtccaggatggcgctggttctacattgcagctgttaccacacccagggatactgtgtaagtaacaaggattgggaagttagttccagagtttttttaaaactgtattccttagagccctctttgcctacatccgtgtgctgctcttcattaagcgccaggagcgcaagaacctgaacatcggagacatctttgagtcaaatgtggcccggcagccggataaactggccattgtcagtgagtcccagcagtggaccttccgccaggtgaacgagcattcgaaccgggtggccaacgtgttccacagtcacggctacaaaaagggcgacgtggtgggtctgctgctcgagaatcgcgccgaatttgtagccacctggcttggtctctccaagatcggcgtgatcacgccgctgattaacacaaacctccgtggagcctcactgcagcacagcattaccgt

SEQ ID NO: 31610 - DNA, 237 bp, DROSOPHILA
atgatgacgggcaccgacgatagtccgttggtggaggagggcggtccgaaagccaaccagtatcgactgaccatttggcacaaggttgtgttctttatgctgggactcatctcggcgctgaccatctgcgttctggtcagattgtcgaaccgattggcctccgatgccgaaaagaaggccttgatgcacttccgagaactttcatccggccggaatggtcaccgctttggccactag

SEQ ID NO: 31611 - protein, 78 aa, DROSOPHILA
MMTGTDDSPLVEEGGPKANQYRLTIWHKVVFFMLGLISALTICVLVRLSNRLASDAEKKALMHFRELSSGRNGHRFGH

SEQ ID NO: 31612 - DNA, 4600 bp, DROSOPHILA
atttatatagtaaccaggtagaatttagcccctcaatctactaagttagtacctgtcatggggtcaaaaggtcaaaaagggttggtgagaagtttagtaaacaaggtcataaatacaaatccttttgttttgacacggctttgaacttcgagcttgtgcaaacatgtctaatcgggcattgttgcgcagaaaaaagggttcattaaagtgaaaccaaaccgctaagttggttaattcgtgttgctaaagatatcactcctcgctctttattatcaacaattttagatctaccgcttgagtttgcttacacttatgggaattttattggttggaatgctcattttcaatggaagtagattattaaacaagtactactgcggttagtgtaggctgacacctggtagaaagaggttctctgcgccaagatattggataagctagttaagatctatcatgaatacgatagtaaatggcaaaattattcaatcgaggatattgctgcttcagtttgatttgacactgagtaaataagtaataaagatcaaatatgcaatgaataaagtgatcttttaatattaaatacagctaaagagtcttttaactaggatattacttatttttcaatacagcagcagaacagtctcaatagaaaactggccatcaaagctggttatcatagccatgctgatttggatcgccctgcggactaacacttttcctaattactatttttgcgatgggaaatacgagctaacaacttcagttggactgcgaaacccttcaaagacggtctattcggttaccaacaatgaagcggataggtcaagcgtataacgtatacgccgtgttcatcggcatgacgtcatacgaaacaatgggtggaaaattcaggcagtcgcggattactcggatatattgcttgcttataaatgccatcttcttgactttgctaccgagtgctttctggaaatcggccaagcttttgagtacggcggactggatgccttcctacatgagggtcactccgtacatcatgtgtacaatcaactatgctgcaatagcctacaccttgatctcaagatgctacagggacgccatgttgatggacttgcaacgcattgtgctggaagtgaatcgggaaatgttgcgcacgggaaagaaaatgaactcactacttcgacgaatgtttttcttgaaaacatttacattgacctactcgtgcttgtcgtacattctggcggttttcatttaccagtggaaagctcaaaactggtcgaatctttgcaatggactcttggttaacatttccctaactatcctgtttgtcaacacattcttctacttcacctctttgtggcacatagccaggggatatgactttgtaaaccagcaactgaatgagattgtcgcctgccaatcgatggacttggagagaaagtcaaaagaactccgcggcctgtgggctctgcacagaaatcttagttatacagcacgcaggataaacaagcactacggtccccaaatgcttgccatgcgatttgattacttcatattctccatcatcaacgcttgcataggcacgatttactcgactaccgaccaggagccctcgcttgaaaagattttcggatctctaatttactgggtgcgaagtttcgatttctttctgaacgactatatctgcgatctggtcagcgagtaccaaatgcagccaaagttcttcgcccccgaaagcagcatgtccaatgaggtggctcgatttgaagtcttttgtagtaaacattccttctaaagttgattcccattttcagttgagttcttacttgatctacgagagcagcacgcgattggatctgttggtctgcggactctatcgtgtcaataagcggaaatggttgcaaatggttggctccatcgtagtccactcaagtatgctgttccagttccatctcgtcatgcgaggtggtctctagtactgcaaataaatatcaataaatttatactccgtacgtccgacgttttttactgcacatttttgggtcgagtgcttatttgaactattaagattattgccagatagaaatgacattcaaaagataacctccatactggaaaagtcagactatcatgatcgcctttcgttcgtgtgacttatgcggtaacattgtctattctgttctccagatcagaatgcttaaaggtctccgaatcgaatcagtttcctccacatggccgatggcattctatgtctgtttatgctcctggtgcagtttcttttgattttcagtaattaacctttgtattgtagttcattcatttggttaatgcccttcgtatcagtatcatttccgcatttcaatcttactttcaatcaaatcgggcacgagggctcattagccaagcacttgtcatcagttcattctacaaactagtgcacaaaggacgtcgtcatggtttattggatgattaaattgtatttccgctactcgctagcaattggaattacatcacagcaattttcgaatcgaaagtttttcagtaccctattttctcggacgtatgctctaattgccaacatcgtgacgctcatcatgttgcccatcgtgatgtggcaggttcaattggttttccagcagaagaagacctttccaaagctcattttgatcaccaataacgtgagggaagcggtgtccttcctggtcatattgtacacagtgctgtcgcgaggatttcgcgatacagcgtttaaggagatgcaaccattgctgctgacgctatttcgagaagagaagcgatgtggctttaagggcataggcggtgtacgaaggtccttgcggattcttctgtttgtgaagttcttcacgttgtcttggctgtgcgtcacagacgttttgtttctactctactcgaccgatgcgttaatctgggttaacgtgctcaggttttttttcaagtgtaataccaacaatattttggaaatggtgcccatgggctactttctcgccctgtggcacattgctcgtggcttcgattgcgtcaacaggcgtctggaccaaattgtgaaatcgaaatcgactagaaaacacagggagctgcaacatctctggctacttcatgcctgcctcaccaagacagcgctcaacataaacaagatctacgccccccagatgttggcctcccggttcgataactttgtaaacggtgtaatccaggcctattggggtgctgtgttcacctttgacctctccacgcccttcttttgggtcgtttatggaagtgtccaataccacgtgcgctgcttggactactatctcatcgataatatgtgcgatgtggctgtggagtaccacgattcagccaagcactcgtggagtgaagttcgttggacaaaagaagtatctgcattcggttctattctattgtacatatgtatgctcatgcaacttctttcatttcagataagctcctatgtgatctatgcgaatagtacgaagttgcaactctggagttgtgggctttttcaagccaatcgcagcatgtggtttgccatgataagcagcgtgttgtattacatactagtgctactgcaatttcacctagttatgaggaagtaattgtagttgctgtattaaagtatgcaccattcttaactaaggaatttgatttatgcgtttgtaagaaactattttctggcccgaaacaattgtaaatgcttccgggcagcaaaatcgttctgttctgcgacagccaataattcctattcgataatttccaaatgaatgcgttcagcaaataaattcagctttgacagccactcgctgttgaaatttaaaacgaaatcacgttttgctgttgcatactttttggcgtatgtacatctgctctacgttgtacgtgatgaaagttgcgtcataaacacaggcacacaacacagtggcgaaatgctagaaatggcagcaggtgaatcgggtgagtttagagttaagggaggcataaataaaacgaaataaaataaatcaaagcataatttttgcaataaattcgttgctaccaaacgccgaatgtaaatctaattccttctgcacgcaatacgtgcatccaagttgtgctctgtttcatttctggaatttaaagccatttttgccttacaatcggcttatcggacgcaatcgttttattaaaaatagtcaactcgaaatgaaactgaaaataattaagctacagtgtttgcatagaaaaacaatcgctctctctttttcaactaatcgagtaacatggatttatttcgataagaatttgtaaaaatcttagttgtattaccagattttaatatagccataattttctattaaacgtagaaaacagaactggtttaataacgccttctatatttcaaactcaagtgatgacgacatacatattgaacccattcaaagtgaggcgacttctggcggcattccctataaatatacatattaacatgatttaaattcgcatcgaggcacgtcaacacaattatgttggataacaagagtcaagatttatgtggcccgaatcgagcgggcaaacatatagacgcacgtaacggatgcgtcgcctc

SEQ ID NO: 31613 - DNA, 1770 bp, DROSOPHILA
atgccttcctacatgagggtcactccgtacatcatgtgtacaatcaactatgctgcaatagcctacaccttgatctcaagatgctacagggacgccatgttgatggacttgcaacgcattgtgctggaagtgaatcgggaaatgttgcgcacgggaaagaaaatgaactcactacttcgacgaatgtttttcttgaaaacatttacattgacctactcgtgcttgtcgtacattctggcggttttcatttaccagtggaaagctcaaaactggtcgaatctttgcaatggactcttggttaacatttccctaactatcctgtttgtcaacacattcttctacttcacctctttgtggcacatagccaggggatatgactttgtaaaccagcaactgaatgagattgtcgcctgccaatcgatggacttggagagaaagtcaaaagaactccgcggcctgtgggctctgcacagaaatcttagttatacagcacgcaggataaacaagcactacggtccccaaatgcttgccatgcgatttgattacttcatattctccatcatcaacgcttgcataggcacgatttactcgactaccgaccaggagccctcgcttgaaaagattttcggatctctaatttactgggtgcgaagtttcgatttctttctgaacgactatatctgcgatctggtcagcgagtaccaaatgcagccaaagttcttcgcccccgaaagcagcatgtccaatgagttgagttcttacttgatctacgagagcagcacgcgattggatctgttggtctgcggactctatcgtgtcaataagcggaaatggttgcaaatggttggctccatcgtagtccactcaagtatgctgttccagttccatctcgtcatgcgaggtggtctctataccctattttctcggacgtatgctctaattgccaacatcgtgacgctcatcatgttgcccatcgtgatgtggcaggttcaattggttttccagcagaagaagacctttccaaagctcattttgatcaccaataacgtgagggaagcggtgtccttcctggtcatattgtacacagtgctgtcgcgaggatttcgcgatacagcgtttaaggagatgcaaccattgctgctgacgctatttcgagaagagaagcgatgtggctttaagggcataggcggtgtacgaaggtccttgcggattcttctgtttgtgaagttcttcacgttgtcttggctgtgcgtcacagacgttttgtttctactctactcgaccgatgcgttaatctgggttaacgtgctcaggttttttttcaagtgtaataccaacaatattttggaaatggtgcccatgggctactttctcgccctgtggcacattgctcgtggcttcgattgcgtcaacaggcgtctggaccaaattgtgaaatcgaaatcgactagaaaacacagggagctgcaacatctctggctacttcatgcctgcctcaccaagacagcgctcaacataaacaagatctacgccccccagatgttggcctcccggttcgataactttgtaaacggtgtaatccaggcctattggggtgctgtgttcacctttgacctctccacgcccttcttttgggtcgtttatggaagtgtccaataccacgtgcgctgcttggactactatctcatcgataatatgtgcgatgtggctgtggagtaccacgattcagccaagcactcgtggagtgaatgctactgcaatttcacctag

SEQ ID NO: 31614 - protein, 589 aa, DROSOPHILA
MPSYMRVTPYIMCTINYAAIAYTLISRCYRDAMLMDLQRIVLEVNREMLRTGKKMNSLLRRMFFLKTFTLTYSCLSYILAVFIYQWKAQNWSNLCNGLLVNISLTILFVNTFFYFTSLWHIARGYDFVNQQLNEIVACQSMDLERKSKELRGLWALHRNLSYTARRINKHYGPQMLAMRFDYFIFSIINACIGTIYSTTDQEPSLEKIFGSLIYWVRSFDFFLNDYICDLVSEYQMQPKFFAPESSMSNELSSYLIYESSTRLDLLVCGLYRVNKRKWLQMVGSIVVHSSMLFQFHLVMRGGLYTLFSRTYALIANIVTLIMLPIVMWQVQLVFQQKKTFPKLILITNNVREAVSFLVILYTVLSRGFRDTAFKEMQPLLLTLFREEKRCGFKGIGGVRRSLRILLFVKFFTLSWLCVTDVLFLLYSTDALIWVNVLRFFFKCNTNNILEMVPMGYFLALWHIARGFDCVNRRLDQIVKSKSTRKHRELQHLWLLHACLTKTALNINKIYAPQMLASRFDNFVNGVIQAYWGAVFTFDLSTPFFWVVYGSVQYHVRCLDYYLIDNMCDVAVEYHDSAKHSWSECYCNFT

SEQ ID NO: 31615 - DNA, 2519 bp, DROSOPHILA
ctcatctggttctgacaaaattgggtgtcaagtgttggtgtgctggttccattctcgctaataaatcgctaccatcgaaaaccaatacaatatccacacaatatccccatcaccatcaccatcccctcgggaagaccagttttggagtttggggttaacctttccgcagactcacgcatctgttgtgggattttgggaatcactcgtccaaaatatcgcgttcgtattagcataaaataaaatacgataaaatacaaacaacaatttcgaataattataggtatacaatttcgccggactttgtttttcgcctatcacattcgcttagtcacaaacactttgtattccatttaatatacattatgctaatcaagccagtcattaatgggtttccattcactgtttttttttttttgcatcaaaaaaaaaaagaaatgtttttcaccggctttagtctgtttatttctaatttgttttttttttttttcattgcccaaggggatattttatttgaagaacctatttgcgattcaagatttcatttttgataacctacttcaaaccatcaactgtctttcatcagtactccaaacaattaataatgatttttttgtatatgtgtgtgtttaattaagatgagtaaaataatccatttgtggagttgcaaaaacctgtgtaaatgcgatatgtttatttacagaagaatgactaagtcaacaatttaaccctgacttatgataaacgtttgtccaacagttttttgtaaacaaacaattatatcgacctccatcccaccagctggagttcaatccggttctgaagatctattcaagtctggctagcaggtcagaaatcagaaattcataaagtaggcttgaacagacagctgaaaaaaaaagaagacgaaaacttattcaaaatttccgttgtgatcgaaccgcgagacatgatgttggccgatgaatttgaaacgatgtgcaagaattattttgtaaattccatgactcacgtctgctcgtccctcgtcccggaatcgctgaccaagaagtatcgcaatcggctgatcattcccaaggatccctacagtatcttcaagctgaacagccggaattccagctatctcctcgccttccgcttcccggaaatgcgcaattgccgaaaactctggatgtcggatttgcgcaatctaaattgcgagattaaaggcggcaaaatgaagaacttcttcttcgccaatagctaccgcaagtgctacaactttgccatggacctaacctcggagctaaaggcgcactgcggcgccaagaacaatgaggaggatacgcagtcgggctactactacacgaacttcgacgggaatccggtcattcagaccaactcaactgcttgtcttttgctgggaacttcaactctggtactctgcctgatcatctcgtttctaatgttcgccattctgcaatggaaggcatctcggctgcgaggcagcaagtcagtccaaggcggtccatgtgaatcctagtcaatctcttttgaaaatcttctgacatgaggagttagtattcctgggatatgaatgcctttaaggccttgtggatgagatttcaaagttccgattaccacagtctttatcaaggatgtgcagatatcaatattcttaaactatacatttggcaaaaggaattgtcttccaaatcgaacatgtcgttctgacacgcttcgcttgagttgtaatttgaaattttgcgagatctagaaacaatttctatgtcatctggagaaatcgcttccaaatcatcggaaaatttccaatgacagctgaaataaaaattatatgtctgtaattactaaatgattatttgattttttatgtttagtaagtttgaatttaacatctatttagttgtaacatttttctagtctcgtttttatagtatttttcatgtgtgattattacctcagttttaatttacccttctcgatttcaatggcgccccttttttatgatccgagtgatgtatccatcatcgtgtggcatatttggacaggactcaaaccgaaagatgtttatggtacacaaatcttgtgcccgtggcggcatggaacttaagaagctgtcaccgggatcctccccttcatcatccaagatctttgcatcgcgtttccctttcatctgacaatgttgcccgtgtcatctactttatgccacatgggggcgactccatctgcgtggatgctccgttcattaggtctcttataaataattgctttttaacagagacagaaattatcacctaattatagagctcgtcatgggggattccaaccgtcactttggggtctctgctgtatccactgattaacggtggttaaattagcactcttattaactatttatcagttatccaattgtatctacacgtttcttacgagcaagcgagtttccatgtaacataaaagtgggtccttgattaatttgaactgttcacctcagctgctttctgtggagaggagagtggaac

SEQ ID NO: 31616 - DNA, 519 bp, DROSOPHILA
atgactcacgtctgctcgtccctcgtcccggaatcgctgaccaagaagtatcgcaatcggctgatcattcccaaggatccctacagtatcttcaagctgaacagccggaattccagctatctcctcgccttccgcttcccggaaatgcgcaattgccgaaaactctggatgtcggatttgcgcaatctaaattgcgagattaaaggcggcaaaatgaagaacttcttcttcgccaatagctaccgcaagtgctacaactttgccatggacctaacctcggagctaaaggcgcactgcggcgccaagaacaatgaggaggatacgcagtcgggctactactacacgaacttcgacgggaatccggtcattcagaccaactcaactgcttgtcttttgctgggaacttcaactctggtactctgcctgatcatctcgtttctaatgttcgccattctgcaatggaaggcatctcggctgcgaggcagcaagtcagtccaaggcggtccatgtgaatcctag

SEQ ID NO: 31617 - protein, 172 aa, DROSOPHILA
MTHVCSSLVPESLTKKYRNRLIIPKDPYSIFKLNSRNSSYLLAFRFPEMRNCRKLWMSDLRNLNCEIKGGKMKNFFFANSYRKCYNFAMDLTSELKAHCGAKNNEEDTQSGYYYTNFDGNPVIQTNSTACLLLGTSTLVLCLIISFLMFAILQWKASRLRGSKSVQGGPCES

SEQ ID NO: 31618 - DNA, 2783 bp, DROSOPHILA
cgagaatatggaaaaatagccagggcaaaaatgtatcacagcagcaaaaagttgcttaaaagttaaataaaccaatgtttaatgtttaataaagttaccctaccaccatttttatctaagcccgtttaacatttaaagccctgccgatttatgtgaaattgaaattaaatttatgtgcatttcgctgcattttcatttcactttccacgctccaagtttagtactaaaaaaaaaaaaaaaaactggaacagcaatattcgtattcccattttttggctgccattattatttttgttttcattgcatttttttttcccgttttcattctgtttgtttttcggcgtcgcagccacttccgctcgaacaaaaaaacaaaacttcgggcttttgtttcgaattttttccattttcattttggaatgggcaatgggaatatttatacgtcagcgcctgcctttccacacccaccgcctccttagatattaccctcgtctgttgtgtgtgcttcttttttaatttggagcaaaatgtcaaaaagttacagaaaattaagtaaacaaactataaaagcagattataaagacccataaacataaacaacgagagcagcggagaggtgctcctcgagatatgcaaatgaattcgaataggaaatccgagggaaactaacttcaaccgttgataacttcattaacaaattggatccgagatgcgccgaactaatggcagctagttgtaaattattcgtgaatattcatggagcgaaaaacgctccgaaaacactttaaaaggcgtctcataaatttctcggcccgactgttttttttttttttaataccattatacaaattatttattccctgtggactgtgaaattatttatggcctacggaaagtgatttttgcatttttaagtgagctcaagcatttgattccatttgggagaagcagcctttgcttgtgagataatatatctaaattccaagtgagaggatataaaatgaccgaccattcagcccatccaaacgaggaggaggtgatcggggacatctacttgtccctactctcgcgacatgcccacagatatccagaggatggaagccacaagtcgtggatccttccgcgcatgatggttctgttcgccagtggggatatggatcaggttatagaggccatagtctcggacatgatccatccgattggtactggactggtggccagtgttctggtcgaggagtccatacgggacgagatgattaagagaatacgagccaacttgaagccgatgagcgagcgcatccaacaccatcccaattacctgaagacagtgaagctcatcgatcgaatgaactgctccaccattcacatcgaggagttcgaggagtcggatacgaagaagcgttatggtcgccggatgaagggatcccctttgatagtcttggatttcccccaattctatttcggtggcaagcccacggccataatgactatgagcacctttcgcaatatgaatgaagtggttaagttgcattcgcgcgaaggtctgaatttcgactgtattaccgtgtggtcagccaagttggcccagtgcttcgacctgctcaccagggtgcccacggtggaccagtggaccttcaactgcaccaaggaatccatcaaggttccaaaactgccagctcaaccgaccaccacagttataatcgttaagaacattcactatgaagtccacgtcattggcggaaagatcaaaactatagcgtttccaatcgtagatacttcttgagctgagcttttataaatgcattccacggcaataagacacgctttcgtcctgcttttgtaatttagcgattggaagggagctgtgctgtacccccactgcgattgctgacttttcctggaaaatccacccatcaatcggttggagaatatttatgggccgaatgactctaatttgtaaatctcaaacccatcgaacacacacacgcgcgcgacagataatttgtcagataatggctcatctatcagtttttgacaagattgatggctagataatgcgattgataaatctccattatttttcagcatcctttctctccattttccttgagttaatttaaaaggcaatcggaatgcgggggggcgattttccctccaccgttgagacaatgatttgattttggccatgtcacttgccatgtcatcatcccttcggagaggtgatttccctcctgttttccacacgcccaccatttatcatggctaaggaggaaggtgcacaaggaaaaatgtttgcatttacttggcattgaggaatgccaggaattggtttgtccagctaacaagtatttaacgtgtaatatgacatgcaactctagatcattattttaattagcattttattgtttgggatgagagaagaagagaagagtttgtttcagtgtgcgccacagccatcagctaagtaagtgactctcatgaaatcgaggtttatacggcaggggcaataaaagtgccccattgattggcatcatctgtcggttggaattctagcccaatcacacacactggcccattaattccaagtcgttttcagcccacattgtgatggaaatgaggtgacagttagtggcccatcgaggtgtgatcgttaacttggccataagccagaaaaaaggggttaaaagcatcatcgaattgatttaaaatctgatttttataaacgtctcagtcttaagccctttagtagtaacaattaaccgaggttatctccaaatctaaac

SEQ ID NO: 31619 - DNA, 783 bp, DROSOPHILA
atgaccgaccattcagcccatccaaacgaggaggaggtgatcggggacatctacttgtccctactctcgcgacatgcccacagatatccagaggatggaagccacaagtcgtggatccttccgcgcatgatggttctgttcgccagtggggatatggatcaggttatagaggccatagtctcggacatgatccatccgattggtactggactggtggccagtgttctggtcgaggagtccatacgggacgagatgattaagagaatacgagccaacttgaagccgatgagcgagcgcatccaacaccatcccaattacctgaagacagtgaagctcatcgatcgaatgaactgctccaccattcacatcgaggagttcgaggagtcggatacgaagaagcgttatggtcgccggatgaagggatcccctttgatagtcttggatttcccccaattctatttcggtggcaagcccacggccataatgactatgagcacctttcgcaatatgaatgaagtggttaagttgcattcgcgcgaaggtctgaatttcgactgtattaccgtgtggtcagccaagttggcccagtgcttcgacctgctcaccagggtgcccacggtggaccagtggaccttcaactgcaccaaggaatccatcaaggttccaaaactgccagctcaaccgaccaccacagttataatcgttaagaacattcactatgaagtccacgtcattggcggaaagatcaaaactatagcgtttccaatcgtagatacttcttga

SEQ ID NO: 31620 - protein, 260 aa, DROSOPHILA
MTDHSAHPNEEEVIGDIYLSLLSRHAHRYPEDGSHKSWILPRMMVLFASGDMDQVIEAIVSDMIHPIGTGLVASVLVEESIRDEMIKRIRANLKPMSERIQHHPNYLKTVKLIDRMNCSTIHIEEFEESDTKKRYGRRMKGSPLIVLDFPQFYFGGKPTAIMTMSTFRNMNEVVKLHSREGLNFDCITVWSAKLAQCFDLLTRVPTVDQWTFNCTKESIKVPKLPAQPTTTVIIVKNIHYEVHVIGGKIKTIAFPIVDTS

SEQ ID NO: 31621 - DNA, 2387 bp, DROSOPHILA
tcgatatttaatttaagcgccactgctggttaagcacttgtttgctggccaaattttccaaaacatttcacttcacgcggccagagaccttaaaccaccgtcaagctgcttatgttgtttgcattttgttaagcaaaaaattaaataacagcacccacacacacacacacactcgtggccagaggggcggtaagtgctattatttgttatttggtaaacgcaacaaatgaaccacccatgtgcaagggaacatggagctggttgcatggaactgggagcagggagcagaggacccgcagaacgaccgcgacggcagtggcaaaaacagcaacaaatagcaatatctgccaggacacgggaaagaggacatggggacctgcatccaggcgtggcatcataattaattcaaatttgaatttccttttggcgcaatgcacgcgccattttacatgatgggtggcagtgccacgcccacatgtgtggcatgctatgacatcggggctccggcataataaactgtttaaatatttagtcgaaacgagtttttaatactcgctagcgcttttagcagctgccagcggtcagtgaatgggtcctcgtgggttttgggttttgattgggtcaaaaagtcgttgaagacactgaaagcagatcctttggccacaccgatagttttcagccaagaaatcaagaaatactgcgagaagaagatgcaccagttgaacctgaaacctattattattaactatagttttcttgtatacctccaaatgctaagttccaatttggttttcatctaactctttttatatcgaaatacttgaagtaggggaacattgtgctttagtgttaccaaggcaaatttaaaatttgtatatctggtatatagccaatcgaccgacagccttacccttttgcacattcatggaaaaccctaagagcccagtaagtaaccttttcaaatcagtgaaaagtggaataaaatattgatccgttgcagatggccaacgatcccggtaagccggaaaagtccaggccacgcttctgcaccctgttgaaccatgaggtcgtcgatcccaaagagttcatggtgcacttcgccaagcggaggaagaatgaaatcataatccagggtcaggtctgcggttggtgctacaacatagattacttaaaagatgaaaaaacaaagttcaagaagaagcggcccaatctttcggatgcgagcgtcaccaagcagcgcgccacctcaccacgaagaggagcaattgcagacaaccctcgtcaattgggtggtgatcagcactgctcggaaaagagttttgcgccctctggtgacgaaatacccacaccacgtgatttgaaggacaaacctggtgaccttgcctaaggtccgatactgaagtggccataaagcgatttcaatttgtaacatgttttcattgatataatccaataaatgatacgccggctgtcttgaaatctcatttaataactttcagtagtaacatccggccccttggcagccaggccggcgtgcgatcttctcgaggtcgtgcacgaggtgcgaaatgtggcatccaacgtaaacaaaatctgtggccagataacaaatataataatatgcatttactgatggcccacatctacaatagatcttaagtattcccacaattggaaggaaagaacattcatttattatctgcttatttataaaccttgaacttatgatataacagaatttagaaagaataaatgaggatgaaatatacatatacatttctccatatgattatgtaaatggtgtaatagattaataatgccataggataggaaaatcttcgcctcgcttgtgttcttgtataaaaaaaaaaatagaatgtataactaaagattgtgttttcaaatgaatgatgtaccccatcagcgtccaaaataattgccccagtaaccgccaatcactcaagtccgtccgccagtcagtcagcattccatcaggatgtatctccgggctcttggctttgcaactgggtcaccgggtgattttggctaaaaatggtcttggttagcgcaaatgcatttcgccggcaaatgacgcgtgcttctcgtctgacagccattgtagttgctgtctgtgggtcggggtagatggtggtgcagatggtggtgcaaggaccctcggctgctccgccagtggcactcgaacaactgacagccggcaaaaccctaattgaaatggagctgaagaatgggtttgcagccggagtgaagttggaccgtgagctgtggcgtaattagaaaatgaacatggaaatatttgcgtgtgaaagccgcagacggcagataaatgcaatttgttcgaggcgaagctgaaattgcacgcaagtcag

SEQ ID NO: 31622 - DNA, 387 bp, DROSOPHILA
atggccaacgatcccggtaagccggaaaagtccaggccacgcttctgcaccctgttgaaccatgaggtcgtcgatcccaaagagttcatggtgcacttcgccaagcggaggaagaatgaaatcataatccagggtcaggtctgcggttggtgctacaacatagattacttaaaagatgaaaaaacaaagttcaagaagaagcggcccaatctttcggatgcgagcgtcaccaagcagcgcgccacctcaccacgaagaggagcaattgcagacaaccctcgtcaattgggtggtgatcagcactgctcggaaaagagttttgcgccctctggtgacgaaatacccacaccacgtgatttgaaggacaaacctggtgaccttgcctaa

SEQ ID NO: 31623 - protein, 128 aa, DROSOPHILA
MANDPGKPEKSRPRFCTLLNHEVVDPKEFMVHFAKRRKNEIIIQGQVCGWCYNIDYLKDEKTKFKKKRPNLSDASVTKQRATSPRRGAIADNPRQLGGDQHCSEKSFAPSGDEIPTPRDLKDKPGDLA

SEQ ID NO: 31624 - DNA, 2519 bp, DROSOPHILA
tctgcataggctgactgtattgccacatattggagctgttcatcatttggttggggctgggaccggagctccagccgccagcttgcgagggcgacgagggacagggcgcagacatcacagcattgcagccgcccgtcagacgtccttgatgcatttgggtggtagatccactgggattgtactgttgcagcggctgcatctgacccatcgaggtcatcggctgcaggtcaggcagcactgcattgatcccgggggcatcgatggcgcccatgggattgcccatcatgggcatcatggtcatgctgctcaggggagtcaccgctccaatcggcagctgggtggacatcgtggacatgggggtcatctgattgcccccttgcatcatgcccagcggcataccctgcattgggtacgacgaagcgcccgactggcacacgggcatctgcatctgcagattcatctgcggtggattcaggggctgcatggccatggactgtccttgaccctgacctactcccatgcttagggggtactgaggaacgctcttcatctgaaatatagacttagacttattaccaagtctacagaaccaatgcaactatgtgtaccttggaatcggcgtacatgccgtagtcagcttcgtaaggcactgaacaaaaattcattttcgatgtgtggaaagctcgagatactccgaaagtgtttataaaatatttcactccaaatttgtatataacttaaattttgagaattttttttttcttactttctaccaatagatctgaatcctacgatgaaataaatacgaatgaagtgtgtagaggaaaacttcccagacatctgacagagatgggaaaagcctactatgattgaatagaatacaattttagcgtgtttttttcatgatcatctcaaaggctttggataataatattatcaaaaacgtcagagtatttatcgtattgtatatttccaaattacttgttatcacatcgagtaaatgggacgcaaaggccacaagactagaaggaaagttaaagtccactcgaaggtccatcctcctcagaaaattaaagcgaagctgccgaaaagagataaacgtagcacacttcgtcccaagattaataattcgaaggtttttcacgtgaactgctgcaagtacaagatccgttcgagacccatgaggcgcaatcagtgcaacctggccacccagtgcccctcccacacggtcgccatcgccccgtctgtgccgctcctgcatcatcctgtccggcggaaggtggtccatatgccggaaaccgtggtcatgcacatgcggaatatggaggacgcccgccgagtggcggttaagcacagaagaacccttattcaaacccatgttccttcgccggatgtggatgatgacgaagatacacaccaaatcgatcggaggtcaaggcaagcctataggatgggtcaaatgagacccttatccagcgacgtggatgtggatgacatggatgtggacccgtttcagtagggatgtgtgttggaaatatattgtaggtactgtggtaattgtttaacttctcgtttacaaaatgcccatgagtcctactttatttctagttgccaatccacatatcccgtgagacgagggattccattgccacttctaactagttgcttcgccccatgggcatatcgtgatcatccataaaaccacgcccctccgccagtctccccaagcccaaccaagctgtccaggacaattaattttacaccggcttgtcagcttattgtttatctacataactacggaacacggagaacagagaacagaggacgactgccctgagctgtcgtgtcatttattcagctgctccgaccgggctcgactttcgatatcctttgggccgcggtgcagttgccacaccatttatgccattaagtcattagctttgtttaacaaataacaaactgtcaatgagtgattaacgatgtttttcgcatgaactgcaattagccgccgccgccgccgccgccgccgccgacgccatggacgtggacttcgtcgtttgccgcccgacttctttttcctgacaaatgggtgtgatttcgctcccggcggtgctccagtggatccgaggtgcactggctggatgtggattgatggtggtggtggcgggcggatggtagatggtgggctcaccgggtgacaagcactcgttattgatgcgcccccaagctgccgtcacttggcaattattgtgtattgtgctccgagtcaacggcatttgccatagtcatagacatggtcgtggaacagtcacactcatcgcagtttgcatttatcattgaagggtagtgctggcattttaagatgccattttagaatagtaaagtgttgaatagcattcaattaaattaaaagtcttactttgcagctaattgattcattgggcatttggatatttgaatagaaatgatttgtatgaaccatagcctttttatcataacttggccaaaatgagtcccac

SEQ ID NO: 31625 - DNA, 519 bp, DROSOPHILA
atgggacgcaaaggccacaagactagaaggaaagttaaagtccactcgaaggtccatcctcctcagaaaattaaagcgaagctgccgaaaagagataaacgtagcacacttcgtcccaagattaataattcgaaggtttttcacgtgaactgctgcaagtacaagatccgttcgagacccatgaggcgcaatcagtgcaacctggccacccagtgcccctcccacacggtcgccatcgccccgtctgtgccgctcctgcatcatcctgtccggcggaaggtggtccatatgccggaaaccgtggtcatgcacatgcggaatatggaggacgcccgccgagtggcggttaagcacagaagaacccttattcaaacccatgttccttcgccggatgtggatgatgacgaagatacacaccaaatcgatcggaggtcaaggcaagcctataggatgggtcaaatgagacccttatccagcgacgtggatgtggatgacatggatgtggacccgtttcagtag

SEQ ID NO: 31626 - protein, 172 aa, DROSOPHILA
MGRKGHKTRRKVKVHSKVHPPQKIKAKLPKRDKRSTLRPKINNSKVFHVNCCKYKIRSRPMRRNQCNLATQCPSHTVAIAPSVPLLHHPVRRKVVHMPETVVMHMRNMEDARRVAVKHRRTLIQTHVPSPDVDDDEDTHQIDRRSRQAYRMGQMRPLSSDVDVDDMDVDPFQ

SEQ ID NO: 31627 - DNA, 2576 bp, DROSOPHILA
tgggggtttctcggtgagaggagtcttccgaggccggacaagcagctaacgcgccttttacaaatttttattgaaaaatattaaattctcattaaggcaggagaggtccgagcaggttcccaatcgcgtccaggcagcatctatatatatatagccatatagccccactcgatggacgttttctgccgtttttcctgaacgaacccgaaccgaagttggcgcgcgctcacatgcgccgatagactcgcttagataaaagatgatttatgggttttatggtgtgatgggaattttaatttccagcatttttgcttaacaaaattaaacatgggactgcgagcgacagccagatagaagcgatacgagcgccaagaaatgggcggcaggagaaatggggaggcgcggttggcggaagaaggccaagcgaagacaggctcaaacggttatttgcctgtatttgggaaccgggcaattgtcaaatgaggcgacctcctccagacgattccatttttaattgagccaaagcgcacagcatgtaccgccagccggcaaactggcaacttgcaaccggcaaccagcaacttgcaacttgcgactgctgcgactgttgcgacgggcaactgtccattatgctcactcacctgtaaaataaatggcaaagctgccaaacactttggccaactgacaactgctgccccggcatcatcgttccaatttaatggcgaggggctgggggcgtgtggttataaaggggctcaggggaagggggcccaaaaggggggcacccactgctgtgatccgaggtctcgcggcccgttcgtttaccgttaggtgtcaaagatttcatgccccatgtcgcaaactaacgacacacaatcgatcacaaatcaaacggacagaagcagcagcaacccgcagttgccgcagttgccgccgttgcgacagtcatccaaatccaaatgtgtctcaaaaatcaggccgcggccaatgcaaagccgtttcataaattgcacatgacctgacgaccagcagctccaaacagccactgctccagctccaggaccagcaccagcaccagcttcagctccagctccatctccatctcctcctgccactccaaacggcatctgcggcagccaaaaggcagcagaaaggcataacaataaattaaaattcgatgtcgatggctagctgcaccggaaatatttgttgatttcttcagtggagcataaaggcaaatatgctttaatactaacatataaattgtataacatacgactcatatatttatcgatgaaatatgcagttatttttatcagttaagcttacaaattattctctgtgtaaaggtgcatgtggctatggatgcgaactgaaaatccccaactttagactcattcaattgctggccgggcgatttggttattggagcgctctttgcctgatggacagctgccgacagcctgatccacacatactcgaatgtggatcccgctcccagatggactgtagcatgcccagcctccacttcatcctcatcctcctccgattgatggacagtgcttggtggctgcatcgcaaggcgactttattggtttttaatgagcagcgctgcgatttcaatgcttatctaaatgtattcggttgatatttgtgcactgggtggcatggggtattcgcgatgtgatcaaatcatggatgatgacccataaaatatatgcaaaccatcatgtttttatggcaccagatagtttaaaatcgaattaattgaaaattaccattcaaaacggaaattaatagctgcttgcataacataaatatgaaagtaaatgatctttagtcgtacgatatacttgtactgatttattactcacctcaatactacctttccgagcaacttagctttggtatcattaccgcttttcccatgggtaaatccccaatacatcggcacaaaagagttgaccaatggacagctccagggcatttgtagcgtcgatcagtgttaattaaggcaccttctcactttatttactttttctcatttgcatatgcgtgtgggtcattaaacctgacctcccgagcccatccaatccgaatccaaatcctccagcatcgcatcggcgctagtcgtcgcaatagtgacctgacccaaggcatattaattaacccaaaaaaccggtctgttatatttgtctaacctttatgctaaacgcggtgacggcagcaccacagacagagacctgaagtaaaatataaacggcagtagcagtggtggtagtcgctactgtcgggtgccttgtattcggttattaatttaccaataaattgccatggcgtatgcgtaatatttcacaattgtgccttaatggccgagagcgttattcatgcactgatttccgctgcaggtgtcatccaccaacgacggcatctagccaaccagttatgcgtattagccaggcccaagatccagcttccatggctctacagctccggcttctcgcattgaaattacaaatgacgagaaatttgtcatctttattattgcaaacaacgcgcagtcgtacgttgcaaag

SEQ ID NO: 31628 - DNA, 225 bp, DROSOPHILA
atgcagccaccaagcactgtccatcaatcggaggaggatgaggatgaagtggaggctgggcatgctacagtccatctgggagcgggatccacattcgaatgccgtttggagtggcaggaggagatggagatggagctggagctgaagctggtgctggtgctggtcctggagctggagcagtggctgtttggagctgctggtcgtcaggtcatgtgcaatttatga

SEQ ID NO: 31629 - protein, 74 aa, DROSOPHILA
MQPPSTVHQSEEDEDEVEAGHATVHLGAGSTFECRLEWQEEMEMELELKLVLVLVLELEQWLFGAAGRQVMCNL

SEQ ID NO: 31630 - DNA, 4519 bp, DROSOPHILA
tcgctttggaaaagcctggccatttgaaaatgtcttacccttttgaccagtttttgcatgcacttcagttcctgggtaatcggcactatcaccgaatccatgggactgttttttccggcgcattggcagtcgagtttggcagcaagtctggtgaagagaaatctcagtgttgcgaaacttcttagttcatttttgagttacttacatattcgacattatgggttacgtattgtattgtttgtttgttgacagtttgttcgatgctaaatagagtttggactttttgttgatttgtatgcataatacaaattgttatccaaatgaaacgcacacttttatttccctagtcatgtaccgaccaaataaatcctgttcgtgaagtatggcatcttgattccttcacaatcgataaaccctgttgttgttcaaatatgttgcattgttacacccaacaagtcgctccaagtgccgcattgtgtgtcccacgataccgacgaggactcctcgtcctggctcggtggcaatgcattatgctaaaatgtctccggttctgcctgtctgcctgtccgttccagcttcccataccgatgcccatgtcgattccgaatccgaatccgattgcaatcccggatgctccggcagagcagtgtcatggcctgttgttggatgtcggagcgggattaaattgcgacttatgctaagcgaactgatggcgaggggcaaattgaatgggagctcgtttatattgctcgaattgcggcaaagtattgatgctgtcgctggatttgtcactgtcgccggcagtttcctccggctttccagcgcggaccaagtttataaatgcctgccaattgacagtacaaaggaattccggccaggcaatttccattaccaactgtcttctgttccactggcagtgcatgaaatggccattatcggttttctgcgccccaactagtgcgatctctggtgttattgaaactaactttattaaaactaattacgattcatcgttttgaatttcccactgaacaagaaccatagtatgagtgatcactgagcttagcatagcgattagacgaccacgttccattttaaagagacccataacgtagaattcatgccggttactggccagttgcagttggaagttctcaaactgaaaaaataaaaacagattaaggaaaagtcgtagaaggggaaaatcgaaagctgaacttacggctgcctccagtcggttgtccaattcccgatagaacagagttcgatccgccagcactcggaatagttcgtcctgctgatctcgaatatgaaacccaatgttaacggacaaccaattgtccatgtagaaggaagccgtggatagtacaatcagcagaagaccccagtatgtagagccgaatcctgtggagctgtacaggatcgaacagacgctaaagtagatggagcccatggtggagaaaaagtacaccaggctcatgcttaggctctgtatctggaaaaggtccgacatctcatcaagtctgtccttcagaaagtaatgcctttcggcaattagatccagctgatctgccaacgagcagcactgaatggagtaaactccacctcgccgattgcgaatggagcagatgcattcagcttggcgcaccaagcatcgcagatcttggagcagaatcttgtagagcccaatcacctgcaccatggccaagtagtactggcacacgatcatgttaaaaatggtggtcagtgtggccagtaagctcagtttgacaatcaggtcagcagtgatccgctttcgttgcgcactcacatccgatatggtgtgcagagaatctgacaggacacagaacacaaatttaaggataatgctgcgacgataccagcgcccacgaaccacttgaggtctatcgcgaactagggctagtatctgattccaaattcgaatgaatctggaacgctgataccatctggttatcagtgagagcagaactgccgagattcgaaccgcagtcatgagcataaagaagtactcatgcagatatcgagcacttatgaactcggatttcagtgagttattgccaagattgaaaagaatcagcagagtgataaggctggcattatgcactgctgcatagatcgtagtccttcgggtggcaatggcttctccagttagccagtccacctcgaagttggacactcccacggcaaggccataccagtaggcaatgagcaaaatcgtcttcaccaagtcaaccatggttctctactgaaattgaattacagtggaatactcagcaagtgtccagtgtccaatggacatgattaggcctatgggagggataattaccaagtgattgattgcatgatgaagaaattaaatgcacgctacaacaatgggattatataaaattgctaacaatcgcacttaatattattcttaacaaatgtaatttatcctaaggttttagaagttttgcacgtcgtattgaatgaggagaagggagtgtgttaacagggagttaaacacggcaaaggatgttcctcgaccaaactcgaaaaggccgtacatatggagcttcaatggattccgcaccaagttcagagcaaagttttcaaactgcaagaaggttcaattaaaatcttcgaccattaaagagagtttgaagctcttacaaccatttccaatcgatgatccagacctggctgaaacaaagttcgcttattcagcaacttaaccatcttatcatgggcatccaaaaggtaaaacacattaaacgcgttgatccagcaatcgacgacgtaaaatacgaagtagacaatgccacaaagagtgatgatcacgagcaggttattcccaaaattgccatacttgctaatgctgaacagcagatacgaggtgcccagcatattcagatagtatgtgatgaccaggcagaccacttctccttcgtatgccgtggacaagttttcgacgagctcctgtaggtccgactgggacttggctattcgctccaagcgatccgctaggtagcaacacttggtcacaaagacgccacctccgttgggaaccagcgactgggattcggtcacaatcgcctgaagatccttgttcaggagcgcatatcgtcctcgcacacacgcggtggccacatagtactgcgtgatgattacatttattatggccgtcagactcaatacggcccaaatgcgcagagccagagcaatgctcagccgattcctcatcatggccaaggtgactatgatgtgcagtgtctctgtcattgtgacgcaaaagaatttgctaacgatgctccttcggcagtactggattatatccggatttctctgatacagtctccggaatgagttgaagagcctcacaaaggtgcgacgctgcgaccatcgactgaccagctccagaaagacacagactacgcgaaagccggctatgaccaggaacacgtattcgtgaagggaattggcatacttccacatgacgttcaccacactttttcgcattgtttggtagaggagtagggcaaagatcagcaagtgtgtgctcactgaaataagcgtagctcctctggtaactagcgcttgacccgttttcaaatcaatcttaaagttgattacgccggtcaaccgtccgtaggcatatgcgattctcaaacacaatttgagcaggtcagccattgcggagtgctacagttcgttgctttccgacaagttgcaagtaaatagctctattcacttcgtcttctgtgctaatgagttgtggctaccaatgatatcgtatcatcttcattcagctaatgtaataactcaaccaaatcgattgactcagagcactcacgtccctcaagtgtttccctttaattaattaaggaaattattaggtatttgcttttgaagtaatgcagataagatttttgtaaatacaaatgttgtacatcatataggatcagtatagataagggcagccaataagttcagtcttattggcttcatagggaagacaatcgtacttaggagatatgatcttatactgtaccatcgttttgaaagcactcatttaaaggtcccgagaggtagtatctatagacaatagtggccaatatattttcgtacgtcacttaattcccacctaaatcaacaggcaccacatgacctacccactgggcaaggatctgggcaaagtgttagccatcttgcactgcattcttacttttgcttgcagtgaaattccgcagctcatggcttgacaaacatggccctgtttcgagaggacaaagatgctgaagatgctgctgatgtggcataggcgagctgccatgcccgcagaatgtttgctcaacacttatttttagtgaaagactcggaggcgtgtgcgaagaaaggaggtctaggtacaagcctgtgaatgcctagctacacagagggaaaagtaacgatatggcttataatacctattatatgtaaaatgattggtgcattaattattttgcagcttcagtggttc

SEQ ID NO: 31631 - DNA, 2046 bp, DROSOPHILA
atgcgaaaaagtgtggtgaacgtcatgtggaagtatgccaattcccttcacgaatacgtgttcctggtcatagccggctttcgcgtagtctgtgtctttctggagctggtcagtcgatggtcgcagcgtcgcacctttgtgaggctcttcaactcattccggagactgtatcagagaaatccggatataatccagtactgccgaaggagcatcgttagcaaattcttttgcgtcacaatgacagagacactgcacatcatagtcaccttggccatgatgaggaatcggctgagcattgctctggctctgcgcatttgggccgtattgagtctgacggccataataaatgtaatcatcacgcagtactatgtggccaccgcgtgtgtgcgaggacgatatgcgctcctgaacaaggatcttcaggcgattgtgaccgaatcccagtcgctggttcccaacggaggtggcgtctttgtgaccaagtgttgctacctagcggatcgcttggagcgaatagccaagtcccagtcggacctacaggagctcgtcgaaaacttgtccacggcatacgaaggagaagtggtctgcctggtcatcacatactatctgaatatgctgggcacctcgtatctgctgttcagcattagcaagtatggcaattttgggaataacctgctcgtgatcatcactctttgtggcattgtctacttcgtattttacgtcgtcgattgctggatcaacgcgtttaatgtgttttaccttttggatgcccatgataagatggttaagttgctgaataagcgaactttgtttcagccaggtctggatcatcgattggaaatggttagaaccatggttgacttggtgaagacgattttgctcattgcctactggtatggccttgccgtgggagtgtccaacttcgaggtggactggctaactggagaagccattgccacccgaaggactacgatctatgcagcagtgcataatgccagccttatcactctgctgattcttttcaatcttggcaataactcactgaaatccgagttcataagtgctcgatatctgcatgagtacttctttatgctcatgactgcggttcgaatctcggcagttctgctctcactgataaccagatggtatcagcgttccagattcattcgaatttggaatcagatactagccctagttcgcgatagacctcaagtggttcgtgggcgctggtatcgtcgcagcattatccttaaatttgtgttctgtgtcctgtcagattctctgcacaccatatcggatgtgagtgcgcaacgaaagcggatcactgctgacctgattgtcaaactgagcttactggccacactgaccaccatttttaacatgatcgtgtgccagtactacttggccatggtgcaggtgattgggctctacaagattctgctccaagatctgcgatgcttggtgcgccaagctgaatgcatctgctccattcgcaatcggcgaggtggagtttactccattcagtgctgctcgttggcagatcagctggatctaattgccgaaaggcattactttctgaaggacagacttgatgagatgtcggaccttttccagatacagagcctaagcatgagcctggtgtactttttctccaccatgggctccatctactttagcgtctgttcgatcctgtacagctccacaggattcggctctacatactggggtcttctgctgattgtactatccacggcttccttctacatggacaattggttgtccgttaacattgggtttcatattcgagatcagcaggacgaactattccgagtgctggcggatcgaactctgttctatcgggaattggacaaccgactggaggcagcctttgagaacttccaactgcaactggccagtaaccggcatgaattctacgttatgggtctctttaaaatggaacgtggtcgtctaatcgctatgctaagctcagtgatcactcatactatggttcttgttcagtgggaaattcaaaacgatgaatcgtaa

SEQ ID NO: 31632 - protein, 681 aa, DROSOPHILA
MRKSVVNVMWKYANSLHEYVFLVIAGFRVVCVFLELVSRWSQRRTFVRLFNSFRRLYQRNPDIIQYCRRSIVSKFFCVTMTETLHIIVTLAMMRNRLSIALALRIWAVLSLTAIINVIITQYYVATACVRGRYALLNKDLQAIVTESQSLVPNGGGVFVTKCCYLADRLERIAKSQSDLQELVENLSTAYEGEVVCLVITYYLNMLGTSYLLFSISKYGNFGNNLLVIITLCGIVYFVFYVVDCWINAFNVFYLLDAHDKMVKLLNKRTLFQPGLDHRLEMVRTMVDLVKTILLIAYWYGLAVGVSNFEVDWLTGEAIATRRTTIYAAVHNASLITLLILFNLGNNSLKSEFISARYLHEYFFMLMTAVRISAVLLSLITRWYQRSRFIRIWNQILALVRDRPQVVRGRWYRRSIILKFVFCVLSDSLHTISDVSAQRKRITADLIVKLSLLATLTTIFNMIVCQYYLAMVQVIGLYKILLQDLRCLVRQAECICSIRNRRGGVYSIQCCSLADQLDLIAERHYFLKDRLDEMSDLFQIQSLSMSLVYFFSTMGSIYFSVCSILYSSTGFGSTYWGLLLIVLSTASFYMDNWLSVNIGFHIRDQQDELFRVLADRTLFYRELDNRLEAAFENFQLQLASNRHEFYVMGLFKMERGRLIAMLSSVITHTMVLVQWEIQNDES

SEQ ID NO: 31633 - DNA, 3340 bp, DROSOPHILA
caagtctcctgctgttcggagccctgttttgatgttctggccagaaagagaacccctggccattggccagacgaagccgtgtttcactgtctaattaaaagcaccggcaactggcctcttaatttatgctcgttcagggacaggtttcgagaaaatcccgccccacattccgttttccattccgtatttgcatgccttctatccggatctgaaatgttgtggccggaaaagtttatggcataaatcgcacacttggctcgtaactcgcagctgttggtagggaaaattgcatgttttgtgtctttgaatgcgcacatctgatatcactgtatttaaaaaaaaaaacactctggggaaggaaattccttataatacattactctgagaactaatcccaaaaccaagtaatccatgctttacctcttagaactccttacccattccccaactccaaatcaaagctgccgtaaacactttgaagtgtgattaaaatttaaatccaaattgtgagttttcatagaaatttctacttcaccatggcggatccgagtatcaatgacatcgatgagactgtggctcctcccctcggaggcgctgacagcttcgacctgaacaagcggctagattgcgagcatttaggtgagaaatagcccgaagccaacaaggattaacacctaaatgattactcgataaattccaaaacagatcagatgacggataattggaccgattatcaaagaccctcgtttgccaccgaacttctgcgatttttcggcaacgtatttggtgagaagataaacgaacttagatacggaatgcatctaatatactaatttctccgcagtcgatatatttaatgcgattttcaactgatctaatccgtatacttgtaactgttgcagagcagtcaatggttccatagcaaaactaataaaatctttagttagaaaattgtatttattttcactacttggtacgagactactggttttaatgacatttagccgcaatagatttcggtgaatacgggaatgcggcaatagcaggtgcagttctcgaactcatttgcatattgcgatatttcagcaacgaacctttccaaattttgcgggtttttgaatatgttcttgtccacagtcaaatcgttgtccaccagaattttccagcgtctcatactggcgatgacatcgccgcagaagtcgcgtttactcttctccgccgatttcttgatgttctgcataagccccttgtgctttcctgtgaaatgaatttatatattttcaaaaactatatattagaagatttagaagctagcttactgtacgccctattcttttcgaccaacgccgcatgggcttctctctgtgaagcatcgtaaatctcgatgattctgtacatgcgcctttcaatattcttggacattttcagggcggcctcgcactttggcttgcattggctccaatagcgggctccttcgaatgggactttgctgaacttgttactcctcttgaaagtttccgtatcctttcctcgatcggccagttctttagccaattgcgtcttaacccttccattgtggaagcgaaaatgcaagctggccagcagcttctctactcgcgacatgcagctgttggtggcgatatttcagtaaattgatttccacttatatgggcatactcactttgagttcttgagcgaatatacacctggaattgcgaaggtgcggagcaggtggtgcagcttgaaggccacgcagttgagcagatcctcggcggcgcacacctgcttcctgagcaatttgctgtgatcgtgaatggtgcgccggctcttccatcctcggaatagggcctggatcttggtggccgcccgatggtggtgatcctgaacccgcttctgcagcaggttctccacatacctgaagtggttttttcggaccgagaatccgcgccaccagcgctgaatcgtgatgaccgcctttcttagatccttgaaatactttcgaaaatagaatttccgccagttgttttggatagttcgggctgccttgtattgcttgtagtccagaagaagctttccggttctgaaattggttttcaattctttgcaaaaaggtgtgtaaaagtgtacagtatgtagtagacttaccgcgaaattaggtgcaatctgcaattagaagatttactggatccaatttgggactcggtgttgccacttctgtaaaaacaggacggatgaataaaagttcacacatatttatagatatgattaccggctgtccccacctagtggaaccgtggccctccgagtctgctgcatcatgggtataagtcctgagaacatcctgaaaaataaaccgctctacttcttcctaatttaagtgtatatgtttagtgttaactttgtgtacagtgtgtattaacatattttagtagaacaaagtgtttgctgtgactgacatctcggtggaaaatcgatgactcgtagatttccgtctagctgctggccataatttatggcctccagcgattatatccacataaatcttcgggctttgcatcctggtctcaatttaggcgacatattttatttcgcctttgcatcaacatgtttgccgcttatcgcgtcgggagaaaacagatttatgtgtctattccaccacctcgagttggcataaatattctgcagactggcttgaattttccaaggcggtatttaattgaattgtatcgatgcctgtggtcttaagctcgcttaaggaccaatggaaggacccatattggcagttggcagtcgaccatttatgatgcccttgactgcaacggccatgctatccaattgtgttctaatgctgacaaatggccgaggtcaagttgccataaattcgggacactgaaagccattaggtggtcctggccggcactttaaacgaaaatcgatacagagccacgacattttgccagctcattatgggccacaaatgaaccgcactggcacacacacatacacactgccattcacattcacaatcgcaaacaaacggtcggaaatgaaacggaaattctcatttatggcgcccttgacgccatttccagtttccagtttggtcgctatctatgcggccctgacaagttggcactgctcgctgatttctgatgcagattgcgattgcaggccctgattgcagcagccatgagatttatggtccatatagcccgtgctgacccagtagctgatagcaaaactggaccagaaaagcatgctagtcaaagtcccagttacagtcacagtcacagtcgcagttggcagaatgcccccctgctcaacacaagcgttcaccttg

SEQ ID NO: 31634 - DNA, 1104 bp, DROSOPHILA
atgttctcaggacttatacccatgatgcagcagactcggagggccacggttccactaggtggggacagccgaagtggcaacaccgagtcccaaattggatccagtaaatcttctaattgcagattgcacctaatttcgcgaaccggaaagcttcttctggactacaagcaatacaaggcagcccgaactatccaaaacaactggcggaaattctattttcgaaagtatttcaaggatctaagaaaggcggtcatcacgattcagcgctggtggcgcggattctcggtccgaaaaaaccacttcaggtatgtggagaacctgctgcagaagcgggttcaggatcaccaccatcgggcggccaccaagatccaggccctattccgaggatggaagagccggcgcaccattcacgatcacagcaaattgctcaggaagcaggtgtgcgccgccgaggatctgctcaactgcgtggccttcaagctgcaccacctgctccgcaccttcgcaattccaggtgtatattcgctcaagaactcaaactgcatgtcgcgagtagagaagctgctggccagcttgcattttcgcttccacaatggaagggttaagacgcaattggctaaagaactggccgatcgaggaaaggatacggaaactttcaagaggagtaacaagttcagcaaagtcccattcgaaggagcccgctattggagccaatgcaagccaaagtgcgaggccgccctgaaaatgtccaagaatattgaaaggcgcatgtacagaatcatcgagatttacgatgcttcacagagagaagcccatgcggcgttggtcgaaaagaatagggcgtacagaaagcacaaggggcttatgcagaacatcaagaaatcggcggagaagagtaaacgcgacttctgcggcgatgtcatcgccagtatgagacgctggaaaattctggtggacaacgatttgactgtggacaagaacatattcaaaaacccgcaaaatttggaaaggttcgttgctgaaatatcgcaatatgcaaatgagttcgagaactgcacctgctattgccgcattcccgtattcaccgaaatctattgcggctaa

SEQ ID NO: 31635 - protein, 367 aa, DROSOPHILA
MFSGLIPMMQQTRRATVPLGGDSRSGNTESQIGSSKSSNCRLHLISRTGKLLLDYKQYKAARTIQNNWRKFYFRKYFKDLRKAVITIQRWWRGFSVRKNHFRYVENLLQKRVQDHHHRAATKIQALFRGWKSRRTIHDHSKLLRKQVCAAEDLLNCVAFKLHHLLRTFAIPGVYSLKNSNCMSRVEKLLASLHFRFHNGRVKTQLAKELADRGKDTETFKRSNKFSKVPFEGARYWSQCKPKCEAALKMSKNIERRMYRIIEIYDASQREAHAALVEKNRAYRKHKGLMQNIKKSAEKSKRDFCGDVIASMRRWKILVDNDLTVDKNIFKNPQNLERFVAEISQYANEFENCTCYCRIPVFTEIYCG

SEQ ID NO: 31636 - DNA, 2401 bp, DROSOPHILA
tcaaaatgtcattggcaaatggttaattaaatatttaccgggccaaacgttgtaaattgttgataaattatttaaaactttcagctgaaagtcaaggacttcgatacacagtccgcagatgaattggtatctagatttcgcaacttttgactgccgcttgttgctctcgtgccaaaaactttcgaaacttttcccacccacacacaaaacagggcaagagagagaggcttctgatttttcgacatgccaacacttgttttccgactgggctctaagtgatttaggctagagctaaactttttccccggaaatgtagcggggaaaacttttgttgttctgcataatcgtctgccggaagtgtatcgaaaacgggggagcctgaaactgtctcgcctgccaaaaaaaaagaaggattcctccagcgcataagtgcattacggggcaatcaataaattagctgcggcgcttataatacgactgctcagctccaggattccttgggccaccaaggtcctgctggtggccctgtttttgggccgccccagtaggaattatacgtgagttcccttgtgtgtgtgtgtgtgtgtgttttagccacgtgcctgaacatggcacaatcctagtcgagtcgactcgtaattcatttgcataacattaacgggcgggcggatgccataacatgaaccacatgccaggctgctaactgggccagccgccaccaagtttaaataaaatatgtatgccaacgaattaaccttaaacactttggggctttcaggtgtgtgccagtgccagtgccagaagcactagctcaaaggacatctgtgtttaattggtgaatgctgactgaatcttgtgccattaccttatatattaccctatatatacaatagatatacgagtcattttcaatgcttgcttgaaatcaaatttttttatttattatggttcaaaatcattgacaaagtgggtggcatatcattggatcgatcggagcagtttacttcttgagcagagtggagacgacggcgggggcagcgtaggcggaatacacggagggcgcggccacataggatgaggagtagacggagggggcggcatagacggatggagcggcgtaaacggagggggcggcgtaggcggagtatgcgcggggaatggcggccgagtaggtggtcacaggagcggcggcggcgtaggtcagggccggaacagcggagtaagtggccacagcgggtgccacaacatgagcctgggcggcggcgatgaagagagccaagcagacgaggaactgcagatgatagtatggattaatagggctgtgcaggatcaaagggtgtgcaaggagtccaattgaaggatattcctcagatacccaaagctaactccacttactttcattttgatttgttgagttttgggtttgcgtgcgacgaacgatctcaaagactgatggtgcgttgactgatgctgttctccagtggaatcaaggtttttataccccaagagacccagatcttaagaacaagttgcccacaacatgcggatgtgaacttggtagctaatccgggcgaaccatatcgaatggatattggcattgttcgacggaatgtttgtttatttttacactacgacaacaattggcccaaacagaaggaggtgggactgacaatctgacaatctggcaatctgacaatctggcaatctgactcactgactggctgacagtaatgagagcttgattgttagcccgcgcgttttgggtcagttttggtgacaagcaaaaaaatggaggggaaaagcttcgataatcgcgtcgaacaaactcgattcgcggcggaatcatgaaataatcacgctcaaattgaaagcgtaagtggatggcaatcattgtaatttacgtcatcgaagtgattttcaattgtagccctggcattgacattgcatagagcaattaataaagcgttgataccacggcagaaaggggttttaaagatagtacttacttcattcatactcccatttacccttatacttaggtataaattatgttagtatattaatgtaaggttatataggaactgaaacaggggtgacaatcttaaccaacacttttatcgaaatatgtgacaactatatttatcaaagcaacccatttgtcgtttgacgtaggttgtcattgactgaaggcataaagattcgtgattaattgcaaaccaagtgttacattcaagtaaaatcaattactggtgcaaaatggagaagatgctgagtacttacattgaggaagctgtgagttcttcagttcttagctaattaaaaatgacatgtatttactgatatttgatattccccatgtatgcatttcattagatggagttctacgcaattggtaaaggtg

SEQ ID NO: 31637 - DNA, 345 bp, DROSOPHILA
atgaaagtaagtggagttagctttggccctattaatccatactatcatctgcagttcctcgtctgcttggctctcttcatcgccgccgcccaggctcatgttgtggcacccgctgtggccacttactccgctgttccggccctgacctacgccgccgccgctcctgtgaccacctactcggccgccattccccgcgcatactccgcctacgccgccccctccgtttacgccgctccatccgtctatgccgccccctccgtctactcctcatcctatgtggccgcgccctccgtgtattccgcctacgctgcccccgccgtcgtctccactctgctcaagaagtaa

SEQ ID NO: 31638 - protein, 114 aa, DROSOPHILA
MKVSGVSFGPINPYYHLQFLVCLALFIAAAQAHVVAPAVATYSAVPALTYAAAAPVTTYSAAIPRAYSAYAAPSVYAAPSVYAAPSVYSSSYVAAPSVYSAYAAPAVVSTLLKK

SEQ ID NO: 31639 - DNA, 8130 bp, DROSOPHILA
aatcatggatacatacagatcatttatatattcgtactatatagatttgataaagttctcgacaacagatgcttataaaatttcataccacacttaacaaaatatgattcgatgcccatatacaagtactatataatccatttcaatccacaccacatcgtattgtatcgtatcgtatcgtttcgtttcgtttcgatataccctttattttttaaactatatagtttgcgcctatttcagattccttgtggactgctgctgctgctgagttgtgctatatgtattatttcgatatagagatatgccattaaattctgttatttatcatatatatgatcagggggatagtcttttcgtagattcgcaatgtgactaactaagttcaatttagtttaggctacattaagtggctaagtcgtaaactagtttatgtattagctgacctgatcctaatttaagttacatatatacacatctatagcttaactagttgcgattcagtaaatctcttagttttggagtctaaactaatttctcgttaatttcacaagcatagctcattgtgttcactgaagtattccactctttagttgttattattatattatgttacgttttgtttgcgcacaaaagacagaattgagttgtacagtacagtagttaagtcaaataaatgcttctccttgtggcttccactcacactttacacgttagtcgggttcgaaagcagtgctaaatccagtaaacgtacgtaaaggctacatctacaattatgaatccttaaacctaatttccatctgctccgctgctccttttgtgtggaagtcttgtcgagttttcaatgcagcttaactactataatacagattttgggattcagttaccaccgcgatcatccttagacaatggtggtgcgctcggcgcccaaggtgctggtggtgcacgtgctgctccccccaatgcacacgatctgacacttgatgtcctctttggctaactctcaggagctcaccgtctcgtagttcccgccgccgcccatcaggagtggcgactgcactccacccaaagtggtgctgtacgtggccgtctgtgagcgcggcgacgtcagcagcgactgggccgctccgatggtgatgtttccgctggtcaccgagctggtcagggccgccgaaatgccgcccacatgcaggcttcccgggtggggcagcgtgttgcatgccccaccgcccaccaggccacccacgccgcccactccgccgctctgcagcgagccattggactggccgcccagcaggggcatcgtgcacgtggtggtggatccatacggagaggtgggcgaagtgcgggtctcgtacgctggcaagtggtagccgccggctccagccgccgtgaccgttgctccgcctccaccgcccccgcgacccgggatgcgggtgtagatattcgggggcgtccttgtggacagaaggggcggcggggcggtgtaaacgggtcgctgaacggcaggagcgcgctggggcgtgttgtacaggctgaaggcaggattcgtggttagcgacagttcaccgtactgcggaagaaaaggttgggaaaagtttgaagttaatttcaatgcactggttaaaatttaatgctgttttatttatcaaaattataatcgaaaactgaagtgtaattacttttcccattcgaaatatttaactaatttgatttttgctcaggctctaactagttcccttttgtgacccgcaaacttttgggaggacttgacccaacgttttcgaacctccatttatgacgagagctgacaaaacaatttctaatcgaaaagttcccaaactgacccacacaaacaccaagaacttctaatgagcttgttaggaactctcaactcggagggacaggacaggactgcctaacggaaattcacaaaaagccgagctaaacaaaaagctaaacatttttgaacttttgctggcgacgactggcattcgctcatcaaaatatgatgttacgctcctcagaaaaaggataaaacaacaatgataaaacaatgatataattgtaagcaaaacgttgctggacgtgaaaacacaggaaaagtttgacttgttgttggtgcggaaaacaacgaaactaatttgtctaattttttacggtttttggctaattggcgggaaaatggaaagaacaggaagagattcgagattgctataaatccaaagaatgctttaaatcctcagttcattccatggcccccgtcaaacacacttttaatcgaacgaatttaaagtctcttttttaaaacgacagccaaaaagtctgcaacactcagcgtttccccttcacctggtggttggtaaaccattcacaatgagctcaatatgtgggaaatgtgtgggaaatcagaaatcagaggaaatgtttgtgtaatcacctgcttgccaaaggtgggcgacagcgagggcggcggcggagaggcggtgttaatccgcgtcggcggggtgtataaaatccgctgtgattccatattcaatcggtcgaaggccttctcctcctggtgaaactcgtcctcgctgttggcctcctggggcaccacgtccggatttttgtcctcgaggctggagtggctgcccatgttgcgagacagcggctccgcactgcccttgtccgcctccgtggtggtggcatccgcgcccgatccgtgccgcctgccgccccgcttgctccggaatttgataacgatcaccacgcaaatggccaccagaatgagtgtggcaatcacgccgaccagggcgcccagcaggggtgtcagttgcaccagcaccgccgtcgatgaggctgcggaaaatgtcaaaatgcgaaaatgcgggaaaatcgtgaaaaactgaacgagtaggcgcgcacaaagtcggggcacaatgaacccgttttcgagggtattgccctcgttcgccaatcgaattgggccaattttaagtggcaaaggtggttcataaattacattttggcattccgaacatttcgtgttggattaaaacatttaagagttcaaatacgaaatcattgcaattcaataaatttgttaaaatgctagattatttccgaaataagctcatcatgtgtggcatttaattggcccataaattatggctagaagtgacatttcactgtagcacttgaactcacctgtccgcagcagaggagccgaaagcgtgcgtccccgcagacgatatgccaccttgctggctccctgggcattcaccgccgttatccggatgacaaacacggagtcgctgggcaggcgcttcaccgtgaactccgagtacttgtacgaggcattgtaaaggatttgtcggttcagttcatcgtagatctgggcgtgaaagtgttgcggaatgccgccatcgtagccgggaatgcactgaatctgcagcgaattggccgtggcattgtaggccgtgcagttcttcacgggttcgggaaggtctggtatgaaaatatagataatttttatgtaaattaagaatgttatttacccaatgggaaaaccgaagtctgttcctcaaaatactttgataatagttcatataattaaggattccatacaactaaacccgcaactctacctttccttcatgcaatatttattttaagttaaattacccctgtacatttgaaaatccccactgcatccctccactcacgcttgatttcactgcccacctgaatgcctgttgatggcttcctggcccaatttcagttgccctgtccaggacactctagcagatggcctttcaagttgttttccacgaaccgaaatcgccgcttatttttgtgccatggtcggcggaggttttataaataaatgatgtgccctggcaatttattgcatttgattatcagattatcgggccgcagcacacagattgcagtagttgcaacagtggcagcggcaacatgagcgcagcaaacatgcagatggcgtcggtaaacatggcttttatggctgtcacggtccaaatcggggaatggccggacggacaggaggatgctgatggtatggtacgtatcctttggcccccaggatctgcccgaccaccttcccccctcccatccggtcaaatgtaaataacgtgctgcgattcactcgccgctttccgtacgtgctgcgtgccacacttatctactggccaggccaacagtcggatcgggtcaacatgttgaccgttcgctcttgtccgccgcctcgatctacaattaattaatttttttcgcaacactttcgcatggattgagaccaggcccatccataatattatggaatttactttgaatgaatactttgtagtcttttctttccttagtttactcatagaccattaagagaatagaccacaatgcaatcccaactccccgagcaagatacccccaacaagggtatcctcagcaagcccctgctatctgatttccggactccgccccatgcatttttcagcgctcgactcgacttggacactcacctgccggctggatgtgataccaacagggcgcactgtggcccatcggactgctggccacgcaggaaatggcgccgaagctctcgtagctctctacgtggtagctatacacgttgttcagcgggggcgcggcggtggtggtcgggggcgtggccacgccgcctcggtggtgctgcttgtgcagggccaccagtcgcttgcgctccaggatgactccgccggagggggtgtggctgtctccggacgagccgccggatgccatctgctgctgctgctgctgctgctgaggggacagctgcttccgctgctgctgcttgctgctctcaacgtggttcttgtgcaccatgttcgagtagaccatctgggtgaagggctggcccacctcgtcgccatactcctcgaactcgccgtagccgtcctcgtcctcatcctcgaacctcaccgccgccatgcggccatgcctgccgtggagcaggcgttgctgcattccgtgcgagtgcttccgcttgctccgctgataatatccgctctggtccgatccggaggccagcatcaccggagccccctggcccagttggggcagctcgatgaggctctccagcgagttgttgaagtgccacttgtaatttagattatcgactggattcgcgtccacctcgcaggtgatgttgattgtctgcttgagcgcggcacgtataatcgtcgattccgacttgcaaacgggtggatctggacgggaacaagtgcacagggaaaagcaagggggtgttaacataatatttactgaatatatattttttagaggaaaattcgataagttcataatagcaattataaacgaagaatatagcataaattgggatgagacgtctaacttcttcataatttcttgctgtgtaaggagcttggaaaagttgcagtggtggagtacttacatttcacatccaagtacacctcattgctggacacactgccctggagatttgaggcccgacagaagtactggccgtgcgaggacttggaaatgccctggaggacgagggtctggttggagatgatgatgccgcgggaggaatgcaattgcttatcctgggaggagataacaaatgtttttcaattactgcttctcgtgcgatatgtaatttaatgaaaactcaaaggccgagaccctgatgaaataacaaactaagtaacaaatggaactcacactgtggtaccactccacacgtgtaatcgcgggattcgccttcacatcgcactccaagtagacatcggtgcccttgagcagattatccggatcgagaggagcgcccaggttaaggttgacaatgggtgcatctgtataacagtcgcattcaatttcggtttacagctaccgcattggggcacacttacgcgtcacattgagcaccctggaatccttcagatagagtccggtgtgtccattgcccagagtagtcatcacagtggtgtggccctcatgcagctgctgggaggtaatccccgcattcagcgaaatggaacagaccacctggcgttcattatcctcgggaacgggaatcagcatcagttccgatatggttgtgttcccatcggacgacgtctgtgggatttggaagatatttagctaagtttgcccctacattccccattgagtggcaacttaccgaggaggtggctccccgcacaatctgtcccgccttagaccagattatttccggcggaggacgagcgccaatggccgtgcaagtaacgtgggatcgggttccagcaattacggcatggttaaggccttgcaaaagcaaactaagtgggggaactgcaggaaagtacaaaataataatttgaataattacaccaattgtatgtatgtatataaacaaactattgagctagaaaaccatgctagttcccattaataaatgacataactaaattattacacagtatgaactttaattaataaaatatttaaaagcctgttctaacgaaactagcacagtcactgggctaatttaaaatactgcgtagtctcttctgattaacatggcggaattgagttattgccacacaaggacatcgcgcacatttcgcagtgccaaggatatgccgcttaatttcctgcccatctataaccaacctttatggaaatgttcattatttatgacacattttattatgcccatcactggatgtcccacccgagggagccacaatgcgattagcatagcgcgccgaaccacctggaagccacctgaaaaccatctgaatccgcccgcataaccataaatgcatggatgtggatgaatatatgccgagtggtcgggcgtccttgcggcggaatgacaaaactttaattacattaatttccatgaaaatgtcacgcccagcggctaaaacacaaacaatggccccaaaatccctgaaagctgaccttgaactgcctgcccctgctgggtggccgcaaaaattatacaaaatgtggacaccactgcggccatgcattctattaaaagcctttcgaaaaggacacttacgattcatgtcgaggataaccttcttggtcagcgctggaaccacgtggccattgctcgcctggcaggtgtacatctggaattgggggagaaacaaagaggacaacaatgaaactcgatgatttatgctcattacaataattgcctttcacttataatagcgaattccattgaaatatcaatgataaatcatcccgctgaacatttaattttaattgcggcaaatgtgtaacaagcacgcacatacatacatatatttggccaaaaagcaagcagcccacaaagcctaatcaattatgctttcagctggagacagaaaccgagagcaaccaccacaaagagttcaaaaggtcggcgaatgcaagtatcaatatcataaattcccctgctggtaatgcgatacttcttgggaccagccatagccatagccatatacatatcggacattttattggcccaaacgaacactgtaacgcttttgggccataaaaatatttgcataacttcggggttcgccgcaccgcaagtctcgtttcgattggaaaattaggtcataaatttctattcggttacacaagaatacctagcgttatgtgaagatacttgggtctcatattgcgatcggtggggggtctgcaggaagtcctctgtgagccagtggctcattgatacagctaggtgtttattatggcccgaatggtttttgatcttcacatttgttcgattgggcgaatcgggagaagcttcaatgcccacaacaattcatagccacaatcgctttagcttgttttatctacataaacttggccgcttaacaactgaaaggcttagccagcagcttaaccaaccaagttaagttggtttaaatatatttaagttgcttatcatcagaaaatctctcattggaagccttagtaatcagtgcattagatttgaataagtgaatgattgcctaatgttggtacgtaaataacaaaaaaagaacatttaaataattcgactgtagaatctgcatactgacagatttatctttaaataggcaaataaatatatatattcaataatttgactcttaa

SEQ ID NO: 31640 - DNA, 2718 bp, DROSOPHILA
atgtacacctgccaggcgagcaatggccacgtggttccagcgctgaccaagaaggttatcctcgacatgaatcttcccccacttagtttgcttttgcaaggccttaaccatgccgtaattgctggaacccgatcccacgttacttgcacggccattggcgctcgtcctccgccggaaataatctggtctaaggcgggacagattgtgcggggagccacctcctcgacgtcgtccgatgggaacacaaccatatcggaactgatgctgattcccgttcccgaggataatgaacgccaggtggtctgttccatttcgctgaatgcggggattacctcccagcagctgcatgagggccacaccactgtgatgactactctgggcaatggacacaccggactctatctgaaggattccagggtgctcaatgtgacgcatgcacccattgtcaaccttaacctgggcgctcctctcgatccggataatctgctcaagggcaccgatgtctacttggagtgcgatgtgaaggcgaatcccgcgattacacgtgtggagtggtaccacagtgataagcaattgcattcctcccgcggcatcatcatctccaaccagaccctcgtcctccagggcatttccaagtcctcgcacggccagtacttctgtcgggcctcaaatctccagggcagtgtgtccagcaatgaggtgtacttggatgtgaaatatccacccgtttgcaagtcggaatcgacgattatacgtgccgcgctcaagcagacaatcaacatcacctgcgaggtggacgcgaatccagtcgataatctaaattacaagtggcacttcaacaactcgctggagagcctcatcgagctgccccaactgggccagggggctccggtgatgctggcctccggatcggaccagagcggatattatcagcggagcaagcggaagcactcgcacggaatgcagcaacgcctgctccacggcaggcatggccgcatggcggcggtgaggttcgaggatgaggacgaggacggctacggcgagttcgaggagtatggcgacgaggtgggccagcccttcacccagatggtctactcgaacatggtgcacaagaaccacgttgagagcagcaagcagcagcagcggaagcagctgtcccctcagcagcagcagcagcagcagcagatggcatccggcggctcgtccggagacagccacaccccctccggcggagtcatcctggagcgcaagcgactggtggccctgcacaagcagcaccaccgaggcggcgtggccacgcccccgaccaccaccgccgcgcccccgctgaacaacgtgtatagctaccacgtagagagctacgagagcttcggcgccatttcctgcgtggccagcagtccgatgggccacagtgcgccctgttggtatcacatccagccggcagaccttcccgaacccgtgaagaactgcacggcctacaatgccacggccaattcgctgcagattcagtgcattcccggctacgatggcggcattccgcaacactttcacgcccagatctacgatgaactgaaccgacaaatcctttacaatgcctcgtacaagtactcggagttcacggtgaagcgcctgcccagcgactccgtgtttgtcatccggataacggcggtgaatgcccagggagccagcaaggtggcatatcgtctgcggggacgcacgctttcggctcctctgctgcggacagcctcatcgacggcggtgctggtgcaactgacacccctgctgggcgccctggtcggcgtgattgccacactcattctggtggccatttgcgtggtgatcgttatcaaattccggagcaagcggggcggcaggcggcacggatcgggcgcggatgccaccaccacggaggcggacaagggcagtgcggagccgctgtctcgcaacatgggcagccactccagcctcgaggacaaaaatccggacgtggtgccccaggaggccaacagcgaggacgagtttcaccaggaggagaaggccttcgaccgattgaatatggaatcacagcggattttatacaccccgccgacgcggattaacaccgcctctccgccgccgccctcgctgtcgcccacctttggcaagcagtacggtgaactgtcgctaaccacgaatcctgccttcagcctgtacaacacgccccagcgcgctcctgccgttcagcgacccgtttacaccgccccgccgccccttctgtccacaaggacgcccccgaatatctacacccgcatcccgggtcgcgggggcggtggaggcggagcaacggtcacggcggctggagccggcggctaccacttgccagcgtacgagacccgcacttcgcccacctctccgtatggatccaccaccacgtgcacgatgcccctgctgggcggccagtccaatggctcgctgcagagcggcggagtgggcggcgtgggtggcctggtgggcggtggggcatgcaacacgctgccccacccgggaagcctgcatgtgggcggcatttcggcggccctgaccagctcggtgaccagcggaaacatcaccatcggagcggcccagtcgctgctgacgtcgccgcgctcacagacggccacgtacagcaccactttgggtggagtgcagtcgccactcctgatgggcggcggcgggaactacgagacggtgagctcctga

SEQ ID NO: 31641 - protein, 905 aa, DROSOPHILA
MYTCQASNGHVVPALTKKVILDMNLPPLSLLLQGLNHAVIAGTRSHVTCTAIGARPPPEIIWSKAGQIVRGATSSTSSDGNTTISELMLIPVPEDNERQVVCSISLNAGITSQQLHEGHTTVMTTLGNGHTGLYLKDSRVLNVTHAPIVNLNLGAPLDPDNLLKGTDVYLECDVKANPAITRVEWYHSDKQLHSSRGIIISNQTLVLQGISKSSHGQYFCRASNLQGSVSSNEVYLDVKYPPVCKSESTIIRAALKQTINITCEVDANPVDNLNYKWHFNNSLESLIELPQLGQGAPVMLASGSDQSGYYQRSKRKHSHGMQQRLLHGRHGRMAAVRFEDEDEDGYGEFEEYGDEVGQPFTQMVYSNMVHKNHVESSKQQQRKQLSPQQQQQQQQMASGGSSGDSHTPSGGVILERKRLVALHKQHHRGGVATPPTTTAAPPLNNVYSYHVESYESFGAISCVASSPMGHSAPCWYHIQPADLPEPVKNCTAYNATANSLQIQCIPGYDGGIPQHFHAQIYDELNRQILYNASYKYSEFTVKRLPSDSVFVIRITAVNAQGASKVAYRLRGRTLSAPLLRTASSTAVLVQLTPLLGALVGVIATLILVAICVVIVIKFRSKRGGRRHGSGADATTTEADKGSAEPLSRNMGSHSSLEDKNPDVVPQEANSEDEFHQEEKAFDRLNMESQRILYTPPTRINTASPPPPSLSPTFGKQYGELSLTTNPAFSLYNTPQRAPAVQRPVYTAPPPLLSTRTPPNIYTRIPGRGGGGGGATVTAAGAGGYHLPAYETRTSPTSPYGSTTTCTMPLLGGQSNGSLQSGGVGGVGGLVGGGACNTLPHPGSLHVGGISAALTSSVTSGNITIGAAQSLLTSPRSQTATYSTTLGGVQSPLLMGGGGNYETVSS

SEQ ID NO: 31642 - DNA, 2765 bp, DROSOPHILA
tttaaatatatttaagttgcttatcatcagaaaatctctcattggaagccttagtaatcagtgcattagatttgaataagtgaatgattgcctaatgttggtacgtaaataacaaaaaaagaacatttaaataattcgactgtagaatctgcatactgacagatttatctttaaataggcaaataaatatatatattcaataatttgactcttaaaatcgctcaagaccgccgctccagatcatctccttagtgtaagctaataacttttggtattacacgaacaaaactcaagtgattcctctcgagccattcatccacggcacaaaagacctgaccgacttacaatttgctgttgaacgtggagctggttgaacgaaaacccagatctgaatggcaggattagcgctgtctaacaataatgttcattacatggaccaaagaaaaatccggcttagaatcaacagaacagagcagtcttgaacagtaggaggtgggcgtggaacgggcctctccggggaagtcggtgctgtccaaggggaggggattctccatgggaaaggagggtaagccgcacaagccacccagggaacaattcccaatgcacccggttgcatttgatttctattagccattgtgcggcatcgcttgccacacggagcgctgtcattaacggaggcccacggaccaagtcgtccattgtgaccagccgaaaataaatggccaactgggccccaaggggtggatgccagagctgcgaatctggctattttcaggcacgtctcgtggacttggaaattggtatttggaaatggtattcaagttaccatcacctggctaaaactccattcggtggatgatggatttaagactagaacgacttagttcataagttgtttctaatggtattccagtggcaacactgatggccagcaaagttaggggtttggcgtagagccattgtgccagaaatctctttgtgcgcaggccgtaaatatggcttacgacatttgaagcgagcagtccaaaagcggtggatgacttaccgtgaggagatccttccgctgaatgttcttgaggcgcaggacattccgcacggagccgtcgggcagcacctgaaaggagtcgtcgatcagggcgtgctcccgccaccaggagacccgcggaggaggaactccgccgctcgagaggcaggtgaggtcgatgctgtcgccttccaggtacggtcctgccgtctggtcccggatctcggccccatggtgatccaggatggtcagcgcagtgggtggaactgtggagtagcaatgacaataggttggctgtgtacataacaaatggtttatatgctgaacccacctagcactgttacattgatgcgccagttgcgagttggtgacttgtggaagtccactcggcacttgtagagtccggcatcggaggtttgaatgttcttgatccgcagggcaggaggatctgtgtcgtggtggaagtgggccttcttgttgaacacactttcatctgcccagggaatgcccagattcaatggacgacctcgcgcatcaaagctgtaaggaaaaaaatatagattttttgaaaaatactatataatatacatgaagaatgacttgattagagcctacaacttgttccttctccctcgaaactaatgacacataaaagcccttttgacacgttttaccaatacccaatacacacctaccattacgccgggccttaaaaggccaagttgtgttaacctggctcattgattttattgtccaaacaattgagacaacattggccagggaaatgtgtgtcaaatccggggaatccactgaaagcggaataactaattagctttcccctgggccaaactattttagctacactacaatccgtggactaaaatagatttctggaaagggaggcagggcatgaatggccgagaagaactttgtttttattgttatggccaaacgcttttgttttatggccttgtccaatgcattttgacaaagtgccgcattaaatgtcagcacagccgaaaggccccaatccgaaatcagaaccaggcatcgtaaagtgcatttacagaacttttgatttccattggctttcgtttttatctccgcatttttttatttttttttttagcatttttaaatggtcacatttcatttggtttcagtcttttaatttgatttttcattttgttctgtttttttttctctgttttcagcactttgtttgctctttttgttgggtttttgggtgtgagggctctgcaaaataaaaaaaaagcagaaacacatttttgctatttatgtaaatgccttcgaacgcccctcaggcggcacgcccacttggcccacaaaatcgtgtttttccattttcattttatagttcacttcaattaattaattgatcaatttaggcctgttgtatttcgctcttggcttaagcggattaccattttattttcgtatttttgtatttccttgaatttttatatcactttgtttttcgaatgaattaaattctttgtggactctttttttttttttatttgttctgcctctttttaagtagctttaaagagcccacaaagtatttaaattccgcctggagtatttatgctataaaaagcacgtgttggcctttaaagttttttgttttttactgctctgaaatgggacactttggctaaaaaacaaagattgaggcttccgctttatggtttcttagaggacttggccaatttaactt

SEQ ID NO: 31643 - DNA, 549 bp, DROSOPHILA
atgagccaggttaacacaacttggccttttaaggcccggcgtaatggtagctttgatgcgcgaggtcgtccattgaatctgggcattccctgggcagatgaaagtgtgttcaacaagaaggcccacttccaccacgacacagatcctcctgccctgcggatcaagaacattcaaacctccgatgccggactctacaagtgccgagtggacttccacaagtcaccaactcgcaactggcgcatcaatgtaacagtgctagttccacccactgcgctgaccatcctggatcaccatggggccgagatccgggaccagacggcaggaccgtacctggaaggcgacagcatcgacctcacctgcctctcgagcggcggagttcctcctccgcgggtctcctggtggcgggagcacgccctgatcgacgactcctttcaggtgctgcccgacggctccgtgcggaatgtcctgcgcctcaagaacattcagcggaaggatctcctcacggtaagtcatccaccgcttttggactgctcgcttcaaatgtcgtaa

SEQ ID NO: 31644 - protein, 182 aa, DROSOPHILA
MSQVNTTWPFKARRNGSFDARGRPLNLGIPWADESVFNKKAHFHHDTDPPALRIKNIQTSDAGLYKCRVDFHKSPTRNWRINVTVLVPPTALTILDHHGAEIRDQTAGPYLEGDSIDLTCLSSGGVPPPRVSWWREHALIDDSFQVLPDGSVRNVLRLKNIQRKDLLTVSHPPLLDCSLQMS

SEQ ID NO: 31645 - DNA, 2519 bp, DROSOPHILA
gccaacgagagacctttgagccgaattgctgctgccaatcagtcagtctatacagcacatataccacacacacacacacacacacacacacatttcccatctgccaggatctcctgcatcgccattacttgcgacatttcctggcgcactgcctctgaaaatgccttttctttcttttcctatgagctcgttaaaaattgccaacgcgcgagctagacactcaggaaaatggaaaagaattcactaaagttaataacgctcctatgaaatatgaaattcctgcttttaactgctgccacttcacaattctatagtactcaaaatgtatattagaccgtccaatcaaatggcattgttaattgctaaatattatatacacattttttttttcgaagtgcttataaagcaatgaagaggaggggctgggtctttttaccttaaccccaccttcatcgtttttttagcccccgcccctcacgttggttcttctgtgtaagtaatgtttatatcgtcaaattcaacataaatgcctcacgttaatagaatttataatgagctggcgcctactttggctgccgcagtatggatttctgggggccacgcccccccgccccctgaacaccgggagtttctttataattggctgccgttcccaacggtatcgaagtcaaatccattttgggaccacggctaattccagagaaatatcagaacaacccacgacctaccccccagcgaaaatattaagtgaaattcatttagctgacactttagcggggcgttactgtgaaatcccagcggcgagcggaatctaaaatagatgatgctgcaaagttaggtgatgagacgaagaaggcttagagggatttggaagggatttcgcggggaagatgaaaataagaaaagaggtttaatttcggataaagtcctatgataaattgaaaaataaataatatttccagtaattctcgacgtgggcttcaaaaagtgagattttaacttacgtatagatgggcttcacgtttccctggcgataccagatgaccagctgcaccttgtcgacgatcccagttccgggcaccagatcgcatgggagcgccacctcggaaccaacggcagtgagaatctcggataggggtcctgaaaaggcaaagagattgcagaattagcataggttaaagttactttatgagttatcgcatttccaatggttttattcgctcgtgcggctttgcctaattgaaatatgtgacctctgacctgaccctatcaccagccacatcgccacccgtcctccgtgcgtggatgtgggtataactataaattgactgacagcttgatttccctttgatgataaagcgggttcgctgaaagggctcaagcgccaggcggtcactccattgtgcggattccgacatggagacatcatcggcgcagcgagtggcgcctctgcgccacgtaccaccgcagttccgcacagaccaggtcgatttgggcgaggttccctatgcggcgacatctatttccattcgatggcactggcgctgtgcgtgccgccgcccaggggggcaaaatggggggcggagcggtcttcaattagtcgtcgccctatggagatgggcgcgtgacacgaagtgcctgccgctcgctgcctcaatttccaagcaaaaaaaagacttgactctcaaaaaatgtttgtacatccttaatcagcatacatatactttaattatcagttaattctaatcgaacctctttatccgactcctcactattttgggtgttggcggctaagagccccccgccgcaaacaacttagacttcattgagccgacgcagtgtgttgttgttgattggtatgtatttggtattatcggagggcattgtaattatacaaattatattttccatattttttgtattgcaacaccagcagcagcaacaacaacggcctggcccctcagagggcgtgtcgtacgtgcctatatgtggatgtggagaatccagcgccaagtcccccgtaactttattgggtgggacccccaatggtggagccatcgaatgctttcccaaatattaatcaatatttatctagattagctggctaggtgccccctgcaccgccgccgataggacgggtcttcctgtttatttgtactgaaattcaattactttaatgcgtttcagttcgattaatgggaattttataacgattagcacacgggcgtatgaaaatgggaatctatgcaatgcaatgcagatggggcagattgggtgttatagaaatcaaacaatttattagaatattggtacagcgatgaaaactcgaatctgtttcggtaataatgaagagaattgcccaatctagaatctttgcgcggtttcataggcatttccggatttccgagcgccataagtaacatttgccattaggcaatcgaaatcggaatcggaatcggaatcctctaccgatatgcataaacacactcaaataaattagatgccacattgtcggtgga

SEQ ID NO: 31646 - DNA, 399 bp, DROSOPHILA
atgtcgccgcatagggaacctcgcccaaatcgacctggtctgtgcggaactgcggtggtacgtggcgcagaggcgccactcgctgcgccgatgatgtctccatgtcggaatccgcacaatggagtgaccgcctggcgcttgagccctttcagcgaacccgctttatcatcaaagggaaatcaagctgtcagtcaatttatagttatacccacatccacgcacggaggacgggtggcgatgtggctggtgatagggtcaggacccctatccgagattctcactgccgttggttccgaggtggcgctcccatgcgatctggtgcccggaactgggatcgtcgacaaggtgcagctggtcatctggtatcgccagggaaacgtgaagcccatctatacgtaa

SEQ ID NO: 31647 - protein, 132 aa, DROSOPHILA
MSPHREPRPNRPGLCGTAVVRGAEAPLAAPMMSPCRNPHNGVTAWRLSPFSEPALSSKGNQAVSQFIVIPTSTHGGRVAMWLVIGSGPLSEILTAVGSEVALPCDLVPGTGIVDKVQLVIWYRQGNVKPIYT

SEQ ID NO: 31648 - DNA, 2689 bp, DROSOPHILA
ttttcggcttgttcctctcgtttcttatcgcttggccaatgacattttattttcgacagacactttcgaattcgggcaaaagcacaaccgaaaatgaagttaataaatgcgggaagtggattgaagtgttggcgaaatatttgcttatcaaccgaaaaaggggtttcaatttgaatgtgccaaaataatgcacagggtgataaggctttgattaagataagcgagctaaatggaaagggaatggaacgaaagttacgaagatactaatctgaaagtataagtatctcatatcatatccctttgagctccgtttaaaccgaagagcagccgattaactacgagtccaatctacgtggaaatcaattagcaactgccggtttgcaggccataaaagtgaaaatccggagcagacagcataatgccacccaagagctgtcaatggaggaagaccacacaagtggacgcaggagtaggggaaaatggagcctggtcacgcacaggggagatggacgcaaaggaagggggcgtggcgaggaggagaaagatagagatcccgattgccagctcgaatatgaaattattcaaatgcagccacaacatataaattcaagttaatccgcacagctggacatcgcctcagtccccagatccccggaggcagacgagcggatctggttagtggggatctatatagagctatatatccatacccatagcgggtacaaggactctgagctgccagcccgctgatgggcgccagcttttaatcattattaattatccaagggccaggtcggaggagtataaatcacttgtgctggcgctgcaccatttccagtgggaggagcggctaatctattttaggccaacttgcaaaacgctgagaaatgtggctaattacagggggggggggggcagtggagcagccaccattcatttatatgaacataaatcgaaatgatacaattaactactatgtacatgtagatagtaggaggatctagaaattgctggccggcgatacagaggtctcgtcgtccatatcgaagtccatgttggcaccttgttcctcgatttctttagccctatagatggtgcacatttccacgtgctcccacctaagcgctttcctggccaactgttcagcctcgctgaggtttatgaaatcattccagtctttcgagagaaagtccacaatgttctccttatctctgccctttgcaccatacatcaccatgcgtgactttccacactccatgctgaataagtgaaggcccctgctgtcctggccagctatcatgacatttggggattcggcggtctggtacttttcgcaaaacatgtcccgcacctgggacacggtcacattctggccgcgatcccggactagatttgccacctttgaactcacttccagaactatgttccgatcgatgccggaacgaggtgcgcagcagctgaataattaataagttattttaaggcattgcaaattgaatagacttactaaatgcggtcatctattagatacatttcgtattccttcgagtcggtggccagtatcacggcgttggtactcttaagacccacgatgttgccttgaatcgacttggaactgtgggaatcaatagctagtaagtaaaagtatatatgatttcagtcacaaactcacctttcaccttccatcattttcaaatagactcccaaaagcgttcgagcagaaaagtgccagttaaatgagctgcaaagattctttaaaactttaaaagggcttgggaagtagaaaataaacttgagctgggtacaaagacctttcaaaactaatatttgctcaagtagattaaggccaacaaatcgtcaacgcctgtgtggctatccattgtctgaaagtaagtgatattggcagcccgaggctgtccgtcacctacgctggatggcgatcttcagatggcgatggcgatgatgatgatggggtctcgccaactggttggcactggccgagaaacgcgtctctgcgcagtttccgaggcagctgcacctgctggccctaaaaatagatccaaccagttggcgaagtcaagaccagaaggcctcggaatggtagacactttaacgagcctatcaatttaaagacacacactgtccgcgcaacgatgtaatcgatgtgttaattagcctaagcaggaacagggatcaacctacctagaatcggagtggatttgagcctattaccaagattctggatctgaatgtttgacgcacaattaaaagccaacttgattgcacggttcatattccatgtcacaagggatttgctttcaaattaataaggccctgacacagggttcaaaattaatacttgttttaatgccagctctatttgctgcaaaaagtggctcttcaagggagtgaaatacatcatacaaatgtgcactattaattaaataaaatagcgttaatgctaattaacacatgctaaagtattttttacgttggtatattcggtttgacaaagaacgccatcatctatcaactatgggtgttagttcaattaactttaatcaccattggatgtcaggcctattccaattaccaatggccaattggcttttgacagaggctgttctctctctgctttggcccgatatcgttttcccatttgacaaaataataatcgcgtgtggatcac

SEQ ID NO: 31649 - DNA, 582 bp, DROSOPHILA
atgatggaaggtgaaagttccaagtcgattcaaggcaacatcgtgggtcttaagagtaccaacgccgtgatactggccaccgactcgaaggaatacgaaatgtatctaatagatgaccgcatttactgctgcgcacctcgttccggcatcgatcggaacatagttctggaagtgagttcaaaggtggcaaatctagtccgggatcgcggccagaatgtgaccgtgtcccaggtgcgggacatgttttgcgaaaagtaccagaccgccgaatccccaaatgtcatgatagctggccaggacagcaggggccttcacttattcagcatggagtgtggaaagtcacgcatggtgatgtatggtgcaaagggcagagataaggagaacattgtggactttctctcgaaagactggaatgatttcataaacctcagcgaggctgaacagttggccaggaaagcgcttaggtgggagcacgtggaaatgtgcaccatctatagggctaaagaaatcgaggaacaaggtgccaacatggacttcgatatggacgacgagacctctgtatcgccggccagcaatttctag

SEQ ID NO: 31650 - protein, 193 aa, DROSOPHILA
MMEGESSKSIQGNIVGLKSTNAVILATDSKEYEMYLIDDRIYCCAPRSGIDRNIVLEVSSKVANLVRDRGQNVTVSQVRDMFCEKYQTAESPNVMIAGQDSRGLHLFSMECGKSRMVMYGAKGRDKENIVDFLSKDWNDFINLSEAEQLARKALRWEHVEMCTIYRAKEIEEQGANMDFDMDDETSVSPASNF

SEQ ID NO: 31651 - DNA, 6245 bp, DROSOPHILA
accaaatccaaattgatgtcctatgaggagaggaggaagtggggttcagcgaatgcaccgagtgggggcttctggaggcacttaccgtcacttcctcatgcgagaaagtgtcgaagaacagcagctcggacccgtcgtctacgtcggccatgttgtgtgcttaaatcgagtctttttcagtaaaatcttctacagtccggaagttttatttattttccgcaactgctagggatggaacttaagacgataagtgatcgatatcatcaattgctctactacaattggtaggggtattcaagagggtatgctttagaatatgttgaatacatctttaaaaactaaacaaaaattgtctcagtctagtagcttgcgcaaaacaatgcatcaaattttaacgtcacaattggctcatgtctagaaatgaattggattttttctcaatattccccatttttggtaatgatgctctcaatgttttctaaaagattgtaaaatagccctaaaaaccataggcttaaacctaacgcagggaatcgcactgattcagagtacatttgtttcccttcaatggacgcacgcaaatcatgtaaatttagttattatcagtaattcaaaatttacttcctctacaatattatcaaactataattcgaacctcttattataaataaagtgtgaactatcaaaaacgaagtagtgagaacgacctataagagttccataaaatagtcccataccatatatatcgataggctcgtgctgggttgtcgataagggaaatgttttggagaccggctgcagagaaaaacgcggattttgttttatttctctgttttgtgtattaaatcgccagatgcgcagcttaatattgtccaactcgtgaccgactagcgaattgtgtggaaaatgaggattctccttgttttctgcaagttctagaaccgcagtggcgcttgaacacgcaaccacgtgaaatccagcaacaacaagtctgcgcaacatgaatttggacgagttctccgacttcaatatagatcagcttctgggcccaagcgcaccgctgcaagatgctctggtggcgccgtataagcaggtgtcgctgcccaggagcaaccaagatgtgtacgccaagcgaagccggctggccgagcgaatagcccagaacgacgagctgatccgccaggtgaaacagctgcaggctcaaaacaaacagctggccgacctgcagcgcaccgcccaagaggtgacggatctgtaccagaaggagaagcaacagaggatcgagctggagaagcgcaccaagcagatcggcgagcgatgcggacagctggaaaaggagctggacgtacaggttgggaactgcgagaatctgcaggagcagctgcaagtgcggggactacccgtggaagccaaggatgtgctgtccatactcatgcagttctcccagcggctgggcgacgattgtggacttttgcggcgggatcagaacatcatgaagaagctaagggagcactgcaagactatagacgtaagcgtgcccacgccaaagagcccgaattcacgtagcaaacggaaagcccatcagcccggagtcaaccaatctacgcaaaccgacgaggaacccgctgatcccaagcccgcgctttgctctgttgctgtgcaagtggaaggtctgatagagacgcgcaaccaggccacgcaacacaagaacaccaccaccacccggggaaccactacagcctccttcatcaagcaccacgatgtgggcacatgctttcccgaaccaaagcccctgccaaatattcggcagatacttgatgaaatgctatcgtggcgagatgatgtcgtaattgagcccatgagtccgctgagcgatctgcagcaggagttgcagctcgaggacgtaccgaccaatgcgagtgtggccacctgtaccactttgtgtgatatacaccgcgagattgatttcgttaccgacctgccgacacaaataaaggtgtccgcctcgaggccgccctcacgaacaatgctggatagtgtaaaggaggaggccagatcctccagggagctcgccaaggagctgttcaactttctacctcaaaaccaaagctgcctgaccaatctgccgccgcaggccttcgaggagctgtggcaggtctttggccaaatggtgcttgccctgctgcagaggcgctccaatccgtccatggccacgccaccaagcgtcagtcaggcggatttcaccagatggttgtatgagctctatgagggcacggagaaccagacggagcagacctccaacggaagcaccagcaagagaggtaaacccattcaaagcgcaccagtgagtggattaattacgtccacattctttctagatttcgccaccagcacagagtgcatggatactggaacggatcccatcatccagtcgcccaacatcagccacgaaggacatgtcactccaattcgcctgccctccaagcccaaagaacgaaagcgaaagtccaagaagcgcaaagcggcagctacaccaaagccgatagccaagcgaaaatgtctggagatggagacaaacaatgaattagaagtagagcgcgaacaaacgccagaaacggcaatccaattcttaagcaatttggaaacttttaacatggccaactgtgataatctcgagatggaactggatgaggaagaactttatttgcttcagttgacgtccaacgcgaaacagaatgaaaataaaggaaatgttagggttcaggatcctgacgacttgaaaagccctgcgcagacttctaagttcccgaagtcagaaaatcatttgcctgcggtcctgaaagaaacagcttcgtctttgaaaggatatgacgagaaacaatgcccctttccggacaaaactgaagagcttatgcataaaaaaacttttgagatacaagaaaatattggcagtctgacagaattgcctccaaatatagatatttcggcgtatccagtttcaatggcagaggttagaattgtctcctcaaataaaccaagcgaaatggaggtgaatgcttcagaaggcaccgattcacacttggataaaagtgtctcaaatttggatacaggctcaatgagcctattcggcagtgattcagatgtggaatccgaatacagtatagagcaaatggctcccgagctaagtgactccgatgatactttcgataatagcgaagaggattgcagatctgcggatgagccaagcaactccaaaaaaataaggaatagttccttgttcggcagcgaatcagaatcggatgaaagcgaggagcgtgcgttggaagcggatgatcttactgaagcggaagcaaaggtggaagagaaggaatcagaacagaagtcatcagatgtggctcccgcagcatcatctgggaaactattagtagttgaagcagatttggtaaccaaaacgcagcctttgttcgttgagaaactggatctagagaacacgcagcacacaagtacgtgtaccaacccaaaggaaacggatgaatccgaggacgagcacggtctggttatcgacgaacaaatcttcattagtcagcctgaggaaccacctttaacagttcccatagccgcaaaacgaaggagaacacaaagtgagctgaaaactttgtcgcccccaggcgaagttcgtttgactcgtcagagagcgaaacaactgctcgacgaacagaaatccggtccagaaaagggtctttcgctcgtagaacaaataaggaggcagcttaagaaagcaattaataaatcggagccttttaaaaaggattcgacgcatgattcaaaaaaggattcgacgcatgatttgaaaccattagagcatgaagatgagctgaaagcaatgcagctaggtacaaattttgagcctataaagctgtcctgttcaataagcgaggagtcacctgcctcgcctccagcttgcgagccaatggatgagcttgaccctccgcccatagaaatacctctagagcaagctgcttgcacccggaaagatgaccaacacaagtcgattgtacagcatgttcttaagatggacacgggtctggagaagcttgtggaagcgaatagaaaaactttgggcaagtcccaaccgcaattgtgtgcctcaataggcaaatatctgcaggagaacatgcagctggaatccacgtgcagcgacttggccatggatatctacaaggtgaccaagagtgaggccgtaatcgtaaatgctatgataacagtaatctgcaagatcggccttgatgatggcccagtggaacgcctgctaaacgccttaaagtatttgaacttctcgcagagatttttggctgagctagaggagcgtctattccgcaacaccaaggagcgaccagccactgagctggctctcaactacgtgcggctctacttgaaggcaaccgctctgcaggcgaccatgtcagcagggtatgagaatccagcgagactactgttggccaaaatactgtatcacttcgatcaggatatgccgccgctggtgatggaggtgttgcgtcaatttcccaccgcgctaccccaccgcgaacagcgggagtacgacaattcggatgccctgatcacggtgatcaagcacctgttgatgaaccggcagtacgacatgcaggatcccaacggcgctgaacgactgctgctgtccaaactgcgctttgaataccacttccagccctatgagcccagcaaacagcaggtgctggagaacctggtggggaagctgaaggccggccgtgaggaggagctgggctacgcctttgcgctcttctgccgccgctcaccgcatctcaaggtcgtagagagcgtggtgggggaacacctaatgccgctcgccaccagttactgtgatctcgctgctcaaaacgagttgtacgatgcccggcttgggcttctgctgcactgcatctctttggtactgaagccactgcccctggatactgatatctccgccttcgtaggcttcctgaagcgccttctcgtggcagtgccacgatccggagttcaactggcggccgtcaaggccagcctacgtctgcagagattcggattcaagtacactctggatgccctgaaggactacaggcccaactacgagctcgacccgttaacgcgggccatgattcgatgctttgcgaaacggaggaggcacttccgtcacgtggcggccactgggcggcgtacagagatttgagattcccttttatgaattgtaactatttatttatgtatgttattgtatagattttgaattaaactaaatgccaactgcgctgcggatctttacaaatttaaacttacaactaaaatacacaaaacgattgcacttaggttaggctggggttaaggtaagtcgtggacatgggacatggagcgcaagcaagtgaatgaaacaaaggaaagcgtaatcaaaatgtacaaaagtgcttagcgtggatttggacagaagtagctatacttaattcgtggactgtacaataacatggatctaggatgcggcatacacatacatcagcggcttctactactcgaaatgcctgcagagtcagccggaagcacccatgccgtgcgcgagggtgaggtataagtataaggtacttgtgatctccgacatcatttgcggtctagaagcgccaccgggcagggctcccagttccaatctccgccgtagagagccatcagttcatgctagatcagtttgttcagctgcaagtgtttgtattgggttagttaacgatgcaatatggaactcaaatgggcttccctaccagcgatcgccgctgatgctccttttccagtgcaacttgggcctgctgcggcgaaaatttgagcactgccgatatcaccttgacaagcgtctcgttgttcgtgttcccagttaggtactgaaatggaatatatcagttagttgggagtatatatttggacattatctagtttgattccccacctggaacatgatgttgcgcaagtactcgaattccgtgttggccggaacagcctcgctgtgttgcatggatacctgtcggcaagagaaaggaatcagcaatggaatcaaagggtgggtgcaccgctgctatggactcaccagggtttcatccagttgccgcgagagtttcgcattctgcagcttaagtcgctcgttggactgttcgagtatgaggaagttctcgcatttttgctccaggaacagg

SEQ ID NO: 31652 - DNA, 3918 bp, DROSOPHILA
atgaatttggacgagttctccgacttcaatatagatcagcttctgggcccaagcgcaccgctgcaagatgctctggtggcgccgtataagcaggtgtcgctgcccaggagcaaccaagatgtgtacgccaagcgaagccggctggccgagcgaatagcccagaacgacgagctgatccgccaggtgaaacagctgcaggctcaaaacaaacagctggccgacctgcagcgcaccgcccaagaggtgacggatctgtaccagaaggagaagcaacagaggatcgagctggagaagcgcaccaagcagatcggcgagcgatgcggacagctggaaaaggagctggacgtacaggttgggaactgcgagaatctgcaggagcagctgcaagtgcggggactacccgtggaagccaaggatgtgctgtccatactcatgcagttctcccagcggctgggcgacgattgtggacttttgcggcgggatcagaacatcatgaagaagctaagggagcactgcaagactatagacgtaagcgtgcccacgccaaagagcccgaattcacgtagcaaacggaaagcccatcagcccggagtcaaccaatctacgcaaaccgacgaggaacccgctgatcccaagcccgcgctttgctctgttgctgtgcaagtggaaggtctgatagagacgcgcaaccaggccacgcaacacaagaacaccaccaccacccggggaaccactacagcctccttcatcaagcaccacgatgtgggcacatgctttcccgaaccaaagcccctgccaaatattcggcagatacttgatgaaatgctatcgtggcgagatgatgtcgtaattgagcccatgagtccgctgagcgatctgcagcaggagttgcagctcgaggacgtaccgaccaatgcgagtgtggccacctgtaccactttgtgtgatatacaccgcgagattgatttcgttaccgacctgccgacacaaataaaggtgtccgcctcgaggccgccctcacgaacaatgctggatagtgtaaaggaggaggccagatcctccagggagctcgccaaggagctgttcaactttctacctcaaaaccaaagctgcctgaccaatctgccgccgcaggccttcgaggagctgtggcaggtctttggccaaatggtgcttgccctgctgcagaggcgctccaatccgtccatggccacgccaccaagcgtcagtcaggcggatttcaccagatggttgtatgagctctatgagggcacggagaaccagacggagcagacctccaacggaagcaccagcaagagagatttcgccaccagcacagagtgcatggatactggaacggatcccatcatccagtcgcccaacatcagccacgaaggacatgtcactccaattcgcctgccctccaagcccaaagaacgaaagcgaaagtccaagaagcgcaaagcggcagctacaccaaagccgatagccaagcgaaaatgtctggagatggagacaaacaatgaattagaagtagagcgcgaacaaacgccagaaacggcaatccaattcttaagcaatttggaaacttttaacatggccaactgtgataatctcgagatggaactggatgaggaagaactttatttgcttcagttgacgtccaacgcgaaacagaatgaaaataaaggaaatgttagggttcaggatcctgacgacttgaaaagccctgcgcagacttctaagttcccgaagtcagaaaatcatttgcctgcggtcctgaaagaaacagcttcgtctttgaaaggatatgacgagaaacaatgcccctttccggacaaaactgaagagcttatgcataaaaaaacttttgagatacaagaaaatattggcagtctgacagaattgcctccaaatatagatatttcggcgtatccagtttcaatggcagaggttagaattgtctcctcaaataaaccaagcgaaatggaggtgaatgcttcagaaggcaccgattcacacttggataaaagtgtctcaaatttggatacaggctcaatgagcctattcggcagtgattcagatgtggaatccgaatacagtatagagcaaatggctcccgagctaagtgactccgatgatactttcgataatagcgaagaggattgcagatctgcggatgagccaagcaactccaaaaaaataaggaatagttccttgttcggcagcgaatcagaatcggatgaaagcgaggagcgtgcgttggaagcggatgatcttactgaagcggaagcaaaggtggaagagaaggaatcagaacagaagtcatcagatgtggctcccgcagcatcatctgggaaactattagtagttgaagcagatttggtaaccaaaacgcagcctttgttcgttgagaaactggatctagagaacacgcagcacacaagtacgtgtaccaacccaaaggaaacggatgaatccgaggacgagcacggtctggttatcgacgaacaaatcttcattagtcagcctgaggaaccacctttaacagttcccatagccgcaaaacgaaggagaacacaaaagcatgaagatgagctgaaagcaatgcagctaggtacaaattttgagcctataaagctgtcctgttcaataagcgaggagtcacctgcctcgcctccagcttgcgagccaatggatgagcttgaccctccgcccatagaaatacctctagagcaagctgcttgcacccggaaagatgaccaacacaagtcgattgtacagcatgttcttaagatggacacgggtctggagaagcttgtggaagcgaatagaaaaactttgggcaagtcccaaccgcaattgtgtgcctcaataggcaaatatctgcaggagaacatgcagctggaatccacgtgcagcgacttggccatggatatctacaaggtgaccaagagtgaggccgtaatcgtaaatgctatgataacagtaatctgcaagatcggccttgatgatggcccagtggaacgcctgctaaacgccttaaagtatttgaacttctcgcagagatttttggctgagctagaggagcgtctattccgcaacaccaaggagcgaccagccactgagctggctctcaactacgtgcggctctacttgaaggcaaccgctctgcaggcgaccatgtcagcagggtatgagaatccagcgagactactgttggccaaaatactgtatcacttcgatcaggatatgccgccgctgcgggagtacgacaattcggatgccctgatcacggtgatcaagcacctgttgatgaaccggcagtacgacatgcaggatcccaacggcgctgaacgactgctgctgtccaaactgcgctttgaataccacttccagccctatgagcccagcaaacagcaggtgctggagaacctggtggggaagctgaaggccggccgtgaggaggagctgggctacgcctttgcgctcttctgccgccgctcaccgcatctcaaggtcgtagagagcgtggtgggggaacacctaatgccgctcgccaccagttactgtgatctcgctgctcaaaacgagttgtacgatgcccggcttgggcttctgctgcactgcatctctttggtactgaagccactgcccctggatactgatatctccgccttcgtaggcttcctgaagcgccttctcgtggcagtgccacgatccggagttcaactggcggccgtcaaggccagcctacgtctgcagagattcggattcaagtacactctggatgccctgaaggactacaggcccaactacgagctcgacccgttaacgcgggccatgattcgatgctttgcgaaacggaggaggcacttccgtcacgtggcggccactgggcggcgtacagagatttga

SEQ ID NO: 31653 - protein, 1305 aa, DROSOPHILA
MNLDEFSDFNIDQLLGPSAPLQDALVAPYKQVSLPRSNQDVYAKRSRLAERIAQNDELIRQVKQLQAQNKQLADLQRTAQEVTDLYQKEKQQRIELEKRTKQIGERCGQLEKELDVQVGNCENLQEQLQVRGLPVEAKDVLSILMQFSQRLGDDCGLLRRDQNIMKKLREHCKTIDVSVPTPKSPNSRSKRKAHQPGVNQSTQTDEEPADPKPALCSVAVQVEGLIETRNQATQHKNTTTTRGTTTASFIKHHDVGTCFPEPKPLPNIRQILDEMLSWRDDVVIEPMSPLSDLQQELQLEDVPTNASVATCTTLCDIHREIDFVTDLPTQIKVSASRPPSRTMLDSVKEEARSSRELAKELFNFLPQNQSCLTNLPPQAFEELWQVFGQMVLALLQRRSNPSMATPPSVSQADFTRWLYELYEGTENQTEQTSNGSTSKRDFATSTECMDTGTDPIIQSPNISHEGHVTPIRLPSKPKERKRKSKKRKAAATPKPIAKRKCLEMETNNELEVEREQTPETAIQFLSNLETFNMANCDNLEMELDEEELYLLQLTSNAKQNENKGNVRVQDPDDLKSPAQTSKFPKSENHLPAVLKETASSLKGYDEKQCPFPDKTEELMHKKTFEIQENIGSLTELPPNIDISAYPVSMAEVRIVSSNKPSEMEVNASEGTDSHLDKSVSNLDTGSMSLFGSDSDVESEYSIEQMAPELSDSDDTFDNSEEDCRSADEPSNSKKIRNSSLFGSESESDESEERALEADDLTEAEAKVEEKESEQKSSDVAPAASSGKLLVVEADLVTKTQPLFVEKLDLENTQHTSTCTNPKETDESEDEHGLVIDEQIFISQPEEPPLTVPIAAKRRRTQKHEDELKAMQLGTNFEPIKLSCSISEESPASPPACEPMDELDPPPIEIPLEQAACTRKDDQHKSIVQHVLKMDTGLEKLVEANRKTLGKSQPQLCASIGKYLQENMQLESTCSDLAMDIYKVTKSEAVIVNAMITVICKIGLDDGPVERLLNALKYLNFSQRFLAELEERLFRNTKERPATELALNYVRLYLKATALQATMSAGYENPARLLLAKILYHFDQDMPPLREYDNSDALITVIKHLLMNRQYDMQDPNGAERLLLSKLRFEYHFQPYEPSKQQVLENLVGKLKAGREEELGYAFALFCRRSPHLKVVESVVGEHLMPLATSYCDLAAQNELYDARLGLLLHCISLVLKPLPLDTDISAFVGFLKRLLVAVPRSGVQLAAVKASLRLQRFGFKYTLDALKDYRPNYELDPLTRAMIRCFAKRRRHFRHVAATGRRTEI

SEQ ID NO: 31654 - DNA, 2470 bp, DROSOPHILA
cgggagttatcgataacaagcgcagtattcattagggacgaacgcaactgcgggtcattaagtttatgaacgtgacgaaaaattttaataaacataaataaatgttacgtacaatgtaatttttatttaatacacacaaaagtaacaatttaattagttataattgataatacctacctccatgttttttaataccatcttggttcaagatattttccacaggtggcgcaggttatctttaaaaatatttggaagcctgttgaacgccctttcaattctttaaatatagatatatagaaagttcctaggtatgatgtattcaattttttctaacaatactactataatgaactgtttacacgctaaaactgaatgaaagctggtcaaacttgctaattatgcaatgatttagcattttaagtagccgctcgtgtttgaggaatcctcatgttgtgggcaaaaacgcttagttaagcaccctacagtttgtttttattcgaagataatgcagcatacgtttaaattgcacttctttatttataaaaaccgcgcaatagttcgtataactgtgttttcttgtacgtgaaatatacactcttttcataaattctattttttacaagttgttattctttttaagttaattgatttttagtcgattataacggcaggcgataaggccttagttattaacgaagaggaattgaaaaataacttataaagaaacacatcaacgaactttattgctttggttctgtaacgaagcggccataaactttagtaacctgttccagcacgagctaaagatgagcttctagttaaagcattcaaaatatggatggtttattacgcacttttcaaatacatatataatttttgggttactggtaagtggtagtgagcacttgggaacatacaaaagagagtgaaatgcattttagtaaatgtctcgagttcatccgtccgtgcggtcgccttctgccggtggatggatcaccgctcacttgtgcaggttctcgaggaactccttgtggcgctggatggcctcctcgtgctccttgatctgctggtggtggaactcagcctggtggatctggtcgttcttaaggcgatccagctgctccctttgctgcaacgaaacgaacaatgatggattctctcgattagccggtgcgaaatacaattagtgctagcaagtcgtaaaaagctaattgctggttagctaagcccgcccacccctgaagcttgccatcaatattgatcgactgtcatcattagctgccagccatataagaggctttactacaagagacaatatttggttaacaattttcagaccgaacccgtcacacgggcagacaaaaagttcggatatcgcctgaatgaccacgacaaacagtcgacggaagtctgtaaagagtgcgaaaaagatcgggggaaaaccacctgccgccaatgaacctgaatcattgtctgccgttctgcctgctcgtcttcaagccaccaagctaaaaagcctgttttcagttgatagttggctaccgaagtgagacgtcgaagaaagtgtcgttagatcggggtcaccgtattaaattattccgcattgttaggccgcatctggccaaatatcaacagacccttgctcttaattggtcgtcaacaagtagacaaagccaggccgcggtccacactcttcgatctccgccagccagcctgcctgcctctctgccacttatcaacgcctcaggaaccaacttgcttgataagcagctgcccttagttcgaacagaacatttaccatccgactctgctgcggaatggttatgatgcccctccggatactgctgatcgccttttcgctgacgctagcccagagctatggcgtcggtgtcaatggaccgcgtcccgtgcgcactgtagaaacgctgacgcagtggggccagctggagttcggatttcccacggcgcaggatcgggagaacgctcaggcggcgggtaatctggtgcccgagaacggcactcccatcgatgtgcagccacagtacatggccaatggccagatcaggctgttcaccactattccgcgcttcgtgacgggcattccctacaccttggccaccgtttcagcgacgcagggcaggaatggcccgctgctgcagccgtatcccaactactcctggcacaatgccaacggcgaggactgcgatcgcataacatccgcattcagagtggctgtaagtgtaaaatgttcggacagctaagttttttctacattgaatctcttccagatcaccgagtgcaaccagatgtgggtgatcgattcgggtgtgattggaaccacccagctgtgtccgccgcagttgctgcagttcgccctggccaccgatcgcttgctgcatcgcttccgcttcccgaacgacacatacatcccgagtggatcgctcttcatcacgccaaatgtactcgtcca

SEQ ID NO: 31655 - DNA, 138 bp, DROSOPHILA
atgattcagcaaagggagcagctggatcgccttaagaacgaccagatccaccaggctgagttccaccaccagcagatcaaggagcacgaggaggccatccagcgccacaaggagttcctcgagaacctgcacaagtga

SEQ ID NO: 31656 - protein, 45 aa, DROSOPHILA
MIQQREQLDRLKNDQIHQAEFHHQQIKEHEEAIQRHKEFLENLHK

SEQ ID NO: 31657 - DNA, 2702 bp, DROSOPHILA
gcaatattgtaaaatctatgcgcttgaaaagcacccatgttgctacctcatgcaatttttccagtgagatattagctctcatcattggccatgtcgcaaaatgcgggtgttttggccataaataatggaagggagtatgggtggaaaaaagctgtcaactccatgtcgagctcccagctaagtcagcattatcaccagcgaacaatgtcgccggcaccatcatcattaggcgacttttgagccccgaaacgtccttggacactcgcatggatttggatgggtgtttgggcgcggatctggctgacaaaatgcctttgacatttacaaatgaggcccgccagcgaattaatgagccacgcccaattagcaagtgcgtcacatgcgagactcgcaagatccagtagcagcttctattgctcctggctaatgtattggaaaatggaattgaagtcgacgctgtgacaatttcttttgggagctcacatttttttctgcgcctcgcctgcagaggcaacaatttaattaatattacacaggcaggcgcagagatctcacaccaagcagaacgtatcttcaatgtaattttctcgtttgcccactttcgaggatgcaggatggctggcctggcaggctggcgggctggcgggctggcgggccaaggatgcgcgggaggacatcctgcgccgggccgcagacaatggaaagccaggagcgcacttgagcacagtttgaggcgggttgaatgcgccgcgcctatactcgcaagtgtgcacttgaaacagccagcgggccataactcagccctaaaaccgccagtcttcccagccgggttataaatataaaaatgacagaccaacaaaagcgaaaggaaggcaattctgggtgctcctcctccagtccactggttccctggttcactggctcactgcctcactggtccactgagccactttcggcgctctgctcaagttgctgcaaaacttattacattatattattcatgccctgccaccccaaagggttgctcctcattttgggttaagacgagctacgtgcccacacggtttcgaagcaaatcggttaacggcctcttgaaaatattaaagaacattttaagggcatttgtagagcaaactcaaattagtagtttaggccatcttggcaaatagctaaatttccatttccatttaacttgcattgcgaggcaagagtattttggtttcggtacttgaaatttcctaacaccgcatacattttgaatgcaatttcctggctgggccatcgccataaattgccatttttccctggcctgcaactaatatccgacgtatgcttcgcttgttgtctccgcaggatcttcaagaccaccggccgctcggtgcaggaggatgtcaacctgctgcacgcctccgtgctgtccatggtggagttcgacgatgatatattcgcggccggaaattgcttcgactggaacgagcatcccgcgcagccgggcctcttttgcccgttcgcctaccgactgccgcctccgaatctgggagcggttttcgccaaggatctggccatggagtatcactatctgggcaacacctccgaatggttcttcctggcgcgcaagaatgccgagaaggtgatagcccgcaacgagcagtatctcaagtgtaagtatatcgggcatgtcccctctgatttatttgcctgatttatgggtgaccccgatagcagcccctccgtaatacaaatacacgtacgtacggcattgaatgtttatttttgggagccttaatctgcgacttcattagtcaccgcccagacatcaggctgcgaatcctgttggtcctgcctaattgcatatattttacccgaccttttcacggccaagggtacccgaaaatgtcgcctgacagcgcaacaattaagctataatatatagtagaaatcggagtgagcagtccctttaacttggcaactccactttaaatggaaattacctggcccattcgcccagctttccctttaaatctacaatattcgaggcgatgcgatggaaggcatgctaatgaattttaatgatgttggcatatcccatgctttccgtgcttcccattcttgtccaacagtttgcataacttcagcaaatgcactcgacacgagcgcgccgcaacatttcaaaataatttgcaaattaaaggttacggttacgccacgtcgcatcgccagccgcattccccatttgccggcttttcccgttttcccattttccggcttgcgtgtgcaacggtggcatgcaaattatttgtttgcttgcctacaactaatactaaatgccgcggttgttccacaacatgggcttttctgtactttccctgcctttccactgagcgaattggttttcgaaattccgtgcctttgaatttggaaataaaaaaggccttaaaaaaaaactaactttgcaggtaccacgaatcatttattccctacgaacagaatgaagtgtaccaccctgacttaatgattctccctttagttctgcaaatggaaggacataagtagaacactcaattttaaaatgcaaagattgacaatagttgctgcactttgacctttgccctgcccagtataaaaccttgaagataactttgtgggtattttgctccgtgtgaccacacacttgcattccctcacccgtagatacagagata

SEQ ID NO: 31658 - DNA, 369 bp, DROSOPHILA
atgccctgccaccccaaagggatcttcaagaccaccggccgctcggtgcaggaggatgtcaacctgctgcacgcctccgtgctgtccatggtggagttcgacgatgatatattcgcggccggaaattgcttcgactggaacgagcatcccgcgcagccgggcctcttttgcccgttcgcctaccgactgccgcctccgaatctgggagcggttttcgccaaggatctggccatggagtatcactatctgggcaacacctccgaatggttcttcctggcgcgcaagaatgccgagaaggtgatagcccgcaacgagcagtatctcaagtgtaagtatatcgggcatgtcccctctgatttatttgcctga

SEQ ID NO: 31659 - protein, 122 aa, DROSOPHILA
MPCHPKGIFKTTGRSVQEDVNLLHASVLSMVEFDDDIFAAGNCFDWNEHPAQPGLFCPFAYRLPPPNLGAVFAKDLAMEYHYLGNTSEWFFLARKNAEKVIARNEQYLKCKYIGHVPSDLFA

SEQ ID NO: 31660 - DNA, 2354 bp, DROSOPHILA
cgcagattagctatgcgatctctgagaatagccaggtggcagcggaacaaggagatgaacactatggcgtaggtgtcggacatcaactcctgcatggtgccaatggagaccacacagtactccaggatggaggcaatccatagctgccaatggcctttccgccagtccaccagtgggttgtacagctgccaaggagctttgccagcgaaaaccgaagtgaacagagttagaaagcagaagcccaagtacgtggacaagaacagaatcacgatgagattaacccgtgccaccatcttatggaaaattcgacgctgtgtcgtagtcacacatctcttgtccagggacgagataagctcattcatccggcgaaaacgccacatctgggaataagttacgcatgacttgatcacgttcccgatgcagttgatatccacctgcagggaggtcaggaactccgtcggcgtgaatctatcgaagtgcttcacataggtgaggctcagtccgagcggcaggtacacgatacccagccacatcgtggtcagagtccacagggagtagatccatcggagcagagcccccttgggcggggtccagcccaggaaaaatgcgatgcggtagtagtagtcgctggcatcaagggaactcacctcctgatcaagtggagcagtttgcaggcgcttgaagaagaacttggtcatctttgcggggtggattaaatacttctagagcggagattcgcttgaaggggtttttatacggcagtattgccactctgatttgcttttaatgtcgcgtcatttttggtttattcatcacagagtcccgagtcatccaaggctacacgtttgcacttataaagtcattagtcgcaggattgtcttaggcaacgcaaacagccaaggtgaagcacttgcagaaaaaatagtttacctcttacttgaaagttgagttaaatattcccatttcccagactgtcacacaacatacaaagcagtttgcaatgaatatagtcattaagagttgtgaaaatcccttcgatttctcgctgtgtaccccttggggtgcactgaatccgagagctgctgactgccgtgaaaggccgatcgatttctgggtcctctaattacagtttgcataatggataacgctattgaaacccttccgtatccttgcagcctttcatctctactcgaaccgcacggaggagcgcatcgaggatgacacgctggctgtgaaatacgaggacggcagatggtcaaaaccgtactacgattgcggcggtggcaacatttggatgcttacctacacggtgccgttctttggttatgaaaacggcacatatcacttcaagtgagtatggaaatcattgcccactgggggtctgagtatctatatcaccaaagtcatattaaatgtgaatataattctagaatgaagaaaatacttcaggttctcccacttgttgggttataagataagatatatagcaccctacattatttttgaactatctggcataactattgcccccacattcatatacctcatatattaaggattaacgagtcctttttctgcttgcaacgcaatgggtacaatgcacaagtgcggcaagtacatgcacatgacggatgccaccagatgagtattttataaataattcgcagcatgggaaatttcgaaagagaagtgcaatggtgcgctaagtgccagccgagcaatgcagttttcccagcgagcagccgccgctggcagcgacagacaggcgaatggaaaggaaaggaaagccggaaaattcggaaaactgagcgagtgccagtttcttggcttttgtctagagcggaccaagtaattgaatagctgaatggctgctctcgggcgcccttttcgggcttttgggccgagttccagtgtggcacgtgcaatgtgccaccaaccgagtttaagttttactactttgcaacttcttcccaaaatcgacggactgggtgcacattccgctcacgcaccggcccaaaacagagttctttggtcggggaacagcgtgttgtaaaactttctgctctttcaagtatctcgacttcgttcttggcttaaataatatcccccccatcccctctttcatttcattgaaatagttttgtattttgctttgctctatggcaactttttcaattgaatgatttcgcgttatctggtttgatagaactctgtttacactgtcgccgatcaagcaatgtaaaactgataaataaaacaaaattccccttttcatgtttaaaactatttgtgcacccaaaagttgaagagggcattaaatgcaagaattaacgttgcgaaagtaaatgctaatg

SEQ ID NO: 31661 - DNA, 201 bp, DROSOPHILA
atgaatatagtcattaagagttcctttcatctctactcgaaccgcacggaggagcgcatcgaggatgacacgctggctgtgaaatacgaggacggcagatggtcaaaaccgtactacgattgcggcggtggcaacatttggatgcttacctacacggtgccgttctttggttatgaaaacggcacatatcacttcaagtga

SEQ ID NO: 31662 - protein, 66 aa, DROSOPHILA
MNIVIKSSFHLYSNRTEERIEDDTLAVKYEDGRWSKPYYDCGGGNIWMLTYTVPFFGYENGTYHFK

SEQ ID NO: 31663 - DNA, 3086 bp, DROSOPHILA
aatttgcatatttaaattgaacaatcacaaagtagcaaacactcgaccgtccacccacacacccatacaccacgcacacacacacatatctgtgtggcgcattttaaataactcgcgagcgcaaaaggaatatcgtgttgcatactaagaggggcacacataataaattcaattttggccagcgtcgactgctccgctcgcttaatttcacagccataaatctaaattcatcgggcagtgggggaaataaaacgtctgcttttaatacacttaacggaaagaagggtcacaagccggttgaaatccttcgtaaattttggagccatagtacgtttccttacgctcgaaaattttgtttgtttttcccctattatttgaaacttgatatcttttgagtggacttggcttaaatcataccgacaggctttcaaccgaattgaatggccatttatcattccgccagcgaagtggatgtctgccactctgccaagccgcactcaaaaccacaacagggtccaactttcctaccacattcccacactttcactctcgctttcacttccgcagacggtacaaacattacgcatttgaatgtggggtcgcttttcgggggtttggggagtgcgaaacttttgacatggacgcgcaactttttagtgcaaaagttggcagcggaaagcaggagcctcgctttttagcgcgccatgaaaacagctttcacttccacagcagatcgtatctcctctatatttgttgcgatttctggttagcccttgggctgccagaatacaaaagaccactgacttccaacaaccaatctttaaattgctgctgacgtctctttaactgcccaatttcggggtgaccataactataaagccatacataataatacaatatatataaatatattctacttttatccaaacccccttcttctgcccgcccagaaaccaagctgtcggaccaggaggcgctggaggagatccgccagctgagcatgcagctgcagcgcatccaggagatggctccgcccaagggcgtggcggttatgacgatctccagcctgctggacggcctaaagacacccggtggcctaatggttgtggcggcggcggcgggcgccactgcccaaggccactcggccgccaatcgccagagcgcactgcccctgctcgccctgaacgtggagatgcagaagtacagccagcagaacaacaactccaacgggggtcgggggagtggccgaaccagtattcccaccatggtgctggaaacgccgcccagctcgacgcccccgtcggcggcttacgaggagcgggccgtgaacacggagctcagtggcgacgacttccgggagcagctgctgcggcgaacggccgatggccacatcatctgcagtcgctgcctggacgcgtccaaggagcactactactgctgtccgccgcgcagcgcctgcgaccatctcggctcgccgaaggaggagggcagcctgagcttcgccaacatcaagctggagtgtatgtgctcccagtcggaggaccttgaccaggacgtgggccagcgccagcggaggcccacggtgcgaacggcggccaccaatacgccgccgaccagctgcaaacgggctccacgcaacctgctggaggccgagctcagcatttcgtatcaaatttgtgataactgtagaagtaagtacaagctaactggccgccgacgcagcggcagctactcccaggctcaggagaatccccagctgggccagcagccggctggacagttgcccatccaatcccgcagcaccgagcttctggaccgcaccaccgccgctgaggtcgagaccgaggtcgaggcgaggaccaaggcggcccactccacggacgacatagtcctgtactccagtgcacccgaggagctggccgctcagctggccgagcccgtggcggcaccctccctgggcaatgtgtccagcaactcgaacaactccaccagcggcagtggaggcaccactcgacccaagcggccagacaagttggtcttggacctcaacgatcggtccaagtataccaaagaggtttccgtgtagagcgaataaatcttggccagcaatgcagaattctgttctagatttatatgttgatgttggagggttatggttttggaagttacttcgccattgcagcccgaaataattaaattgttggaggaaatgtggttggaaattgtaattgccgaacagattttgcattgattggcggcaatcgaaaatgttttatgcttaggccagttgaattatcaaagactttactaaattatatttgtacaactaactagataactgattaatttagctaaacataggcatatgtaagtcggagtggaaaagacgcgatttcagcgaaagcgacggcgtttgcgatttgcattgctaagcaaaatgatttgcaactataatgagccccgaatgttgtgaatttattggaatttggcacacaccgcaggcgcaaaagtcaacaatgcagtttcgctgaaagtcatgtgctttcgatagaatattaataaaatttacatttcatgtgtgtagataattaaatctaaattgcttactaattgaaaatcgcagcgagtcatttccaatggaaatgatttgcgcactcataatgcatttgctgttatatttactatattaagccatatttaagtgccgatctgatctattcaaaatgggagcccaaccacatgcacacactgttcattggccataatggccactctgtaatataggtaatgataaataaaatgtgttgatgtgagctgtacaatatacacatatctcctacaaattccaaactcacacaatacgaaaccttccaactaatatagtgagtaaataattgtagctacaattaagcattaattagatgtcccacaccaacctacactattatcaaaatacttcattatcaataaataacctttgccgaatcgaaatcccatctgcatcacggaaaatgacatttgcgaaatctgcgttgtcgcttgaaaagacccgaacaacaattgtagttaagtgttgatgttattga

SEQ ID NO: 31664 - DNA, 1086 bp, DROSOPHILA
atgcagctgcagcgcatccaggagatggctccgcccaagggcgtggcggttatgacgatctccagcctgctggacggcctaaagacacccggtggcctaatggttgtggcggcggcggcgggcgccactgcccaaggccactcggccgccaatcgccagagcgcactgcccctgctcgccctgaacgtggagatgcagaagtacagccagcagaacaacaactccaacgggggtcgggggagtggccgaaccagtattcccaccatggtgctggaaacgccgcccagctcgacgcccccgtcggcggcttacgaggagcgggccgtgaacacggagctcagtggcgacgacttccgggagcagctgctgcggcgaacggccgatggccacatcatctgcagtcgctgcctggacgcgtccaaggagcactactactgctgtccgccgcgcagcgcctgcgaccatctcggctcgccgaaggaggagggcagcctgagcttcgccaacatcaagctggagtgtatgtgctcccagtcggaggaccttgaccaggacgtgggccagcgccagcggaggcccacggtgcgaacggcggccaccaatacgccgccgaccagctgcaaacgggctccacgcaacctgctggaggccgagctcagcatttcgtatcaaatttgtgataactgtagaagtaagtacaagctaactggccgccgacgcagcggcagctactcccaggctcaggagaatccccagctgggccagcagccggctggacagttgcccatccaatcccgcagcaccgagcttctggaccgcaccaccgccgctgaggtcgagaccgaggtcgaggcgaggaccaaggcggcccactccacggacgacatagtcctgtactccagtgcacccgaggagctggccgctcagctggccgagcccgtggcggcaccctccctgggcaatgtgtccagcaactcgaacaactccaccagcggcagtggaggcaccactcgacccaagcggccagacaagttggtcttggacctcaacgatcggtccaagtataccaaagaggtttccgtgtag

SEQ ID NO: 31665 - protein, 361 aa, DROSOPHILA
MQLQRIQEMAPPKGVAVMTISSLLDGLKTPGGLMVVAAAAGATAQGHSAANRQSALPLLALNVEMQKYSQQNNNSNGGRGSGRTSIPTMVLETPPSSTPPSAAYEERAVNTELSGDDFREQLLRRTADGHIICSRCLDASKEHYYCCPPRSACDHLGSPKEEGSLSFANIKLECMCSQSEDLDQDVGQRQRRPTVRTAATNTPPTSCKRAPRNLLEAELSISYQICDNCRSKYKLTGRRRSGSYSQAQENPQLGQQPAGQLPIQSRSTELLDRTTAAEVETEVEARTKAAHSTDDIVLYSSAPEELAAQLAEPVAAPSLGNVSSNSNNSTSGSGGTTRPKRPDKLVLDLNDRSKYTKEVSV

SEQ ID NO: 31666 - DNA, 2597 bp, DROSOPHILA
ccagtgtggcacgtgcaatgtgccaccaaccgagtttaagttttactactttgcaacttcttcccaaaatcgacggactgggtgcacattccgctcacgcaccggcccaaaacagagttctttggtcggggaacagcgtgttgtaaaactttctgctctttcaagtatctcgacttcgttcttggcttaaataatatcccccccatcccctctttcatttcattgaaatagttttgtattttgctttgctctatggcaactttttcaattgaatgatttcgcgttatctggtttgatagaactctgtttacactgtcgccgatcaagcaatgtaaaactgataaataaaacaaaattccccttttcatgtttaaaactatttgtgcacccaaaagttgaagagggcattaaatgcaagaattaacgttgcgaaagtaaatgctaatgcttgtaagccatcgcactaatgacagctgttaactatcaaaaccctttcatcagacttatgacaaaacaccacattgcgagtgggcgtggccatgggcaaagggggcgtggcagttggtccacacttctactctacttcatgcataattcgcaattatcaatggctggcagcagacaacagcaaagcagacagcagattgcgaaagcaaaagcacagcaaaagcacagcaaaagcaaaagcacagcaaaagcaaagcacattttggctagcaaactattttcacttagtggctgagttagtttcggtagggagtggccaggattacgtggcttttgtttttcgaccaaccaaaattgcttttgactggcacgatggctgttcttgtcttgaaagtcgtcgtcaggcatttggagcaatgatttaaagtccaggacttagacagattgtacggaaatcccgcaacgagtttatttactttttcctaatgaacactttacctgttttatttcgactacatatcgttgtgtacatacatcattaccgcacatctcactatttgttcaagaagaatatttccttggtctcaatcattcgctgctccaccggactggcagtggccaagccctcgggagttggcttgtagcagtagcagggatacaccaatctggcttcatccgattcgggagtggctcctggccggggagtcgtcgtaaaccgcagcctctgttgccctggataacgaaattattatttacgaacgaaattgtttgatttgattatggtttaagatgctcaaaatcaaaacgcaattcatacatgcttttggggttggctttaaatatgatttaattgaaatgaatttgcctgcgggcagccaaataagcacagagtccgaaacatgttttaattaaatgcaattttcccaggtttaagttcacttgtaatttatagcgtattatcccacaatgacttttgcatatttatttattcaattagagttttggttctgtactcacatagcgactggtagtactgtttgtgccaccagctcaactgtggtttcggcgactcggagcgaaatagggaggcccgcgaggttgcaagacccagaagaaatagaaccaagatgcgcagccacttggagaccataactgtttgcaaatatctcacccagttggccgcctctttcgggaccttggctaatggctttcgtaattattgcaagcacttcacttcgctctaagtaagcgtttgaaatttaattacacacgcctttgcgctgcgatgctccaattcagagctatttacactgccagctgccggatgccaggtggacttttcaaaatttaattaaagcaatcaattataaagttagctcctcacacacatgcctacttagtgttcgatgactttgcatgctcgataaatttcacacgcagccagccggtgggcgaattccatgggtgcgcggggtcagaggtcgcaggattctggctttgtgcggctggcatcgagaacaggacctccagcgaacgtaaaggaagctgtctgctgctggcggaagcccagcaactgcctgcaattagttgcaacataaatttggcccgcccaagtggacagtggaggcactgtgggtcgaccggaagttgtggctgtggttgtcgtcggagtggaaaatacagctgattctcaagtttcccagcagatttgcggcacttgcagaaaaatcaattcaattggctttgaagttgatgtatgagccaattaacttctactaaactaactattttctatgccatttaataataatgtgtaaactgtacagtatactatttataaagcaagtttgcaacaaaatcattggattcagacacatgttattccagacacttttattatttaaatagttagataaacatgagcattcgcctgccatttcccactgtagcggtcctgctgaattaatgtggaaatgttaaaagttcgttagttcattctagtttgcaccgcgtggcagctgcacattgcgaatggttagcatggccggaatagaatgcagtccgcacaagcaggaggaggacgtcaaacaaagctcatttgttttagcggcttacggcgggaaactgggggccaaaagggccaaagttga

SEQ ID NO: 31667 - DNA, 312 bp, DROSOPHILA
atggtctccaagtggctgcgcatcttggttctatttcttctgggtcttgcaacctcgcgggcctccctatttcgctccgagtcgccgaaaccacagttgagctggtggcacaaacagtactaccagtcgctatggcaacagaggctgcggtttacgacgactccccggccaggagccactcccgaatcggatgaagccagattggtgtatccctgctactgctacaagccaactcccgagggcttggccactgccagtccggtggagcagcgaatgattgagaccaaggaaatattcttcttgaacaaatag

SEQ ID NO: 31668 - protein, 103 aa, DROSOPHILA
MVSKWLRILVLFLLGLATSRASLFRSESPKPQLSWWHKQYYQSLWQQRLRFTTTPRPGATPESDEARLVYPCYCYKPTPEGLATASPVEQRMIETKEIFFLNK

SEQ ID NO: 31669 - DNA, 2588 bp, DROSOPHILA
tcctactgcaagtgcaattgcaattgcaattgcaagcgtggctaaattaaatggctgacaaagtgagcagcatcagcagcccgcatcccgcgaggaccagagttttcttttatgttccgccaccaattgcagccggcagccagagaaaatggtggaaatgaacgcaaggacatggacttgaaagtggaaagtgccaaatggcaactgcgaaaagttgcaaacgggcggtgaaagtttgtcataaatcagaatattttaaaagtgtttgccctgacagaacaagaagagcgaaagatgtgcactgtggcagtcataagccaagattatggccgggaacttgtgtagccatgtcgaactgcgatggcaaaaactgcgaacttgttagtcctttgccgaggggaaaatatcggaaatgaaatgtcctttaggtcgcggattgataaagtttgcgcacagccaacaagtgattatctcgggaattgatgttcaatgagctgcaatgtagtaatttcaaattattaaatctatatataagtttaaaatgggttctccgatctgctgctatgctgtttctgcagttaagcttttaccttcaattaactttctctaatttttataatttttcaagccctattcaggtagccagttagcatgaacaattttccgagatttcgctttgcttcgttgacgactgagtgcaggcatttaagtccatcaggcatactaagtgacttccagcatcgccattccgcgaataccaatttaaattcaaatgcggactgcgacttggagctgcaatgacatcgaaagtccagtgatttgcattcggtgatggcaatggcaatggcggcgatataatcgacttagccggatagttttcgataccgcaggaggccagggaatccacaacagctgacaactcaaagcaaacaaatagacggacgaagctttgattgacatttcaattaaattacagcccaactcgctgtcgctggcgggaatgtttcgagtgcagaaagttttgctcgccgaatacgaggagatctacgagccggtgctggtggagaatcccttcacgctggtggacatcaagggcgtgggactgcgccagtaccatataggcctcacctgcaaccgcctgatcttcggctgcgacaactttgccaagtgcggcgatgagccgggctttctgagccgcggcctggatccggagatcgagagcttcgagctggtcagcatgctgccgctgcagctcatccggttccacttcttccgcaaggcaacgcgctgcctcatgatgctgaacattgtcgagccgccgggcgaacctctcaccattctggagcaaccgatgatcttcgagttcggcggctttctcttcaagcagcacttctggcatacgtggcgcgagcgggtggccaccattcgagtgatgcagccgctctacggccatataaccggcgcctcgcccttctccagcaccgacgtccagctggacgaggagaccatagcggtccaggtgcatccgtcgcccagatccccttcctactacagtgcctgccatgcgggagcaggcgattttggttagccattctcgagcggatttcgagccactttccattttctattaacagattgcgcctctaggttcgatttgcctgctaggcatttccattcagtcagccgccgcctgtttatttatttatattaaaagcaggacgctctttccaccttaagaacagctatttttggttagttagaagtagctttcgatgcccggagcgaaaagcagagcctacgagaaaaggtccttgaacacacttaagggctcgaaaggcggcttgttttgttaagacgattaaaatctgttaataacctgaaactttataaactgtattccatttctatgcgcttcttgcttgttaatcaatacgaaaattttaattaaataaatatgcaaatacatgaattaaatacatacaaaagtaacatctaccacatacttgacatacaaagaacatccatttttacatgactatagggtatttaccgcttcgatgcttccaccgattccctccgattttcgttattgtttgactccatcttggcctgggtggttaatgcaatcagcaggatggccacaacaggcgaccgaggctctggttttggcggcttgttcgcctggttgtttatttgggaatgggctggaatcggccaagattccgggctgagacgggggtgatgacgacggaaaaatgttgtattgatgtgctcgggcttttcggctattttttgctcgccaggccacaagttaaccaagagccaacaaagttttcaatttgccgacaaacttaagccgcaaccacagcatttgtcgacgttgaccgatagcgggggggtgaaaagggggcagggcactggaggtcctgcgtccaggacatgtctgtctccgggtgagcgtgcagctgacaccaaaaatcaattgcaatgaaatgctgggcgaataaaacaacaggccgacggattggcaaaacaaaaaataacaacaaatcgtcattggccctatttggtttggggcatttaatggt

SEQ ID NO: 31670 - DNA, 588 bp, DROSOPHILA
atgtttcgagtgcagaaagttttgctcgccgaatacgaggagatctacgagccggtgctggtggagaatcccttcacgctggtggacatcaagggcgtgggactgcgccagtaccatataggcctcacctgcaaccgcctgatcttcggctgcgacaactttgccaagtgcggcgatgagccgggctttctgagccgcggcctggatccggagatcgagagcttcgagctggtcagcatgctgccgctgcagctcatccggttccacttcttccgcaaggcaacgcgctgcctcatgatgctgaacattgtcgagccgccgggcgaacctctcaccattctggagcaaccgatgatcttcgagttcggcggctttctcttcaagcagcacttctggcatacgtggcgcgagcgggtggccaccattcgagtgatgcagccgctctacggccatataaccggcgcctcgcccttctccagcaccgacgtccagctggacgaggagaccatagcggtccaggtgcatccgtcgcccagatccccttcctactacagtgcctgccatgcgggagcaggcgattttggttag

SEQ ID NO: 31671 - protein, 195 aa, DROSOPHILA
MFRVQKVLLAEYEEIYEPVLVENPFTLVDIKGVGLRQYHIGLTCNRLIFGCDNFAKCGDEPGFLSRGLDPEIESFELVSMLPLQLIRFHFFRKATRCLMMLNIVEPPGEPLTILEQPMIFEFGGFLFKQHFWHTWRERVATIRVMQPLYGHITGASPFSSTDVQLDEETIAVQVHPSPRSPSYYSACHAGAGDFG

SEQ ID NO: 31672 - DNA, 2345 bp, DROSOPHILA
gacagtgatggatgagtctcgcatttattgaattccaacgcatgactgtgcgtcttgtggcacatatgcaaattcgtgggcttaatagctaaatgctgattggtatatatttgcacaaatcgaatttatcgctcgggggcactttaaagagcagttgagattcagccagtcgcctttgattgaatacatttcggctcgctcttcgcttggctttaataaaattaagaatttaatttataatcaaagaacgcatcaaattattagtttaaatgggttttaaaatgagtggaaaatatgttgtgttctattgctctgtgccatttaaagcagtttcacataacttcatggtcattaacagattagttatgcagtgttttttttttacgaaccagaacggctttaacaatgcgataataacaaatgtttgaaatattaagtaccccgggaaatattagcgttatcagtaggtttttctcctctccgtctttcatcaatgcttatctataaaatgtaatctgtggaaggcctcgatttcacagaattatttaattactcgcgctctgcgaagtcgcttatcaaatgttgaacagagctgagtaatgcaagtgcattgattagttgactctaagccttcgcctcaagtggttgactttctcaagtcgggtcttagttttaaaatcgaagtattttaaagtgacattcatttcaaatgaatagtttaaagtgctatttatatataaaaaatacatatacaagcatgtcaaaaaaacaaactaaactattaaaataaataattttcttaaatgtatgcaaaaattgttctcggtgtagaatttcttagaagtattattagtcgcttatcaagaactcagccgagcgaatccagagaacttgttgtttcaagaactcacattaagtgaagctaagacctggaataagtgtatacaaagtgttcctgtaaaatcctgtaaaagagtacaaagacttataaataaataggatgagttccttcgcccgggttcccagcacacctcctccttcgtatgaggaggcaatgggctgggaaacacggagatcacacagcaccacgtggctgctcgcggagaatacctcatcactcatgatctgtccaatgtgccatgacgagatcgagacgaccacaaagatccggcgccgctggatcgcctacgtggcctcgggcatagtcttgttcaccacctgcggcattggatgctggctaatcccctgcatcctcgactgtttcaacgagatccatcactcgtgtcccgtctgcaaggcgaccctgggaatcgttccgcagcaggatcagaggtggccaacctaatttaaagtgcacaaaatgagcttaaagctttattatttaatacctaaaactaagtggatgccacaagctgaaaaaaagaattgtagctctaagttaatacagagttgtactgaataaacctaaaatcaatacgttaaacgcactaagactggcagattgaaaacgctttttcgctttcccctcgcttcaactaattcaatttgatttttaccggcggcaggttgaagttttcaacgaaccaaaacgtgccgggcatcgcaaagtttacgcgcacatgcctcctgaccacaggaaagggtgacccatagccgaaaggatttaagcccagactggcggggcatgctccgctggatccaagtttacccggcagcttctttcatgtggtggcttccgttggatgcgtggcaacaaacagcagtgtggcggcaggaaattattaagcaaacattttgtcgcatgcctgaaaaatcgcggcattctctggtctagatggttgtatttgcttttgtgtcgagtgttaaagcgtctgccgcgcagtaagtaaaagctgttaatgcttctgatagacagatgacagcgaatcctttctcttttcacacacacacacacatgcacaggtggccccaagccaacgccagatttattgcatactttgcagggcgtgcattagcgtggcatctcgtcgcgtcacgaatcctcccttccccttcccttccgttggtaaagcggctagaaagtcgggatcgtagggtgaaactgggtaaaactgggaaaaacttgaagggaaagcaagaagcgaggaaaagtcaagcgagaacgtgacttggcgttggcaacagcgcccctgatgatgatggaactcctcatgttggtcacacatcaagccaaatggctgtcattaaaatggaagtctgcgaaatccctctgacatcaattcactttaaacccgatgtcatgtagataagtagtttatctatttttagtctcacgaataactgca

SEQ ID NO: 31673 - DNA, 345 bp, DROSOPHILA
atgagttccttcgcccgggttcccagcacacctcctccttcgtatgaggaggcaatgggctgggaaacacggagatcacacagcaccacgtggctgctcgcggagaatacctcatcactcatgatctgtccaatgtgccatgacgagatcgagacgaccacaaagatccggcgccgctggatcgcctacgtggcctcgggcatagtcttgttcaccacctgcggcattggatgctggctaatcccctgcatcctcgactgtttcaacgagatccatcactcgtgtcccgtctgcaaggcgaccctgggaatcgttccgcagcaggatcagaggtggccaacctaa

SEQ ID NO: 31674 - protein, 114 aa, DROSOPHILA
MSSFARVPSTPPPSYEEAMGWETRRSHSTTWLLAENTSSLMICPMCHDEIETTTKIRRRWIAYVASGIVLFTTCGIGCWLIPCILDCFNEIHHSCPVCKATLGIVPQQDQRWPT

SEQ ID NO: 31675 - DNA, 5749 bp, DROSOPHILA
cccactgccaggaggagatccgccaccctctggcgcttctccgccttggtggtgcgccggtgcatcttgaaatgggactggaatagaggactcaaggtaatcaagctttacttaagggatctagcggaccaaccataaagtacagatgctcgtaggccgtaaacgtcttcacgttgatctcgaactgcggcagaaagctggagatgcgcgtcatctgatgccgctccatggccatgccgttcaaaaccacatccccggtcaggttaccacgcagtcgttgcgaaatcgccgccagcagcgtggtcttgcccgctccggatccgcccagtatggcgatgaggtcgccggtcttcatgtgcccgctggctgcaaacaatagcgaaccgggccagaccgcaaatcaatcccattcccagagacacctaccacctccacatccggagcattgactcaccgtcttggaggatccgcagctcgcgcttcttgcggcactcgttccagaaactgtagttgctctgctcctgggcgggcacatagtagttcagctgcttccactcgaggcacagcgatggaccgccctggcccgacgagccgccggattcttgcatttcgagctatgtcagttcgatgggttcagtcacctcaccggcgaactcttataattctggctatgtgatgtgccgacttatcgcctccggagcaggcttatcttatctgaggttccgccgcctacaatgtatttgcatatctgctcgggatctttcgggggaaaccttaaatctgtccgtctgtctgtctgtctgggcaaacgcaatcgcggtcacacgccgtcgactgttcgcgtggaagactgagcggcaactgggcaacgccgatggcggcgacatggttttctacccccaacgggcatccagcaacccacctccggccccatccatcccatcccacaagtaacattaaacttttgaccgcatttggtttgccagctaattgtcgctcatcaattcacgtagtcgaacggaggcagttcagcggtggcggccaaagagaggcgctcgttgaagtcatgcagtcgggcatgggcatgggcattggcatggtggtgatggttggcctccctcatgtggtcgtctcttcgccagcagcgccgcagtcgacccaacatcaggcgtaacagggtgaacacgtccagcagcaagttgttgacgagtacatggaccatctccaccaggcccatcacactgacgcccacgaagagggccaggactcctccaaaggatactgaggagcacaattgtctataggacataaatatatagaaagtctgaagcggactcacccactaagtcctcgaagctgtagaccacatcccgtcgcatgcgcaccttaggtgggatcagatcccagcggaagctggaggtggcggtctcgctgctggccacctcctcgttgttcttcacgccccacgagctcttcttcaccgtctgcatggtgtactcgatctcggtgcaggtggacgggcacttgcagatgtgcagcgcccagatgggccatttgaagtccagcaggcactcgaatccggctggattgcagctgggcccatccacgtacgggtagaagaagggcacacagttgcacatctcgagggccatcacagcgcgacatctggccaggcacagggacttactgtagatctgtggaataaatggaataaatggatacctgaaagtttctaataggtgtgatgaagtggagcatcccagcacgtgcttagataacatcacattcctccagcgaatccagggaagctgctgtgaaatatgggttccttgcactgataccacttatcagctgctgttccatttgagttgggaaatttgtttacccgccgaaccgaatcgcaggccactttccccagataagatgagtctatatgtatgtatatgtaccttcaggttggacgtctcctcgttgttgaacacacacttgcgctgggcgacgcttagttggcgcaagttcttcgatgccctggagatggaggagcatataaatcaatccctctatgatgactgtctggatggatgatggggctatgtaataagaatggggggtctggtctacttacaccgtttccagcaccttgaacgaggcggttatctcgtcggacttgtggagggccacaatgttcgcctctgtggccgaaacctcaaatggcgagtgcacgtccagctgtaaggttgatttcatagttcagttcagagactctactcaatggaggccactgtgcatcacccaccacgcccgtgctctcatacaaatccatgcggatgtagcactgctgctttccatactggcaggacaggggttgcggcatcagctcgtaggcaacgggtctgaaagatggaagatggcaggatcagcgagaagttgacccatttcctgagcactcactggccactgagcaccgtggacatgggggagttgatggcgtaacaggctccgcgctccgtcatcaccctctggacatggacctggaagccggcgtcgaagctgctgatgacctgctcgaacggcctgtccacccgctggatcatctcgtacaggtcgatctggtcgaagcgctcgtcttccgcaaacttggccaactcggcgtagttgcccgcggtggcgttcaccacggcgtacaggaagtccatgaagtagaagtagtcctcgtcgatgatggacacattccacatctcctgtatgtactcattggccttgaaggagtcgatgtggtcgtagtagcacagcgtgactgctggaagggatccgttccagccgcggtagtctcggtccacggagatcacggtgggcgagctgaagtagcgctccaactggaggcgactgagcaccagggcggcgatcacactgcttacgaccaccgccagccaaaacagccgctccagcagatggatacttctgttgacgcacaagctcagcgccaggagaccagtttcggctcctgcctgcgccacgacatcccttaagcggccgaagagccggccacagccagccaagatcaaccagagcagcgccaggagtcctcgaaggatcctggcagcggctcctctaatccaaagcaagactctttcgttggacatttatttaccaaatgaaaatcatggttagttggtcactgcttttatttagttgctttatatgcaagaactccattagtattttaatgctttgattgatttcgatgagatattaaggacaaaggaccggaaatgtcctttcatgaaagggtcatccccatgaccttccagctccataccaaactagcgattggtttcgctgacaatccaaatttttgataaatccgaccatctccagaaggttaatggtaaatgataaccccaccttggagtccattcatcctcaaacgtaaacccaattggatctgttgagggcaacgcccattagcgacttattgcccagtccgatttgaatgaggaaaatgacaatggccatcaggacgccgataaactgtcgatggacatgggctagaaagttaatgggttaatgggacacctgccagccacttaccccgcccaatgagcgagtgtccagcgtaacgattccgcaggcttccaggggctggtcaatactccgctggagctgcagcaggaagcgattaatggtcctctgcaggcgggagctgcagacctccaactcgttgagcagctggcaaaggttacatttctgggatttggatatataaatcattatactatatataaatcattatacttgaatatgaatgactacctgctccaggatctgttcgttgaccgacaggatgaaccagatacgaccgccatgcatggccaaccagagcaggcggtatacgaggagcacggactcctcccagagaggagtctcaaagaagttgaagatcaagtataactccacacagatgctgaccaaggaattgagcaggtttaacaccagatagagaccaaatctcagtagaaactggctgtggacctgctcgataagattgcaggtgtatctcatctcttcaatcatcagagcagatcctccacccgcatctactaggacagcaaaggcggactcgtagcaggcatccaacttggtcgaaccctgcggtggtctctgcagcaacttcagctccttgagacacatcctcatctggtccatcaccagccataggaaatggacgggctgggcatactggagcacccccagactcatcattagaccaggcaaattgtagacactgttactgctccaagtggtccagaactcgaagtcatagttgaccacgtcaaccaggacacacaggccatggaagactaaagtggtcgccatcagatgaagagtcctctgaccatgtctcttataaaccagtcgcttagctttgcctttgagtcctgtgatgatccgctcaatctggagttccgctccgtgagcaagtggacggttcaatacggcatagtataccaggatggcaatggtggccatatttccagggaactccatcagatagagcagtttttcaatagtgggtatctccactgtgaactccaagcacttaacaatgctgccagtccagatgtacataagcaggaacaggctccagagcgtgtggagccagcggagtacgcccactctcccactgggatacacgcccaggaaccgattgatggtcagcagcagattctcccagtacgaactgtccatcctgagcccgctttaattaatgactggaagtggcgacaagggtttacctctaattggtgtgattgatgattagattgcaggaagtgacatgcctaaatagttccaggaacctaaatgctgagtagtcatcatgcggagctcagcaacaaaaggcgctaaacttaagaattccccgagggaaaggtgagtagacatcgtcttttgagatgaatatatctatagttactcacttgcagactatcttccttcaatcctcaatatgcggaaagatacaaagaactttacaggactctattttggttactactcatctccgtgctggcaaacacggcacctataaccattctcccaggctgtcccaacagattctatcgattggtccacttgagttggatgattctgtggtacggattgttcgtcctgggctcctactgggaattcgtgctcgtcaccacacagagggtatccttggaccgctacctaaatgctatcgagtccgccatctatgtagttcacatattttccatcatgctcctcacctggcagtgcaggaactgggctcccaagctgatgacgaacatcgttacatccgacctgaatagagcttataccatagactgcaacagaaccaagagatttattaggctccagctgtttctggtgggaatttttgcctgtctagcgatcttcttcaacatctggacccacaaattcgttgtatatagatcgatcctgagcatcaacagctacgtgatgcccaatatcataagtagcatatccttcgcccagtactacctgctgcttcaaggaatcgcttggcgtcaaaggaggctaactgaaggcctggagcgggaactaactcatttgcacagtccccgaatatcagaggtccagaaaatccgaatgcatcacgcgaatctaattgattttaccaaggcggtgaaccggacgtttcagtactccatcctactgctcttcgtgggatgtttcctgaacttca

SEQ ID NO: 31676 - DNA, 2745 bp, DROSOPHILA
atggacagttcgtactgggagaatctgctgctgaccatcaatcggttcctgggcgtgtatcccagtgggagagtgggcgtactccgctggctccacacgctctggagcctgttcctgcttatgtacatctggactggcagcattgttaagtgcttggagttcacagtggagatacccactattgaaaaactgctctatctgatggagttccctggaaatatggccaccattgccatcctggtatactatgccgtattgaaccgtccacttgctcacggagcggaactccagattgagcggatcatcacaggactcaaaggcaaagctaagcgactggtttataagagacatggtcagaggactcttcatctgatggcgaccactttagtcttccatggcctgtgtgtcctggttgacgtggtcaactatgacttcgagttctggaccacttggagcagtaacagtgtctacaatttgcctggtctaatgatgagtctgggggtgctccagtatgcccagcccgtccatttcctatggctggtgatggaccagatgaggatgtgtctcaaggagctgaagttgctgcagagaccaccgcagggttcgaccaagttggatgcctgctacgagtccgcctttgctgtcctagtagatgcgggtggaggatctgctctgatgattgaagagatgagatacacctgcaatcttatcgagcaggtccacagccagtttctactgagatttggtctctatctggtgttaaacctgctcaattccttggtcagcatctgtgtggagttatacttgatcttcaacttctttgagactcctctctgggaggagtccgtgctcctcgtataccgcctgctctggttggccatgcatggcggtcgtatctggttcatcctgtcggtcaacgaacagatcctggagcagaaatgtaacctttgccagctgctcaacgagttggaggtctgcagctcccgcctgcagaggaccattaatcgcttcctgctgcagctccagcggagtattgaccagcccctggaagcctgcggaatcgttacgctggacactcgctcattgggcgggtttatcggcgtcctgatggccattgtcattttcctcattcaaatcggactgggcaataaagtcttgctttggattagaggagccgctgccaggatccttcgaggactcctggcgctgctctggttgatcttggctggctgtggccggctcttcggccgcttaagggatgtcgtggcgcaggcaggagccgaaactggtctcctggcgctgagcttgtgcgtcaacagaagtatccatctgctggagcggctgttttggctggcggtggtcgtaagcagtgtgatcgccgccctggtgctcagtcgcctccagttggagcgctacttcagctcgcccaccgtgatctccgtggaccgagactaccgcggctggaacggatcccttccagcagtcacgctgtgctactacgaccacatcgactccttcaaggccaatgagtacatacaggagatgtggaatgtgtccatcatcgacgaggactacttctacttcatggacttcctgtacgccgtggtgaacgccaccgcgggcaactacgccgagttggccaagtttgcggaagacgagcgcttcgaccagatcgacctgtacgagatgatccagcgggtggacaggccgttcgagcaggtcatcagcagcttcgacgccggcttccaggtccatgtccagagggtgatgacggagcgcggagcctgttacgccatcaactcccccatgtccacggtgctcagtggccaacccgttgcctacgagctgatgccgcaacccctgtcctgccagtatggaaagcagcagtgctacatccgcatggatttgtatgagagcacgggcgtgctggacgtgcactcgccatttgaggtttcggccacagaggcgaacattgtggccctccacaagtccgacgagataaccgcctcgttcaaggtgctggaaacggtggcatcgaagaacttgcgccaactaagcgtcgcccagcgcaagtgtgtgttcaacaacgaggagacgtccaacctgaagatctacagtaagtccctgtgcctggccagatgtcgcgctgtgatggccctcgagatgtgcaactgtgtgcccttcttctacccgtacgtggatgggcccagctgcaatccagccggattcgagtgcctgctggacttcaaatggcccatctgggcgctgcacatctgcaagtgcccgtccacctgcaccgagatcgagtacaccatgcagacggtgaagaagagctcgtggggcgtgaagaacaacgaggaggtggccagcagcgagaccgccacctccagcttccgctgggatctgatcccacctaaggtgcgcatgcgacgggatgtggtctacagcttcgaggacttagtggtatcctttggaggagtcctggccctcttcgtgggcgtcagtgtgatgggcctggtggagatggtccatgtactcgtcaacaacttgctgctggacgtgttcaccctgttacgcctgatgttgggtcgactgcggcgctgctggcgaagagacgaccacatgagggaggccaaccatcaccaccatgccaatgcccatgcccatgcccgactgcatgacttcaacgagcgcctctctttggccgccaccgctgaactgcctccgttcgactacgtgaattga

SEQ ID NO: 31677 - protein, 914 aa, DROSOPHILA
MDSSYWENLLLTINRFLGVYPSGRVGVLRWLHTLWSLFLLMYIWTGSIVKCLEFTVEIPTIEKLLYLMEFPGNMATIAILVYYAVLNRPLAHGAELQIERIITGLKGKAKRLVYKRHGQRTLHLMATTLVFHGLCVLVDVVNYDFEFWTTWSSNSVYNLPGLMMSLGVLQYAQPVHFLWLVMDQMRMCLKELKLLQRPPQGSTKLDACYESAFAVLVDAGGGSALMIEEMRYTCNLIEQVHSQFLLRFGLYLVLNLLNSLVSICVELYLIFNFFETPLWEESVLLVYRLLWLAMHGGRIWFILSVNEQILEQKCNLCQLLNELEVCSSRLQRTINRFLLQLQRSIDQPLEACGIVTLDTRSLGGFIGVLMAIVIFLIQIGLGNKVLLWIRGAAARILRGLLALLWLILAGCGRLFGRLRDVVAQAGAETGLLALSLCVNRSIHLLERLFWLAVVVSSVIAALVLSRLQLERYFSSPTVISVDRDYRGWNGSLPAVTLCYYDHIDSFKANEYIQEMWNVSIIDEDYFYFMDFLYAVVNATAGNYAELAKFAEDERFDQIDLYEMIQRVDRPFEQVISSFDAGFQVHVQRVMTERGACYAINSPMSTVLSGQPVAYELMPQPLSCQYGKQQCYIRMDLYESTGVLDVHSPFEVSATEANIVALHKSDEITASFKVLETVASKNLRQLSVAQRKCVFNNEETSNLKIYSKSLCLARCRAVMALEMCNCVPFFYPYVDGPSCNPAGFECLLDFKWPIWALHICKCPSTCTEIEYTMQTVKKSSWGVKNNEEVASSETATSSFRWDLIPPKVRMRRDVVYSFEDLVVSFGGVLALFVGVSVMGLVEMVHVLVNNLLLDVFTLLRLMLGRLRRCWRRDDHMREANHHHHANAHAHARLHDFNERLSLAATAELPPFDYVN

SEQ ID NO: 31678 - DNA, 2546 bp, DROSOPHILA
taaaaaccacttgttgcactgttttaaaggcactcgtccaattggagagtggcgcacgtgaatttgcgattcctgccggttggcgggcaactgaaacgcactcgctggcaggtaaaaaaacagacaattgccacggttttcggagcggagcgatgcgatacgatatgatgatgacagcgccaacgcgaacacacgaacaccagcgcagcgaaaaacaccaacgaatcgaatttggatggcgggcggcgaagcgaaggcggtggctggtgtggccagtgcacggccgaggcgggaataccactgagcggcaacgttggtattttattagccgggtggcaacgtctcgcggcgcgactgttaagcagtgtgaccgtttcgtttcgcttcgattcgaaattggatttcgaaatcattttgaaagattgtatagattccttagaactgtttatggtagttcagtaattattaattcagctttaatcacacgaacctcttccattaaagagtcaaaatcccgccataagcctatctcttgaaccttagtaaaactcgaactccactgcgttcaaggcattgctatcttatattatttttatacatccttcaaaatctctatgaaccaaacacgcatctgttttgcggttatttaaataaggccgagtgctaaagcactgctagaatggctgaatagctattcagtagaactcaaaacaatacccgagctgcctgtgtttgcacacttgcttagaataaactagatctaacaaatccacaattcccccattgttgacttgttcaaacaaatgtattttcgatagtcatcggccaaattgtctcaagaatatcctactaagccacgtgcggcaaatgatgatgattcggagcaaacacacagtctgaaaatgaaccaaaaaaatcgtgggtgatgcgtataaataccctaattaaatgcagagaaagtacagtacttgagtacagtgttcaacggacggagctaaagatgcgattccaattcgtcctggcctttggtcttattgccatcttggcgaccgcttatgctggtggcgataccacaggcaccggcagcacgggcaccgatactacggggaccgggagcacgggcaccgggagcacgggcaccggtagcaccgggagcacgggcaccggtagcacgggcactggcagcaccgggagcacgggcaccggtagcacgggcactggcagcaccggaagcacgggtacaggcagcaccggaagtacggccactggcagcaccggaagtacgggatcaaccacctctggcagccccagcacctcaactggctcatcctcgactaatccgtctccttccacaacctcgccctccacatcgcccaccacgtccacctccccgagcgactcctcatcctccggctccagcagtagctcttcgtcatccaagcggaaccgcaaggagaggcgtcgtcgctaccgacgtcgtcagagacgccaggagagacgccgtgagaggagggagcgccagcgccagcagcgccgtcggggctgaaatgggaatcccaactcacatgacattgtaactcaatgcaaataaaattgttacatgaaaaaccaatataaaccctagatataaatgtgaatgcaattttgtgttgcataccttaagacaccataagagaaatgttttcagtcctccacagaatcacagcatgtaccagcaagctttcttagctcgcatagctttctcactccatttggttctatctgaactagtgactcggcttcatactatcgtagtaacgaatttcctaaagtacagaacgcccggaaagtatgcagaacatatatgagaccttgtttcgaaataaactcacgaggctttagaactaaagataattaattccacgaagtgtttacgattcagtccaaaaaaattcgaaacgagcacaagatagctttcgttacaatctgaaagatattttatcggatcacagtactattagaatcatacaaaatatatcaacagatcgtcagtccataagctgctaaataggaaagtccgtgagagcctcaaagtccttggacccaacgctacctggtcatctcacggcttctgctggattcactgcctctaggcgaagtgggcgtggatcagccggttgggttgacgtacctgaaggtgatgctctggctagaaagccagggacaaatgacaaatctccaattagttagcaactaagcaaaacggttttttttggattggctggctgaacgtattgttagcatgtgtgcaaacacagtacattgtttattaaatagatgaatatgtattgttaagccttttgaacagaaagccatatttaaataacctctaagcttaaatatagattaagatggcatattgtacataaagaatgaattctcactaaaagaaaacttagaacaaactcctatttttcactttcatttgcaagttcctaatcgattaagttatcatctggaattatgtctgcacttagaccagttccacttgatcaactaactagatc

SEQ ID NO: 31679 - DNA, 546 bp, DROSOPHILA
atgcgattccaattcgtcctggcctttggtcttattgccatcttggcgaccgcttatgctggtggcgataccacaggcaccggcagcacgggcaccgatactacggggaccgggagcacgggcaccgggagcacgggcaccggtagcaccgggagcacgggcaccggtagcacgggcactggcagcaccgggagcacgggcaccggtagcacgggcactggcagcaccggaagcacgggtacaggcagcaccggaagtacggccactggcagcaccggaagtacgggatcaaccacctctggcagccccagcacctcaactggctcatcctcgactaatccgtctccttccacaacctcgccctccacatcgcccaccacgtccacctccccgagcgactcctcatcctccggctccagcagtagctcttcgtcatccaagcggaaccgcaaggagaggcgtcgtcgctaccgacgtcgtcagagacgccaggagagacgccgtgagaggagggagcgccagcgccagcagcgccgtcggggctga

SEQ ID NO: 31680 - protein, 181 aa, DROSOPHILA
MRFQFVLAFGLIAILATAYAGGDTTGTGSTGTDTTGTGSTGTGSTGTGSTGSTGTGSTGTGSTGSTGTGSTGTGSTGSTGTGSTGSTATGSTGSTGSTTSGSPSTSTGSSSTNPSPSTTSPSTSPTTSTSPSDSSSSGSSSSSSSSKRNRKERRRRYRRRQRRQERRRERRERQRQQRRRG

SEQ ID NO: 31681 - DNA, 2474 bp, DROSOPHILA
catactatcgtagtaacgaatttcctaaagtacagaacgcccggaaagtatgcagaacatatatgagaccttgtttcgaaataaactcacgaggctttagaactaaagataattaattccacgaagtgtttacgattcagtccaaaaaaattcgaaacgagcacaagatagctttcgttacaatctgaaagatattttatcggatcacagtactattagaatcatacaaaatatatcaacagatcgtcagtccataagctgctaaataggaaagtccgtgagagcctcaaagtccttggacccaacgctacctggtcatctcacggcttctgctggattcactgcctctaggcgaagtgggcgtggatcagccggttgggttgacgtacctgaaggtgatgctctggctagaaagccagggacaaatgacaaatctccaattagttagcaactaagcaaaacggttttttttggattggctggctgaacgtattgttagcatgtgtgcaaacacagtacattgtttattaaatagatgaatatgtattgttaagccttttgaacagaaagccatatttaaataacctctaagcttaaatatagattaagatggcatattgtacataaagaatgaattctcactaaaagaaaacttagaacaaactcctatttttcactttcatttgcaagttcctaatcgattaagttatcatctggaattatgtctgcacttagaccagttccacttgatcaactaactagatcggaaaatgatttacttaggattcttcattagagtatatagtgtagccttcttcttcttttccaagatgaaaccgaatattgaatttctttgtttgactaacaattcgatccaaatgatttcacttgtttttaaggtgccaagttaccaagtcataactacgattgttgcttttgtgtatgcatttatttttcaatttggaccatttcattgttcgatcgggttaagccgaatggtttatcccctacgttggcgccttcttccagcacgactctgctggcgcctttcctgctgcctctcccggcgaatctcctggcgcctctcctgacgcctcagccgccggagcctgcgaagcctgcgcctcagcctgtccacctcctcgctgtcggagctcgtggaggaggaggacgtgtcgctggacgtggagggggccgtggttgtggcagtcgtcgatgaggtggaggaagtgggcgaagtggaagaagagctgctaggagtggaggacgaagtagacgtagtgctattgctggacggagttgaggtggaggacgaagagctgggtgtcgaacttgagctggaagtcgatggagtcgatgaattggaagtgggtgatgtggaagaggacgagtcgctcgaggatgagtcggtgccaccataaacggtcgccacgaggacaaccaaaccaaaggccaggacgaattcgggtctcatcttaagctctgtctgttgaacactgtactcaagtactatacagcatccagatctgtgtctgctatttatacgatctatctggaggggtttggtccaaaatctcaatccgtgggtggtttacatcttagcatctggcacgtggcccagtgttttgctgaaaacgtctggaaagctggaaaggttattgttgggaagttaaacattgaagcagttgttgattttctgaaacaatctacggcacaggcactagacaaatatagtttttgactaagaagtgactaagcaaaaataggtaattggactattctgaataaaataactaaatacaataggaacaatcagttcgtaagataaggaagggtaaagtggccattctacccagaatccttcaagttggctttcctaaaatgaatactacaatgcaagcagagtcacttcgtgttctcttttaagcagcatattattattcaaagaaagatttaatcatcaataaatgtgatagagcacttaatatttgcttaatattaaatgttcttatattaaacatcctctaagttaagcactttcttcttgagccgtattggcacatccactaaaaataacactgcgcaaatagaagctccattgctgttgtagattcgacaaacataggaactttccacaccttgttcaacaaaacactgccgcaaatgccacatgttaagatcaaactaagacgacgcacagattgagattttggaccaaacccctccagatagatcgtataaatagcagacacagatctggatgctgtatagtacttgagtacagtgttcaacagacagagcttaagatgagacccgaattcgtcctggcctttggtttggttgtcctcgtggcgaccgtttatggtggcaccgactcatcctcgagcgactcgtcctcttccacatcacccacttccaattcatcgactccatcgacttccagctcaagttcgacacccagctcttcgtcctcc

SEQ ID NO: 31682 - DNA, 474 bp, DROSOPHILA
atgagacccgaattcgtcctggcctttggtttggttgtcctcgtggcgaccgtttatggtggcaccgactcatcctcgagcgactcgtcctcttccacatcacccacttccaattcatcgactccatcgacttccagctcaagttcgacacccagctcttcgtcctccacctcaactccgtccagcaatagcactacgtctacttcgtcctccactcctagcagctcttcttccacttcgcccacttcctccacctcatcgacgactgccacaaccacggccccctccacgtccagcgacacgtcctcctcctccacgagctccgacagcgaggaggtggacaggctgaggcgcaggcttcgcaggctccggcggctgaggcgtcaggagaggcgccaggagattcgccgggagaggcagcaggaaaggcgccagcagagtcgtgctggaagaaggcgccaacgtaggggataa

SEQ ID NO: 31683 - protein, 157 aa, DROSOPHILA
MRPEFVLAFGLVVLVATVYGGTDSSSSDSSSSTSPTSNSSTPSTSSSSSTPSSSSSTSTPSSNSTTSTSSSTPSSSSSTSPTSSTSSTTATTTAPSTSSDTSSSSTSSDSEEVDRLRRRLRRLRRLRRQERRQEIRRERQQERRQQSRAGRRRQRRG

SEQ ID NO: 31684 - DNA, 2382 bp, DROSOPHILA
gaacgggtgcctggggtaggctccatttaagtttgggttaatcagcgataaagcgcgcattgccattgacagcaaggtggagcaaaaaaacgaggcgaagaacgaagcggagtgcgaaataagatggtgcatttacatattttgtaaaaaaaaaaaataacaataataataagacgtgcaattaataaatcggctttgtctcgcatcgctaattgtttgccattaatttgcataacaaaattaattggcggcatttatgcaaatcccgaaagcccacaaaaaatcacttcctaggcgatgcggctgtcgttgtgccaaagatgacaccccagtggagatggggatcggagccaaagccacttgaattgaagttcaagttttcgcaattgacccacaaattaattatgcatgcatgctggtaattgtgaatttgccttttacaatcgcacacgtaatgcctctgcgttatttccgtcaacatttcatttattagacgcaattacaattgatttgggtttcggtttcggtttcggtttcaatagctgagatttctgtgaatgggaatggtatgggaaccttttcttgatggctttttgaatgcctgcctaactgaaatgtcatgaacgagcgttcggctttggacagggtcaagactttttggctcattgtgcgaaagaaatttcgaccgaaaaccgatctgaatcagaagccaatgctcctaaccttggattggccgaaaattatccgaatgagccatgtttttcagtgaaatcggttcgcgttcccacgtgtcagaaccatttacatattacactcaaatgaaatgcacgcattaataattttaattaaaatccgtttattgcaattacaaagggataatcaaatcggagagctcttttacgggcagttaacaaatttatggcaaatttattaattggtttattgcaccgcgtctgatgtttataacaaatactcgatgcgactcgtgatttgtgtgcctttagcgatactctgttaatgtgaagtacaccttaacctgggccaactccgatcggtggaaagtgaaggtggtgaagagtccgtagtccccgaagggcaggggcatcatgtccagaaccttgacgggaaaccgaaagtgctccaacactatttccggctgtaatcgatagaagaactgaagtaaacatcataatcaatcatttcttaggcaaactcactggaatcggacacttgttcacattggttctgttcccgaaactgctcaggatgatgttaatgaagggatgattccgcttctccagatactcgcacacatccgactggcagatattgtagagaaagggcttatagccactggccttcttcagcagctgcatgcgcatctgaaggagaaacatattggtattacactaaggtgttggtgctatacgccagcaggctgtgctttacactttacacacaactggctgtagaatatcgccacacttttaaacaaacagttagatacacaggcacatcgatcttaaactgccaatttcgattatagcccatgcattaaattcggaattttccaaaagaagaacacttattctggcagtcctagtatccaccgtatattttagatatgtgtttctttggccttgtttcgcagttcctgttcttcgtttacggcaccatgggaccggcctggcaaacctataagactctgaacagcggagacgaggagttcctggcctgggccaaatactggatagtttacgccttcctggtcaccttcgaggtgctggcggacgtcttcctctcctggctgccgctctacatgcccaccaagttgctcctggtcgtgtggatcgtgctgtccgctccggccgccaatgtctggatattcgacgccatcctgcgtccggtgctggcaaagcggcaggaggagatcgatcacttcctgcaccggggcaaggagaagctcctgatcgacgccctcgcttcgatgacacagctggtggcacagacccaaatctctgtactgcctttcgtgtccagcttctggtcgagatcgagcactgctccccttaggacttccgatctgttgcaggactccactggagaaggaattggaggcagaacttccgaggatactgactcggccaacgtctctgtccaaaatctgtccagtggttccagtcccgttggcagcttagagcacctccgtgacgactctgaggagcttctggtgggcgtttcgaaggccaccacgcacctgcaggcggagcagttccagagcgacgtgtcgtcggaatcacccaggataattaatcgccgacctcagcgcaagttcaagaatgccattgctattgcctccgccaccaagctggaggacctcca

SEQ ID NO: 31685 - DNA, 321 bp, DROSOPHILA
atgcgcatgcagctgctgaagaaggccagtggctataagccctttctctacaatatctgccagtcggatgtgtgcgagtatctggagaagcggaatcatcccttcattaacatcatcctgagcagtttcgggaacagaaccaatgtgaacaagtgtccgattccaccggaaatagtgttggagcactttcggtttcccgtcaaggttctggacatgatgcccctgcccttcggggactacggactcttcaccaccttcactttccaccgatcggagttggcccaggttaaggtgtacttcacattaacagagtatcgctaa

SEQ ID NO: 31686 - protein, 106 aa, DROSOPHILA
MRMQLLKKASGYKPFLYNICQSDVCEYLEKRNHPFINIILSSFGNRTNVNKCPIPPEIVLEHFRFPVKVLDMMPLPFGDYGLFTTFTFHRSELAQVKVYFTLTEYR

SEQ ID NO: 31687 - DNA, 3437 bp, DROSOPHILA
gggccagccgcttgatgaactcctggtagtggggttcgctctcgatggtgttcaccttgctgtcgtcgttcctggccttgttcttaaggaagcactggaagggagcatactccacgatggccatgtactcgacgcccttgtggtcgacgaagacgtagccgtcgaagcgatcccggaactgcaccacctcgcctatgtccttggaggacatatcgatgtaggcgcgacaggtggcctcctggcccagcgaccagtctgccttgcagtagtaatacgagtcgttctccggcaaaggacccacctgatccaggaactgcgcctccgtcatggtcggcggcaaatgccgcatcacaatctgcaatgaatgcattagtttcggaggatcgtgggattaagacagtctggacggtaccttaacgatctgattggtcttgtccttcttgtccttgcgcctgcttgccttggacttctccttgggcttttcctcggcaaaagtttcagccattttctgttcctttttatttacaaaaatcaaaacaaagccgaaaagccaacaaatgcaaacatgatgtggaaccgatagagatggcactttcggctcgaactagaagaaattctaaagttcacaagtggaacctatatccaattattctagtaaaaaaaaatagattctatcaaagaagttagtcacttagttagttagccaaatattaggaaagtagaacttgaaatatctgtgccatttctggcaattacgacaaggctctggtatctagatctttggaactagttctttaaatccacattgcaagagcgctttttttgaccggtacgcagatatcatgctcaacttttaaacagtttcgactgttttggcacattaaatgctcgaattgaatgaataaaaggaaacttggtcaaggtaatgagtaaatggacattctagagagcttgacacatgatgcagtaacatcgttttcaggaatctgagcattgcaaaatgatggcgccggtagatccaccagtgggatcctttctgaagtgcttcgtctgcgtctccgatgagggcaggacttggacagaattgatacaaggtttcaccaaggaatcggacaaggtggaaaagaaccttgctcacctgcaaacgcttctggagaaagcacatgtgaagcccagcgtgatatgcagaggctgcaatatgcagcgatactgcagcctgtcccatctcgtggcggatcgtcaagaacacaagccactctgcgaggtgctgagggatctgcagaagtccatgaagatcgatcacccgttgaagctgctcggccaaatcaccgatcgcaggaagcttcagctcgtcatttcgcagctaaagatggtcctgctggccaagttgggcagaccactgaatcagcgggagcatcagctaatcggcaacccagccgtgtgcgatgtgtgcttcagcactgaagctctcgaggactgtgaaggatgtgccggagtggccttctgctccgcggcacaccaacgcctagtcaggggctatcacaccccggaggattgccagaccctggctctgattgccactccgtttcgtcagttgaactgtctagtgaatatcaaggacttctaccgcagttgcccactaaaagagtctaatctaatcaaggctttcaccgaagccaccgacatacggatcagcgacactccttggaccgatctggaatcgtaccagctattcgctacctgttcctccttcagcggcatcgcaagtctgtgcctggccctgtcgcacatttcctgggtcccagatccgaataaagctgtcatagtctacgtggccggcgccaccgaggacactttgcgctacttcgaggacatgcacctgcgttttctgttcctgcagtacccaagcattcgtaatctggaattacacttcattggaagaaccgttgggcgcatcgaccaagtggatatcaaattcagcgacaggagctttgaacaaaccgtggtgaaatgcttttaccccctgtcattttcacaatattcctgtattctaaatgtggatcccaccttgattctcatcatgcaacccgatttcttcggagtcggtaaagtaacccagagaatttctaggtatatgaaaaggaaggttccactcgaaaacgaatggaagccttgcttgtcaagtgttattcgatcttttggtgttcccatttgctacacttcgatttcaagggctcaggcaatttccgatttcgcggccatcacattgtccgctgagaagagcaagattgccatcgagagagcctacaatataatgggcaatccctatcgtgaaatattgccactgcacaatccagcaccagaagataccgagaggattgtgtatgccaataactacctcgaggttattttcacaagcaaaaaaaaatgccaatgactaccaaagactatataaggcttagtttagtacacataataccttcgacaatactgacatttgttattaaacagctgctcgtcaaatacatattctaagttacctgattactgccacaagtatcaagttagatgcattaaaactacccaagactgtagaataactacaattagttgataatatcgagaacagtattcagtttcgaacgcggctttgaatgtcgccctttaatttaaacatgtttgtttatccatttacatttttggtaattctttaagaataaattgtttaactagttgatagcctacatttgtaataagtataaatgctcagtttctcaatgcagccacttaactctacgaggaaaacggttacaataacttcagaagggttctttttaggatgtggaagctttgatctagaatgtcttcttggaaatgacaacaattaaatcgattaaccaatagaacgactggtggagatcaccctcgcacaagtacggcgccttggtccatgcctccacgcggtagccacagttctccagcagctccataaacctggccgcctcctcctcgaacgacgcctgtcgcccgttgttctccagcagcgggcgcagcggcagatgcgaggtattcgtctccacgtagtgcatgtagggaagtactaaggccacaactgctcgaccattgggagctagtgccaggtgaatgtcctcgagcagcttgaatgaatcgaagcagcggtccaatacgttgaggcacagaatcaattccaggttctgcagaccgtctatctcggtgattacgttgaagttcagcttcttcagccgatcgcgcatggtccaactggcctcggtggcgaagacccgcagcccggcacttccgctcagctcggaaacggtgttggccacgcgcagcgaaatctcaccgtccccggctccgatatccagcaacgtgacctacgatatgatggcagatgagtagtggtcaagactaaaggc

SEQ ID NO: 31688 - DNA, 1437 bp, DROSOPHILA
atgatggcgccggtagatccaccagtgggatcctttctgaagtgcttcgtctgcgtctccgatgagggcaggacttggacagaattgatacaaggtttcaccaaggaatcggacaaggtggaaaagaaccttgctcacctgcaaacgcttctggagaaagcacatgtgaagcccagcgtgatatgcagaggctgcaatatgcagcgatactgcagcctgtcccatctcgtggcggatcgtcaagaacacaagccactctgcgaggtgctgagggatctgcagaagtccatgaagatcgatcacccgttgaagctgctcggccaaatcaccgatcgcaggaagcttcagctcgtcatttcgcagctaaagatggtcctgctggccaagttgggcagaccactgaatcagcgggagcatcagctaatcggcaacccagccgtgtgcgatgtgtgcttcagcactgaagctctcgaggactgtgaaggatgtgccggagtggccttctgctccgcggcacaccaacgcctagtcaggggctatcacaccccggaggattgccagaccctggctctgattgccactccgtttcgtcagttgaactgtctagtgaatatcaaggacttctaccgcagttgcccactaaaagagtctaatctaatcaaggctttcaccgaagccaccgacatacggatcagcgacactccttggaccgatctggaatcgtaccagctattcgctacctgttcctccttcagcggcatcgcaagtctgtgcctggccctgtcgcacatttcctgggtcccagatccgaataaagctgtcatagtctacgtggccggcgccaccgaggacactttgcgctacttcgaggacatgcacctgcgttttctgttcctgcagtacccaagcattcgtaatctggaattacacttcattggaagaaccgttgggcgcatcgaccaagtggatatcaaattcagcgacaggagctttgaacaaaccgtggtgaaatgcttttaccccctgtcattttcacaatattcctgtattctaaatgtggatcccaccttgattctcatcatgcaacccgatttcttcggagtcggtaaagtaacccagagaatttctaggtatatgaaaaggaaggttccactcgaaaacgaatggaagccttgcttgtcaagtgttattcgatcttttggtgttcccatttgctacacttcgatttcaagggctcaggcaatttccgatttcgcggccatcacattgtccgctgagaagagcaagattgccatcgagagagcctacaatataatgggcaatccctatcgtgaaatattgccactgcacaatccagcaccagaagataccgagaggattgtgtatgccaataactacctcgaggttattttcacaagcaaaaaaaaatgccaatga

SEQ ID NO: 31689 - protein, 478 aa, DROSOPHILA
MMAPVDPPVGSFLKCFVCVSDEGRTWTELIQGFTKESDKVEKNLAHLQTLLEKAHVKPSVICRGCNMQRYCSLSHLVADRQEHKPLCEVLRDLQKSMKIDHPLKLLGQITDRRKLQLVISQLKMVLLAKLGRPLNQREHQLIGNPAVCDVCFSTEALEDCEGCAGVAFCSAAHQRLVRGYHTPEDCQTLALIATPFRQLNCLVNIKDFYRSCPLKESNLIKAFTEATDIRISDTPWTDLESYQLFATCSSFSGIASLCLALSHISWVPDPNKAVIVYVAGATEDTLRYFEDMHLRFLFLQYPSIRNLELHFIGRTVGRIDQVDIKFSDRSFEQTVVKCFYPLSFSQYSCILNVDPTLILIMQPDFFGVGKVTQRISRYMKRKVPLENEWKPCLSSVIRSFGVPICYTSISRAQAISDFAAITLSAEKSKIAIERAYNIMGNPYREILPLHNPAPEDTERIVYANNYLEVIFTSKKKCQ

SEQ ID NO: 31690 - DNA, 3117 bp, DROSOPHILA
tgggcaactatgttggtggctcggcgcaggcagcgtccaataatcccaatccgcatcacgtgatgccgaacgttaacgataatctggtgattaaggccacgatgcaaaggactcaggtgcacacgacagcagccagcaccttgaaaatgaccaccgtggacaataggctggagttgaacacggcggtgtacggcacggaacccattggcgacaagaagctcaggaacctgctgcagaagaacagcacggagccgatgctcatgggggccaactcggacttgttcttgggcaacgatgtaatgcggctgggaatgatgcagaacacacccattacgcagaacaatcccatgctgagcataagtggaaaatctcagccatctgaaggcaggtccttggagcaggatgtgaagttgggcgagccgcaggaggcaacctcttccgccgtggagttggagaatgtcggattcagcgaccttctgggaggactcggcgagggcgacgacgacgacctactcaagtcgctcacttccgaaatgggagacgacttcaatatcctggagtacgcggacccagaactggacgtcaatgttctcaactccctagattttgatgacaatgaaaagtgctctacataggagaagcggaatcgtttaaattgaaataaagaaaatgcaatatttaatagaaagcgccacttttgaatgcagcctcttttggcgccaaaccccattcttcatcgattgccgtataccatatcgaatttgtatctcttcggcacagaaaactggttttctacgcggtttgcactgttgttactttttattttcagctaaccatccagatgaccagataatgcagttgttcagtagtttccactcaatcctaattgtttgctgtgttctcttaattgatggaacgcactcgaaactgaatcttaaatatgccattttgaggcaaaagcaagcagcaaaggcaacgcaaaatgacactttgggtatggatgtgggagaaagtttctgctggacgagcgtatcatgtcgatgtttttgtttatgaagcccaccagcagagaatcaaatatgatgcccagaagaccatgaaggtgatgttctacaagaacaacaccaaaaccatggagacttcggcctacgacgatgcctacgatctcagtggctcgggttgctcgcccacggacaagtttgccatagttctgcatggatggatccaaagttgttcggacgagtgggcgctgtcgcttattgaaagtgagcattttttgcatttttttcaatgccaaagttgaaagctactcgaaatatgcattttaggactcagttactaccgcggcggatgcgtgatatgcatagactacagtgtggtcgccagttcctcgtacatgcggtgggtagtagtagtagtctgaccccaaattctcattatccgacttttaaaggctgtacacaaactttgacaccctcaccggcgccatatcgtccattatcctaacactgttcaggcagggattcgatccaaaacgaggctatatgtttggcttcagcttcggcggacaactggcttcggcggtgggaagatccctacggccacaccacattatcgagagcatagacagtcggtatcttgagcgttatcttagccacacccagtaattattgtattgaactgcagcgtgcgatatggccggacccgggttcgatcccattgcagtcgaccactccaaggccggcaagcatgtgcagtgcttccactcgagccgcgacaagggcaccttcgtctactcctgccaccgcaacataatgctcggcagctgcggcctcaagcagccctcggtggccagtcagcttcacctgggcagccatggtctctgcgtcgacatatacatcaacacgttcgactatcccttctacgccgtgaactacacaccgccggagtgcttcacctggcaaaagacggccaagataccagatggctacacggtgggctacgaggagaacttcgacagccaggtcacggggcagatcttcgtgcccactagcctgcactacccctacaacttgtccaagaaacagctaaagctgctgaccaaaggcggtgcttgactgagtattgggagaaaacacttggttcaagaatagcaacctcaggaggcttatgttttttaaatcaaagtcaaccatattctaatatcatgtaggtttattcgagttcagctcatatcgtttgtaattgttgtttttatttttattcaccaaaaatatatttcaaatcaaatttgaattatgtatatacattacacatgtgtaatccagccacatcaacctactgattcgggcagtcgttgggcgactgcttcttgataccggctgatttggggccctttggtggcggtgcatcgtcgtcgtcgtactcatcctcctcgttctcgtcatactcctcttcgtcctcatcgtcctcatcgtcgacgatgtcgccagtgtagtaaagcactgcttttggaataattctggcgcgcaagaagtgaccaatttcgaagtcggtggccaggatctgcgaggaagcgaacacggatgagcaagtggccttgcggaaactgttgttgggtgagcttacctgctgggagtcgtcgtcgacttcctcctggtcgctcgggacctctggtgggctgaagaaattgaagaaggaatccgtcggaacctgcttcacaatggtgcgcactgcgccgcgctccttgtgcttctgcttcttgcggatggtcttcacagtaaggttcatcttcttctcccagttaatggtgcacccctgtaattggttttgtttcgattagaaatcccttgttgccctcgagagtgcagatagctcaccgtgcacttgtagatctctgggccttcaaatgcgaacggatcgttgggatccacggtggacttcaaaacgtactgctttgtgagaactgagttggagaagtactcgttcttgtcgaagtgaaactccaaggtgtacgaatgctaatgaataaagaagcggtttagacgggcaggactactagaactattggccagcaaactcaccccgttgtcgtacttgatggaaatatcgattagc

SEQ ID NO: 31691 - DNA, 945 bp, DROSOPHILA
atgtgggagaaagtttctgctggacgagcgtatcatgtcgatgtttttgtttatgaagcccaccagcagagaatcaaatatgatgcccagaagaccatgaaggtgatgttctacaagaacaacaccaaaaccatggagacttcggcctacgacgatgcctacgatctcagtggctcgggttgctcgcccacggacaagtttgccatagttctgcatggatggatccaaagttgttcggacgagtgggcgctgtcgcttattgaaagactcagttactaccgcggcggatgcgtgatatgcatagactacagtgtggtcgccagttcctcgtacatgcggctgtacacaaactttgacaccctcaccggcgccatatcgtccattatcctaacactgttcaggcagggattcgatccaaaacgaggctatatgtttggcttcagcttcggcggacaactggcttcggcggtgggaagatccctacggccacaccacattatcgagagcatagacacgtgcgatatggccggacccgggttcgatcccattgcagtcgaccactccaaggccggcaagcatgtgcagtgcttccactcgagccgcgacaagggcaccttcgtctactcctgccaccgcaacataatgctcggcagctgcggcctcaagcagccctcggtggccagtcagcttcacctgggcagccatggtctctgcgtcgacatatacatcaacacgttcgactatcccttctacgccgtgaactacacaccgccggagtgcttcacctggcaaaagacggccaagataccagatggctacacggtgggctacgaggagaacttcgacagccaggtcacggggcagatcttcgtgcccactagcctgcactacccctacaacttgtccaagaaacagctaaagctgctgaccaaaggcggtgcttga

SEQ ID NO: 31692 - protein, 314 aa, DROSOPHILA
MWEKVSAGRAYHVDVFVYEAHQQRIKYDAQKTMKVMFYKNNTKTMETSAYDDAYDLSGSGCSPTDKFAIVLHGWIQSCSDEWALSLIERLSYYRGGCVICIDYSVVASSSYMRLYTNFDTLTGAISSIILTLFRQGFDPKRGYMFGFSFGGQLASAVGRSLRPHHIIESIDTCDMAGPGFDPIAVDHSKAGKHVQCFHSSRDKGTFVYSCHRNIMLGSCGLKQPSVASQLHLGSHGLCVDIYINTFDYPFYAVNYTPPECFTWQKTAKIPDGYTVGYEENFDSQVTGQIFVPTSLHYPYNLSKKQLKLLTKGGA

SEQ ID NO: 31693 - DNA, 2201 bp, DROSOPHILA
atttatgttccttctagcgctgtcgcgtctgtacggattgtggttcaagaactcctggcggcggcagctcctcccgctggcatagccactacacaatctgcgattcgtgctatcagcagcggaacaagggcttttcctgcccgatttgccagaaagcgtacagggcagcatcgcacaaggaaatggtcaagtgcagctggtgcaacaagtacgtttcactcgcttctgcctgattagtcttgcttattatatggattcgtttcagatttgtgcacagtacgtgtgacgaagaggcggatttaacggcctaccacaagaagaaggagcaaaacccagattacgactacgtgtgtccgaattgcaagagtaattcgtcgggcccgggatcatcccaacagacaatcgactcgatcgtgctgtccgccatggattcgtcgtcggagcaactgagcctcaaggaaatcgaacttgacccgctggagggcaaacccacaatggatccatcgagcgatgagctccacaagctacccaccggcaagaaaaaagtgtgccttacgagtgttcgcggtagaagcggaaagttcgtcctacaccgcatgggtgtgatgtcgcagatcaacaagaaacgcagcacccgaggcaaggggcgccagcttgcgctgcccaccatctcgagcgatcgctgcctgagtcgcagcatggaaacagatctgaccagcgacaaaaagctgctgctctgctcggcgcgggataagtttatccaagcgcaagacatctgcgtaatgtgcggctcgctgggcattgagagcgattccgtgatgatcacctgcgcacagtgcggccaatgctatcatccgtactgcgccggcgtgaagccttcgcgaggcatcctgcagaagggttggcgatgcctggactgcacagtgtgcgagggatgtggcaagaagaacgacgaggcgcgcctgctcctgtgcgacgagtgcgacatttcgtatcacatttactgtgtgaatcctccgctggaaaccgtgcccacgggcaactggaagtgctcgttctgtacactgtgccagaaatgcggtcgcaatcccaccgagaagagcgagttcggggactccaacatgctcgagtgcccatcctgcaccagccaatcctcgtgtcccgtctgcaaagtctcgtacagcaacggcgagatgatcatccagtgcgagcactgcgagctatgggcgcacttccactgcgactctgtcaatgcccagctgaccattgaccactacgacaacaatgtgtacaagtgtttcaagtgccgctgctcgacgaggagcactaactccctggcggatgccaagtttggtaacgaggattcgctggccataactccccagggcagcaaaccatttgtgcacatcacagcctcctccgggccgtctttcgattctaagagtggtgccgagcgaaatcatcctaccttatccggcgatatgcccgagtctgctccagaagcgctccactggattgacggagtgtgcctgagcgaaagcggattgggcatgatcaagtcattgtccacggagatcaaacgcaagcgcaaaatgcgacaagccctcggcaatggcaaggatggacaattggaggccgccgccgaggaagcgctggaaaagtacaaagacggcatggtctgggatgggacggagaacgctattcccgagggtttcaccatctccattaacgacgagggagtgaacatattacgcaagaagcgacagcgcaatctgcagaagctgggcattggtggattctccgttcgcaaccgaggtctcaagaaggacagcgaggagacgacggccgttgaccaaataaattcccttatgaccatggacaaaaagaagaaaatcatacgaaagaagcagaagaacaagctgattgaagcctatcccgtgtacttgcaagaggccttcttcggaaaacctctgctggaaggtggagagcttgtcatggccgatacagattcctctgacgaaattgatgcgtccatgaaggtttacttcacgcggcccgagggcaagagtcctgccaaccaggacacactggcggtgaacaagagtccagcgaagaccgtgaagaaagttaaagctgagttgaaaactgagaacaaaactgttttcattcagcaaatgcccatgggaatccagaacaaaaac

SEQ ID NO: 31694 - DNA, 201 bp, DROSOPHILA
atgatcatctcgccgttgctgtacgagactttgcagacgggacacgaggattggctggtgcaggatgggcactcgagcatgttggagtccccgaactcgctcttctcggtgggattgcgaccgcatttctggcacagtgtacagaacgagcacttccagttgcccgtgggcacggtttccagcggaggattcacacagtaa

SEQ ID NO: 31695 - protein, 66 aa, DROSOPHILA
MIISPLLYETLQTGHEDWLVQDGHSSMLESPNSLFSVGLRPHFWHSVQNEHFQLPVGTVSSGGFTQ

SEQ ID NO: 31696 - DNA, 3818 bp, DROSOPHILA
gagtccgtttcgtatctggttttcaatagaaccaatatggaaacggtgctccatccagaaatgccaatcacaaaaatccaaagcagcctgcaaagagtgatggttttgcgaaccgtagacaatatcctcgaatcgctgactcttaccctttattttccacaaaagaccttataaatcctcgaaaattcattactgacttccgccacatttcgtattcatgaaatcctttccacaatttcttcgtgactaattcgaaaatatatgatgtccatcctttatttaaatacggagggatgcacgcaagttctgatgcaaatcgagcgtgtcgtttagattaatggagagataagaagaaaacatactcgtagctttgaaatgcaactgcatactgcacgcaatgttcagatgcactaatgggtatcaaagatgcgagggaatcggttcgttgggctgcgaaagtgtgcataccttttgaaagtgtatccaactatatagatgcaacaattataactgaagatgggcttgtccaagcgttgcgttttatgctccatagcacacacgccaccatttggatgcagcatctgggcactgacttggcaacaatcattcactcgggaacctaggcggataaaatataataagaaaattaaatgcacatttaccacaagtgtgagtgatctggcaaatgcatatatccctgaaaagtcgatcatctctttgattcccagccaagtagcaagtaatgtggatgaaaaaccaatgctgctagtcttgaactgtctgcagccaaaatcaatcgctcaagatgctggggaaagtgaaaggcagcattattgtcatttacatgaccactggtatggaggttaaaatcaataaattcgaattaagctcacccgcttcgcttcaggactgctgtacatactgctgagcataaagtcatccgccagctacatgaggccaaaacgccaggtaagcattcgacgccaggaaaagcgaaagtatgaacgcccgcatcgactttcagatgtggcccgtggatcatccagggatcgtcctctatagacagcacccgaacgccatgcgaaagttctactggtacaacgctaggaccccgatcctggtgggcaaaatgcgtctaaaaaactacatgcgcaacatgcacatgctgccccgatacgtgccctcacctgtccagttccacgaggcctatgcgaactcgaagaggtctatatcagcgcacatatcatccatttgtgcatacgtataatcatagtggatttctttcaggagcatcttcagggacttgagccaagtgaatgggttcaagagcacactcctgcccattgctacttccaccgttgacttcgttgcggccccgctcaacacgattgagtacagttcccctccggtaaacgcacctattggtttcagttcagccccagtcaacgccttcgtgcccctcacgacgggaacccttccgagcgcagaacgcctcattggcgctccgagtctgtggaaccactccgaaacccacgcctccaacgacggctggaacaagtgccgcgaaaactgcctccagattccgttccaggagtatgccaaggaccaatacagctcgcagagcaagaccagtgacctgccggtgaccacgacaaccactttgccctacttcaactacgttgcgcacacctacttcacccttgacgacgtgattctcccccattccgcatcgaaactcggcaaatctccagcacaagaccagcaatttcggcccagtcaccaaattctcacaacggaaaggccccaggagcttttcaccgagcggtttcagcacaccacgccgcctccaactacaacaaccacgaccactgaattcacttttccggggaaaaccactgctttggaaatggagtacagatatagcacccgaccaagctggtttagccccactacctccagcaccacaacaaccgaagctgcggcttctgaggatcccccgaaatggacaactccgcaacccgctcagaacgtctattccacggcgaatgttacgacaggatcctataagcacagactaaaatccctgaaagcgaccaaaaacttctcttcaagcattgaaactaaactgaaacttttgaagcttcatcttaaaaacctggttacaactagggaaacgccgaagaacgttcagaatctaacgactacagctgttcttgacaaccacaccactttggaaacgactacaacaacaactacgcccacaccgccaagaagaagaacaaacgtcaatagaaaactgagaaaactgcgagttttggcatcgaccaaaaaggttccggtgcagatttcgagaaattctacagattccagcaaagccatgggagaattcaaaaagagtttaccgaaaagaatttaccaacggcgcaagcacttgaactccactgcaatgccagaagccgcgaaaaacacaacagctgataccgatatcgaaacgataaaaaagcttaagcgccgaacaacagcaacaccccggaaatcgacgaaggtcgatgataatgttatcgttcgaaacgctacgcaggcgataagtcacactttggcaaaatctcgcgccgatggtatatcagaagaaaaacacgctttggtcacagaatcggcaattatgactatttccagtggtactttaaaaatgaggcagccccatattaaggcaaggtcaaagccgcaaaggtccagaaaaatgtcgcacctggaaaacgataatttcataccgtcgttgcccattgaggtttattttaaaaaagtaaatcagcagtaaattgctatagtcttcgagtcatgcgtatacattgtgtaaatgaacagagcaaactaaagtcttaaccattatttatacttacagagacattttaagcaccaaatacataataaaacaaaaaattaagtgtttacttgcaacatacatacatacatacacatatagcttataaatagttgttttcaaatttaagactgagttggcaggccattgtaagtttggcgaaaatacggcatcggccttatcgttccattcccacagttcctaaactggcacagcgaccggtgctgacaatccgtgtgctaagatgcagcactgtgcgtttcttattattgaccggaaacaaaacgtgggtttgattcgatagcagggttctttcattttacatcttcggttggaacagtcactggactttgcaagtaggttagtaatttcgcatttttgtgtataaaaaaattgcaaattcgccggagaagcggcggacgacctaaatggcacttacagccggaggagacggtcaaaaacggcttggaagccagaattaacctccggtcatctcggcacattcagtaatatgcgaaagaaagtgcttacactcacacaagcacacatacacacatacaagtgcaaaaatgcagtacacaactttcaagtgccgtgtgtctcgatgactttgccaaattaaatgtttgaacactaaagtgccaagtgcctgggtatgcaatttggcatatgacatttcggatacatacatttgccgacacatatatacatacgtatgtatgcattttttcggcttgcacacacacgtatttacatacatatgtgcgaatccgtctgtgtctgtatgtacccatagaacgccgaggtatataatgtgctttcaacaccagctagtgtctttgtgcctaagtgtaaatgcattcaaatcccaattaatcggcagttaattaaatagataaataattaattcaatcacatcttgtgtcttgtgcggcag

SEQ ID NO: 31697 - DNA, 1755 bp, DROSOPHILA
atgaacgcccgcatcgactttcagatgtggcccgtggatcatccagggatcgtcctctatagacagcacccgaacgccatgcgaaagttctactggtacaacgctaggaccccgatcctggtgggcaaaatgcgtctaaaaaactacatgcgcaacatgcacatgctgccccgatacgtgccctcacctgtccagttccacgaggcctatgcgaactcgaagaggagcatcttcagggacttgagccaagtgaatgggttcaagagcacactcctgcccattgctacttccaccgttgacttcgttgcggccccgctcaacacgattgagtacagttcccctccggtaaacgcacctattggtttcagttcagccccagtcaacgccttcgtgcccctcacgacgggaacccttccgagcgcagaacgcctcattggcgctccgagtctgtggaaccactccgaaacccacgcctccaacgacggctggaacaagtgccgcgaaaactgcctccagattccgttccaggagtatgccaaggaccaatacagctcgcagagcaagaccagtgacctgccggtgaccacgacaaccactttgccctacttcaactacgttgcgcacacctacttcacccttgacgacgtgattctcccccattccgcatcgaaactcggcaaatctccagcacaagaccagcaatttcggcccagtcaccaaattctcacaacggaaaggccccaggagcttttcaccgagcggtttcagcacaccacgccgcctccaactacaacaaccacgaccactgaattcacttttccggggaaaaccactgctttggaaatggagtacagatatagcacccgaccaagctggtttagccccactacctccagcaccacaacaaccgaagctgcggcttctgaggatcccccgaaatggacaactccgcaacccgctcagaacgtctattccacggcgaatgttacgacaggatcctataagcacagactaaaatccctgaaagcgaccaaaaacttctcttcaagcattgaaactaaactgaaacttttgaagcttcatcttaaaaacctggttacaactagggaaacgccgaagaacgttcagaatctaacgactacagctgttcttgacaaccacaccactttggaaacgactacaacaacaactacgcccacaccgccaagaagaagaacaaacgtcaatagaaaactgagaaaactgcgagttttggcatcgaccaaaaaggttccggtgcagatttcgagaaattctacagattccagcaaagccatgggagaattcaaaaagagtttaccgaaaagaatttaccaacggcgcaagcacttgaactccactgcaatgccagaagccgcgaaaaacacaacagctgataccgatatcgaaacgataaaaaagcttaagcgccgaacaacagcaacaccccggaaatcgacgaaggtcgatgataatgttatcgttcgaaacgctacgcaggcgataagtcacactttggcaaaatctcgcgccgatggtatatcagaagaaaaacacgctttggtcacagaatcggcaattatgactatttccagtggtactttaaaaatgaggcagccccatattaaggcaaggtcaaagccgcaaaggtccagaaaaatgtcgcacctggaaaacgataatttcataccgtcgttgcccattgaggtttattttaaaaaagtaaatcagcagtaa

SEQ ID NO: 31698 - protein, 584 aa, DROSOPHILA
MNARIDFQMWPVDHPGIVLYRQHPNAMRKFYWYNARTPILVGKMRLKNYMRNMHMLPRYVPSPVQFHEAYANSKRSIFRDLSQVNGFKSTLLPIATSTVDFVAAPLNTIEYSSPPVNAPIGFSSAPVNAFVPLTTGTLPSAERLIGAPSLWNHSETHASNDGWNKCRENCLQIPFQEYAKDQYSSQSKTSDLPVTTTTTLPYFNYVAHTYFTLDDVILPHSASKLGKSPAQDQQFRPSHQILTTERPQELFTERFQHTTPPPTTTTTTTEFTFPGKTTALEMEYRYSTRPSWFSPTTSSTTTTEAAASEDPPKWTTPQPAQNVYSTANVTTGSYKHRLKSLKATKNFSSSIETKLKLLKLHLKNLVTTRETPKNVQNLTTTAVLDNHTTLETTTTTTTPTPPRRRTNVNRKLRKLRVLASTKKVPVQISRNSTDSSKAMGEFKKSLPKRIYQRRKHLNSTAMPEAAKNTTADTDIETIKKLKRRTTATPRKSTKVDDNVIVRNATQAISHTLAKSRADGISEEKHALVTESAIMTISSGTLKMRQPHIKARSKPQRSRKMSHLENDNFIPSLPIEVYFKKVNQQ

SEQ ID NO: 31699 - DNA, 2374 bp, DROSOPHILA
aaccaaattaaaaataagtatttgcataaacatttgaagaggccacaaaagttaacaagcggaatcctagttggattgatccaaatctcaatgcttatagggaattgtgcttaccatcaggtacaaagacgttcagatacaagcagttctcctcgtacttcctctccgcatcctgggcactcgagtcggactgtatgattttcaggatctgctcggtttctttgcccacggaaggcatggcgttctgccagcagtccggttggaagacggtcgcattgaaaatgcccttccagggtgttagttcgatatccggcggctggaatctcctggcatgtgcatagcgaatgcccaggtaggccttgatgttctgcgtccggaacatcttcagataggttccggaaatgactccgttgcccggaatgtggatgaagggtgcgtccacgcattgcacaggtacgaaacagtaatcgctgactagatgaagaaacacggccaagtaggccaggaagttcgctctgcagtccatggctcgtccggttccttcacatctttccctgttttgaactcaggcgacactgttcgcaatctttcgcaggcacgcgagcactccgttgccatggcgaaaatacacaaaaatattgttgcctaggattttgtaactatggcactcatccatctccttgcgccgaggttgtttttatttatttagcctacgtcaccatcggaatgctgttaaccccagatggcccccatttgcaaaaagtgcaaaatataataactgatatatattttaaattatattttattttaacatatacagattcattgttagattgcaagaaatcggatttcttgatgacaaaatctaatctagatctttttatcagctttaaaaataataatactaatcggaggttaaaagttctaaacgaattttactgataccctacttctaagcaacatacatattgttcgtaaattctaaatgtcatgtgtttagcatgaacgtcaatttcccacacaacttaacttatactcctcgaaattttggaaattgctctgaagatcgaaaatgtcccatgaaccgcagaagcccgccaagtcagcagtgaaggagcctccggttgtgagcgaggagaccagaaccacggacaagtgcctggcggacttttgcttgaagggtggaagtggcctgatcatcggcagcgcggtcaccttgttcttcacgcgcccacaaacctatcccatttggctgggactgggcgtcggtatgggcgtggcctacgactgctgccaggcccgctggaatcaacagtagtgttcgaaagatctctgagcttcgattaaatgtgggcttcctctcgataaacgttctagatacaacagggcttccgcttttgtaatcattttaaatattctcggaaattccccccctcctaattgcttgtattgtattaaagtgcagaaaaaacccaaactacacactttgcaaagcctgttcgaaagcgatttgaaaaatatggtttttcaaaactcttcggccagctgaagcagccgctgcaagtcgcgccaagtcggtctttggccaccgaaagtttagttattcccacggcgtttcggaacggaaaagcaagagtggcaaactggttttgggaacggcgcgagtaaccctactcttcggccagccacaattaccattaccactgccaccgccgccgatgtggccgttctcttcgggagtccgcgaatgtgcatgtgtgcaggccatggtagctgtggctcggattcggattcagattcacattcagattcagatacgttcggtttgggattcggattcattcgttgccactccagctctatgctccgcgttggacccaccgatagcttggctttctgctacagtttcataattgtctcggccagcagcagcggagttcatgatttcgctcggaatatgttttagccagatcagtgcttggaaaatgcacttttgagcgtgtacgtgtatgtggcaagtagctggcgaacgtgaatgaaaacatgagctgccactgaacgaaacccactctcgagctggaagtgcaagtgagttatcccgcggaagaaaagaaactgaattgattaccattaccattcgcggagtagcagtctcggaattaaataccaacgacccagacaataccgagcccagttccaagctggaggctcaagcctttctctattcaatgtttctcaatgacctaatgctttcgattgtctttgtgcttgcgagtgtgcgtgtgcattagttacatacagtgggtgcgaaaactactcgcacaccgtggcggtttcaatgttttcagccacgaaaagtgatctgaccagttct

SEQ ID NO: 31700 - DNA, 374 bp, DROSOPHILA
catgaacgtcaatttcccacacaacttaacttatactcctcgaaattttggaaattgctctgaagatcgaaaatgtcccatgaaccgcagaagcccgccaagtcagcagtgaaggagcctccggttgtgagcgaggagaccagaaccacggacaagtgcctggcggacttttgcttgaagggtggaagtggcctgatcatcggcagcgcggtcaccttgttcttcacgcgcccacaaacctatcccatttggctgggactgggcgtcggtatgggcgtggcctacgactgctgccaggcccgctggaatcaacagtagtgttcgaaagatctctgagcttcgattaaatgtgggcttcctctcgataaacgttc

SEQ ID NO: 31701 - protein, 81 aa, DROSOPHILA
MSHEPQKPAKSAVKEPPVVSEETRTTDKCLADFCLKGGSGLIIGSAVTLFFTRPQTYPIWLGLGVGMGVAYDCCQARWNQQ

SEQ ID NO: 31702 - DNA, 6106 bp, DROSOPHILA
ctacttctaagcaacatacatattgttcgtaaattctaaatgtcatgtgtttagcatgaacgtcaatttcccacacaacttaacttatactcctcgaaattttggaaattgctctgaagatcgaaaatgtcccatgaaccgcagaagcccgccaagtcagcagtgaaggagcctccggttgtgagcgaggagaccagaaccacggacaagtgcctggcggacttttgcttgaagggtggaagtggcctgatcatcggcagcgcggtcaccttgttcttcacgcgcccacaaacctatcccatttggctgggactgggcgtcggtatgggcgtggcctacgactgctgccaggcccgctggaatcaacagtagtgttcgaaagatctctgagcttcgattaaatgtgggcttcctctcgataaacgttctagatacaacagggcttccgcttttgtaatcattttaaatattctcggaaattccccccctcctaattgcttgtattgtattaaagtgcagaaaaaacccaaactacacactttgcaaagcctgttcgaaagcgatttgaaaaatatggtttttcaaaactcttcggccagctgaagcagccgctgcaagtcgcgccaagtcggtctttggccaccgaaagtttagttattcccacggcgtttcggaacggaaaagcaagagtggcaaactggttttgggaacggcgcgagtaaccctactcttcggccagccacaattaccattaccactgccaccgccgccgatgtggccgttctcttcgggagtccgcgaatgtgcatgtgtgcaggccatggtagctgtggctcggattcggattcagattcacattcagattcagatacgttcggtttgggattcggattcattcgttgccactccagctctatgctccgcgttggacccaccgatagcttggctttctgctacagtttcataattgtctcggccagcagcagcggagttcatgatttcgctcggaatatgttttagccagatcagtgcttggaaaatgcacttttgagcgtgtacgtgtatgtggcaagtagctggcgaacgtgaatgaaaacatgagctgccactgaacgaaacccactctcgagctggaagtgcaagtgagttatcccgcggaagaaaagaaactgaattgattaccattaccattcgcggagtagcagtctcggaattaaataccaacgacccagacaataccgagcccagttccaagctggaggctcaagcctttctctattcaatgtttctcaatgacctaatgctttcgattgtctttgtgcttgcgagtgtgcgtgtgcattagttacatacagtgggtgcgaaaactactcgcacaccgtggcggtttcaatgttttcagccacgaaaagtgatctgaccagttctgtgggagccaaggcatttggcacggcgccttcgaaagaccaaagtgatttgccgacgcgaaagatcgctaagataatgtacataatgtacaccgcgctcatatgtgctccatcattaggggccaccctacccagttttgcccagttacccattcaatgccaagagttagcggtcgctgtctgaataaacttaacgatacaccaccagccagcagttggctgtcagcaaattggctcaactcaattttgtaactaatgatcgatcgcaatgcgagcatacgaaatccaaacaaagctggcccaactcctcgactccgactccgagtacttggaagtttacataacgtgtagccacttgcacagataacccccgaatgagtacaaaacactcgctttcaaacccacatgctggcccaaagtactcacgagtgttacggtggccaatttgaatgtttatggcctcaattaggccgtacgcaataaaatggaccaagaagctatcgcagtcttaacaaggctaattaaacatttgtgctacacatgtattcactgttgtgaattaattattcaaatcactgttcgagatgcgagtgaaagccttttaattgcctgaaaacagttaacacctatcacaatattcacttcttcggttttcagatcttatcaattttttttctgagcttttcacctgccgagttttacgaatatgctgcgctacctgctcattctttgcgccctcggaagcggtgagtttatagagttaagatcaactttctaacacctccttatagggaggagaaacctgtaagctcgcatatattataccttaaagttgctgcgttcggtttttaccctactgtttggcaaaaacatatcttaattgcaatcacttcgatcttcgtcatattgttttaataaattgaatgtgtgtattttcttgagtaattgcgcctgccaatcagaaaaactttttcagaaaacctgttttcaaagaaattttgcgcttgtacattacgaggcgtgttgccttgaattcatatttatttgtttatctgtaagcctaacaacacaaaacgtattctatggctaacgagcaaatgaactaaactaaacaccgaattcggataccctttcccctaccccccagctacttgcggcgatgttgagctactaactcaaactgtctatggcttcctggacttcacaaccacgattgggaataccgtcatggtgttctcaccccaaagttctccagcctttggtgagtgtattatattagtaatattattatattagaactactttctcaaatgagcgtaatattctagaacttaaatccaacgacacgcacgaaataataaatattatagagactaagccgaaagtgacgaagaaggaaaaggagaatgtcggcatcaagccaacgcctttgatcgtgactcactcgaatgaaattcccgaaaccgagacatcccagattgaatcttacaacataagtctctccaactcgcccatccaaacgcttttgaatacccccgaatacgatctgctctcccgccagcccgagcagtttgccgaagaaacctatcgcctggtcaacttcaagtccaagagcgaggctgatcgccaaaggatatacccgtccaagaaggagcccgtacatggctaccaggctacgagatccactgaattcaggagcattgtgacggcaaccaaggactctggtaaattctccaaggtctcccaggttcacgcagtctccagtgtggagaagaagagcaagccccggcagtcgcggaccaacaaaccagttacgccctcgatccagccgagcaggactctgaaggagtcctctatccagacccaactagccagcaagccaccaaggaagagccaccaaagtggtcgcgacaaccgaggatcgtcgggcaccagaaagccttcgcgtcccaagggaaagcggtaagagaagccgctttctaaggtttcttgtaaaattaatccttcttttgcaggaggaacaaacacacccagagttccaagccgacagtagctccatcagcaactgaaactacctcccgccactcgtatcggtcgaaagcaaatgcgaatgctgtgcaggaggagccagtgtccgtcgtgagtcccaatgcattcaagctcaacaggcgtcctggcagatggcagtacaagtcctcgccgaagcccaaggtgaacataaggaagaacgcaaaccccaatctgcccaccaccgttcaaaacgacacggctcccagtgatgagatccccgtggacatcatcaccaaccaggccataaacaacggcagggatcttgaggcgtccggatcacagaacggcccagttgcgaacaacaataacgacgatcccaactccaaatactttgtgcagacgttgaacgttgagatatcgacaccgcaaccattcatagacacctattacgaaattgcgaccattaagactccgtttatattccaggtaatgatgttgttgtgtctttttttccattttgaaactatgagactataagtttctttgtctgaagttcccacgcccataagccccattaatggcattcatttgttttcaggctggcgtggttaagaaaacgcgcttcctgaccgtcacctcaaccattgagaaggtgatccaggaggagcacaccaaggagtactccgaagacgatggcccgctgacggagaacattttggaggccaccgccagcaccgatgataagaccttaacaggcagcgttacgaccttgaagcccatctatctgggcgaggagaccgagacccccagcctggagaccataacggagtccttttccataacgcacaccaagctgaagacccagatcctcccagttgtgtacgcaaaaaggaacgagaccatccaagttaccctagttcagacgtacgattacaccagtctcatcactgtaacacagaccatttcccccttgagcgacgacttcaatccctcaaagaacttcaaggacttcgaaggaagtttggacgaggctgggtcggaaatcaacctggacctcgagttcggagatgaagataatacgggcaaattcgacgcaaagattaaaccaaaactcaaagttgaggccaagagtaatgtaactagcccgataaaccctctgctcccggaatcgattagcttcccggaaacgctgcaaaacagcttgataacttccacgcgacccgtgatcaagctcgagaccatctgggagtcccatgtggtgccgcttgtcagaggcaccgagaccatcatgagaaccctctccaagtccgtgggtgtggtggagaagacggaatacgtcactgatgtcgccacgatttccatgccaacgccatcctcgcagtatcccttctcgatcaacccattcaatcccttcaacccactcttgcccattgccccgcaacagttcatcacatccaccgaggtccagcagtccatggtaacggaaacgagctccaaggttctaaagctgacctttggcgcgaggaccgcctacaccaccatcttctcaacctctgtcgttcccacagctgtcactagattaataaccgccaccattcccggccagccaggccaatccttccccaactactttccgcctccttacaatccattcgcctatgttggctagtttttaggagcatctacgcaagcgagagtgtctaaccccattacttctttgtaattaggaatcctgtattatatttaagaacacgtgcaaatatcgaaaaggcggtgatacaaaaagcagtagattttattatattgtatgtgcactttgtcgcaaaagttgttaatgtaaatactcgagttaagactaaattaggattgcatcgaattttttggatctaagataagcaaaatatggttgtagttcggtttaactgatgttaataaatttttgaacccttttattccctaaattagtttttcattccgtatttactgcagcttaagagttatttgattcttcaaatgatcgatactaatagttatacactgtgttccattccaccgtttcacgcggaagagaaccgacagaaatgcagaattgctgcctttgcaaacaatatatagaaatcgattcccagctatgcacatttaccaaatgctttccgttacaacacttatcaacattatctaataaagttcaatactttcactttgtaatataaattacactccaacatcgatatcgatatctgtgtctctatcgatacccgcgtgtgcgttcgcatttcacatctctggggctttggcgtcacgttcgcatctctagtaaattggaaaaaaataaaatcgtcggagtttttatgtgcttgcagagtagtgtaagtaattgctatttttgtgccagctgcttgccggtagtaaacaacgcgcgtgaactgtgatgccttgcaatcctcagcgcaattcaagtgcggtttaagtccgaacgacccaagaaacccgaagtgtacgtacatatgtatgttttcgcgtgtgtatttttatgcacatgcaattctatgctgctgccatgcaaaggtgcaaaaaatgcgaaatgcaaatatcgttcacagaatgcccattgatctgaccggattttaggtggcacatacgcatatgcatatagcatgttcccggaa

SEQ ID NO: 31703 - DNA, 2531 bp, DROSOPHILA
tcgctcggaatatgttttagccagatcagtgcttggaaaatgcacttttgagcgtgtacgtgtatgtggcaagtagctggcgaacgtgaatgaaaacatgagctgccactgaacgaaacccactctcgagctggaagtgcaaatcttatcaattttttttctgagcttttcacctgccgagttttacgaatatgctgcgctacctgctcattctttgcgccctcggaagcgctacttgcggcgatgttgagctactaactcaaactgtctatggcttcctggacttcacaaccacgattgggaataccgtcatggtgttctcaccccaaagttctccagcctttgaacttaaatccaacgacacgcacgaaataataaatattatagagactaagccgaaagtgacgaagaaggaaaaggagaatgtcggcatcaagccaacgcctttgatcgtgactcactcgaatgaaattcccgaaaccgagacatcccagattgaatcttacaacataagtctctccaactcgcccatccaaacgcttttgaatacccccgaatacgatctgctctcccgccagcccgagcagtttgccgaagaaacctatcgcctggtcaacttcaagtccaagagcgaggctgatcgccaaaggatatacccgtccaagaaggagcccgtacatggctaccaggctacgagatccactgaattcaggagcattgtgacggcaaccaaggactctggtaaattctccaaggtctcccaggttcacgcagtctccagtgtggagaagaagagcaagccccggcagtcgcggaccaacaaaccagttacgccctcgatccagccgagcaggactctgaaggagtcctctatccagacccaactagccagcaagccaccaaggaagagccaccaaagtggtcgcgacaaccgaggatcgtcgggcaccagaaagccttcgcgtcccaagggaaagcggaggaacaaacacacccagagttccaagccgacagtagctccatcagcaactgaaactacctcccgccactcgtatcggtcgaaagcaaatgcgaatgctgtgcaggaggagccagtgtccgtcgtgagtcccaatgcattcaagctcaacaggcgtcctggcagatggcagtacaagtcctcgccgaagcccaaggtgaacataaggaagaacgcaaaccccaatctgcccaccaccgttcaaaacgacacggctcccagtgatgagatccccgtggacatcatcaccaaccaggccataaacaacggcagggatcttgaggcgtccggatcacagaacggcccagttgcgaacaacaataacgacgatcccaactccaaatactttgtgcagacgttgaacgttgagatatcgacaccgcaaccattcatagacacctattacgaaattgcgaccattaagactccgtttatattccaggctggcgtggttaagaaaacgcgcttcctgaccgtcacctcaaccattgagaaggtgatccaggaggagcacaccaaggagtactccgaagacgatggcccgctgacggagaacattttggaggccaccgccagcaccgatgataagaccttaacaggcagcgttacgaccttgaagcccatctatctgggcgaggagaccgagacccccagcctggagaccataacggagtccttttccataacgcacaccaagctgaagacccagatcctcccagttgtgtacgcaaaaaggaacgagaccatccaagttaccctagttcagacgtacgattacaccagtctcatcactgtaacacagaccatttcccccttgagcgacgacttcaatccctcaaagaacttcaaggacttcgaaggaagtttggacgaggctgggtcggaaatcaacctggacctcgagttcggagatgaagataatacgggcaaattcgacgcaaagattaaaccaaaactcaaagttgaggccaagagtaatgtaactagcccgataaaccctctgctcccggaatcgattagcttcccggaaacgctgcaaaacagcttgataacttccacgcgacccgtgatcaagctcgagaccatctgggagtcccatgtggtgccgcttgtcagaggcaccgagaccatcatgagaaccctctccaagtccgtgggtgtggtggagaagacggaatacgtcactgatgtcgccacgatttccatgccaacgccatcctcgcagtatcccttctcgatcaacccattcaatcccttcaacccactcttgcccattgccccgcaacagttcatcacatccaccgaggtccagcagtccatggtaacggaaacgagctccaaggttctaaagctgacctttggcgcgaggaccgcctacaccaccatcttctcaacctctgtcgttcccacagctgtcactagattaataaccgccaccattcccggccagccaggccaatccttccccaactactttccgcctccttacaatccattcgcctatgttggctag

SEQ ID NO: 31704 - protein, 779 aa, DROSOPHILA
MLRYLLILCALGSATCGDVELLTQTVYGFLDFTTTIGNTVMVFSPQSSPAFELKSNDTHEIINIIETKPKVTKKEKENVGIKPTPLIVTHSNEIPETETSQIESYNISLSNSPIQTLLNTPEYDLLSRQPEQFAEETYRLVNFKSKSEADRQRIYPSKKEPVHGYQATRSTEFRSIVTATKDSGKFSKVSQVHAVSSVEKKSKPRQSRTNKPVTPSIQPSRTLKESSIQTQLASKPPRKSHQSGRDNRGSSGTRKPSRPKGKRRNKHTQSSKPTVAPSATETTSRHSYRSKANANAVQEEPVSVVSPNAFKLNRRPGRWQYKSSPKPKVNIRKNANPNLPTTVQNDTAPSDEIPVDIITNQAINNGRDLEASGSQNGPVANNNNDDPNSKYFVQTLNVEISTPQPFIDTYYEIATIKTPFIFQAGVVKKTRFLTVTSTIEKVIQEEHTKEYSEDDGPLTENILEATASTDDKTLTGSVTTLKPIYLGEETETPSLETITESFSITHTKLKTQILPVVYAKRNETIQVTLVQTYDYTSLITVTQTISPLSDDFNPSKNFKDFEGSLDEAGSEINLDLEFGDEDNTGKFDAKIKPKLKVEAKSNVTSPINPLLPESISFPETLQNSLITSTRPVIKLETIWESHVVPLVRGTETIMRTLSKSVGVVEKTEYVTDVATISMPTPSSQYPFSINPFNPFNPLLPIAPQQFITSTEVQQSMVTETSSKVLKLTFGARTAYTTIFSTSVVPTAVTRLITATIPGQPGQSFPNYFPPPYNPFAYVG

SEQ ID NO: 31705 - DNA, 2578 bp, DROSOPHILA
tttggcgccatctcgacaaatggaaactaacgagttgttctttcagatggcttcgcacgatttctattatactatttttaaataagcaagatttgttagcagagaaaattaaggctggaaaaagtaaattgtcggaatatttctccgagtttaacaaataccaaacgccaagtaagtaaaatagtataacccatagtagaggccaattgagggcgagggagtcatcagatcaaccgactcagatctggccaagaaattcgcaattccttttcaaatttgcaaaccgtgcccaagttaacttaagaaatttaatggataatgtattttgtctaatttcaaatgtgctgtcgacacaggtgacgcaataatggaatccaatgatgacccagaagtaatacgagcaaaatatttcatacgagacgagtttctggtgggttatatcacatctccgtttcttcctccacctatctaactagccttaatccttaatgggatctctttcttatatagcgtatatctaccgctagcggagacggaaaacactactgctatccacatttcacatgcgccgttgacacagaaaacattaaacgtgtgtttaatgattgcagagacattattcaaaggatgcaccttcgtcaatatgaattgttataggttatccccatcgccgtaatgcaagtaaataaaaatattaatgacttactgttttaaatataattatcaaatgtaatttgtatttaaatagtcccttgattaaaacaaaaaattcgctgcatttagatctggtatgacctttcacaaaactcaacattaaagaataataaataaacatgttaataacagacacgcttgtttcgattattttggctattctaccaggatgcacctgctttattttctatagtcccttgacatgaagcattttagagtatttccgctatcagagtccgtatccatatccatgggcatttacattcacgcgctgtcgaaggtatcactagacgagctggttgaggatgctgaagctggcggaggccttgtcgatctcgtcgaagttccgcttgagcttactgctccaggtgtccttgtacagggggtccatcctcaccaggtagggcaccaggtcccggtgatggccagacccgatcttgccggccgcgcactgcttcaccgagtacttcgtcttgaactccgactggctgcactcgtagcagacgaccgtttgtccattggcagccgaaatcaatctggggatcagggcatatgtttcagtgattgggaaggggattagtgagttcagtgagtaatggcaaataggcgggcaagcaggcactttggctgccggtatagccacgtattattcggatctgttatctgcatatttacatacattatatatagagcctatttcgataacatccggataagacctgatagcagcagccgagtctcagatatctgatagtactacatataaacctgtcgcacgatgggcatattcacgtgccaccatatcactcacctcactataaacggtccatcgtacttcttcgagccagctttttggggcagcatgtgttagcggtggtaagggattagtgtaagtctagatttttggaatttacatgaatgactctcctctggagggcgaaagtaaaactctttacaaatgcaataatttattaacaattaggagctacatcattttatatgcacatataaaataaagaccaggctgcttatttacatttcagtttcatttcggtcctcgatattgtcaaagtcaatggagtggtgcggaagcggaagcggaagttgggaatgtggcggtttctagtcgcttaggaactgtctactctgcgtccgctttatcaaatgaccgccaccaatgctgtccaagccgcgcttcgaaaccgttctcgagaagcgctcttgcaaggactcggggctcttgtttttggacagaaatatatttacatttcgttggaagagtttgtaaaactcgttaaacaacggcgatgtggaaaggtcgtcgttgggaagtccggtttgtcgtaaactcacgctgtttccgttacacaattctcttaacgctggcagatctgatcgaaatcgaaatcgaaataataagaaattaggacttaatggctttgtacaaaagctaagctgttggttatgataattaaaaagttcgagtatatatatgtacatatatgtacaagttggttctcagtatgtgttcaatggctcgttgttaccttcacaaagatattttccatccagcagttcgtcgttggaaatatcctaaaacatagttagctatagtaattgtaatccgtttacagaagcccgtagctttccactggatattctcgaaagcacttcaaaaacgtaccacaccgggcgctgcgtgaatgaagttcaggaacaccgataccaccgccaggagcacatatagattcatgattccagccgttgaccgttagcctggtgcacttgggagcgatttgaagatgactgtgccgatttgccgcgccgcagttcgttttatacccgattcggggcaaacatcctc

SEQ ID NO: 31706 - DNA, 303 bp, DROSOPHILA
atgctgccccaaaaagctggctcgaagaagtacgatggaccgtttatagtgagattgatttcggctgccaatggacaaacggtcgtctgctacgagtgcagccagtcggagttcaagacgaagtactcggtgaagcagtgcgcggccggcaagatcgggtctggccatcaccgggacctggtgccctacctggtgaggatggaccccctgtacaaggacacctggagcagtaagctcaagcggaacttcgacgagatcgacaaggcctccgccagcttcagcatcctcaaccagctcgtctag

SEQ ID NO: 31707 - protein, 100 aa, DROSOPHILA
MLPQKAGSKKYDGPFIVRLISAANGQTVVCYECSQSEFKTKYSVKQCAAGKIGSGHHRDLVPYLVRMDPLYKDTWSSKLKRNFDEIDKASASFSILNQLV

SEQ ID NO: 31708 - DNA, 2717 bp, DROSOPHILA
atccaacgttggacaaccaattaaattacgctctttcagctacgaagctcggatttaacagccgaggaatgtgtgcgctacctcaaggccaaggactacggaaaacccttctgttggctgcaaagtatgtgctcgattgcaaccgtcaacagttcgatgctgtacaaacacgaactgaacttgaataagaacaacaaggagattattgaccgcattgccaggcgcttgaactcttggcagcgtttaagccagcagattcgcgggctgaccttcaaggatatcgatttgtatagcttgcaggagaacatctatccagccggcctgtcgtgcagtctcgtccaatggactgccatcacacatgaggagcttcactcgcaaatttcagacgcactgaattcttcgtcagcggacaagggtattacgtacaactcttaccgcgctgtcatcgtccggggatcggccaaaatggagtgctttattagaataccgagtaactatccactggaaatgcctctatggattctgaatgtgcactggaacggatgccttaccgcgcaaaacaattcggcgatcaaggtttgaacttattcaggtattatcctccaattagcttttaaacttgtattcctcagatgatggagttctggaccaactccctgcagcccaaacatttggagcccaacgactgcatcctgtacgcgcagctcttccgcaccatctacagcttcgatatattcctcgaaaccgagggatccatgcaaaacaccattgagtacaacaaggagaagccttacataagcgccttcgccaagcggagccgctcacgcccctacaaatacatcaagaagggatcggtctacgcgttcaagcagtgacagttgaataacgaatgttgtacaacacaatgcgccaatgcggttactaaacgttctcacagttgcgtttattacgattagtaatacaataaataagtaacatttaaagctagctagctacgacttcattggcagttgatcttctgggaagaggtcgctgccaaggatccgggaggtagtgccgtcgcagaagggttctcaaccgcctcccgactctcgtccggcatcactttgtccacgacgtgcttgacgatcagcccatcgtcgcccagatagcagacagagtagccgtcgtaccaggcctcctgatccttcagcacctccttcagttgccagagcttgtacttccagaactggaacatgaccttcaggccggaaatgccgcgcactcgccaccttatccgcactgtgtagtcgtcctggtgcttcgtgatcttgagcacctcgaatttcacgtaggcgtacttcaggtggccaaccgttcgcaggatggcgatctgtttgacgtagtggtacaggcccaccgtgtgcttgcccgttatgttgttgtggaagattaggcccgggctgtaaatggagtagtctaggggctccacgaacagctttggtagcgtggtcctcagaacctcgtaggctctatccaggtcctcgggcttacgctcgttctccttagggttcccgggcagcctctccgctttggtgctctcgtaggcccttcgactttgctggaggttattggcggcatggctgtttaacaacttttgtggacacttcgccggcgcagacgcacttagccgcatggcggacgcccacgcccgctccttggagcaccagttggccatccagctgctccttcttattgatgaaatcccgaaatttcgcaacatcttgcaaggactttgtgtgctacttccttcaccggaactgggtttcctcgattcagatctgcctcgtctgcagatcacaccattcaaattgaacttagatcctggctatttttcgtttgcggccctcaggaatttgacgtgctcgtgtttaggtaacaacatttggaaataaaatactcggcaaaaatcatatggtcgttgggctgcagtgtggccagactgtgtgtaatgtcccaatagctgcgagtgccagtgtggatgttaggggaactcccgttgtccagggttgtcatgccggattagtttcacaaattaacttccgcaaccggaagtcatgaaaatggaaaatataacttatttggtttgaatttagtgtttcaagcttattacatgaaatatgttgtctcttttttgaagtgcaataatctcaaacacttttcatttatgtaagtacatggttttggagttgccttatgcggttttcttggttgttcttctgataaatgtttggtacctcaacaagcatcgaatccaggcactcgcatccgcatcgaatcccacaggaggcgtttgacgagaaactgttgcactttacagtactaaatggttttgtgcgcagacttgctgcgcagaccaatttgttacaagctcgaatcacacacaaatctgggggcatacacatatatctgtctgcaggtaaacacgttgtttacagccacccagctatataacactaatttgagctgaggagctttcgctggctgaaaaatcgacttttatttgagcttaaacccatagagcctcgtactatgacgcgctaatcggtgaccgtattattgagtgccaaattctcgacttagttgcaatgtctactcgactctgctagccctagtattgagaaaaatcaataggaagtaaataaaaatgctgcatgcctgaaactcgctttgcggat

SEQ ID NO: 31709 - DNA, 717 bp, DROSOPHILA
atggccaactggtgctccaaggagcgggcgtgggcgtccgccatgcggctaagtgcgtctgcgccggcgaagtgtccacaaaagttgttaaacagccatgccgccaataacctccagcaaagtcgaagggcctacgagagcaccaaagcggagaggctgcccgggaaccctaaggagaacgagcgtaagcccgaggacctggatagagcctacgaggttctgaggaccacgctaccaaagctgttcgtggagcccctagactactccatttacagcccgggcctaatcttccacaacaacataacgggcaagcacacggtgggcctgtaccactacgtcaaacagatcgccatcctgcgaacggttggccacctgaagtacgcctacgtgaaattcgaggtgctcaagatcacgaagcaccaggacgactacacagtgcggataaggtggcgagtgcgcggcatttccggcctgaaggtcatgttccagttctggaagtacaagctctggcaactgaaggaggtgctgaaggatcaggaggcctggtacgacggctactctgtctgctatctgggcgacgatgggctgatcgtcaagcacgtcgtggacaaagtgatgccggacgagagtcgggaggcggttgagaacccttctgcgacggcactacctcccggatccttggcagcgacctcttcccagaagatcaactgccaatga

SEQ ID NO: 31710 - protein, 238 aa, DROSOPHILA
MANWCSKERAWASAMRLSASAPAKCPQKLLNSHAANNLQQSRRAYESTKAERLPGNPKENERKPEDLDRAYEVLRTTLPKLFVEPLDYSIYSPGLIFHNNITGKHTVGLYHYVKQIAILRTVGHLKYAYVKFEVLKITKHQDDYTVRIRWRVRGISGLKVMFQFWKYKLWQLKEVLKDQEAWYDGYSVCYLGDDGLIVKHVVDKVMPDESREAVENPSATALPPGSLAATSSQKINCQ

SEQ ID NO: 31711 - DNA, 2857 bp, DROSOPHILA
aaaccaagaaccttatgaacgttataaacaaagtagtgtcgaagtgctttgagtgcgcaactaaggtaaataggccgaggcaggcccacgcggccatttcctatatgtagtggatgatactacagactttctcaatgtgtatgatttctatagtttactgtgatattaaagcatgcattattacaggtatgattttagagctttcgtttgttgccaggggcgcaggagaagccttttggtttttgaggatgtgcttcaatccccgtttctaaactctcaatcttattagttacatctcttactttcgactttgctaatgtagatggcgctgtatcttaatcttaatcgctaacttttgtatttcacgcatgtatgtacatatgtatcttgatgtattgagttttgagttgagttgagttgatagcttgataagatcccccatcgtgtgtttatctaacccaactgtgacctttaaccaacaattggttttggccactcataagctgcagtgccagctcctctacgaactccatcctaatcctaatccccttgctccgccttgcagtacaaactaaatttaactggcataaccggaggactcacctcggagcggtcgaacgagaacatggccggcggcatgtgcgattccaaggggacgacgagcagcagcgacattccctgacattacgggatggctcgccgagccaagggggatgcgcgaaggacgagggtgtccttcctgctgttctgagaggagcccgggggttttgctatcgtagtctacactgttggcactgcattccgttttgtgtacgcgtattagttggcggccgcttctagcgttgattaatgtcgaaaactttattaacatacgagtccaattagttgtttcagcagcacgatcttataatgcatattttgtttcactacattcgatgttacggcaataaaggtaacgcagatgcagatacatatgtatctcgagctctttcacttgggtctacaagtcggtgcgtagatagttcctgctgctttcgttcacgatgtgagtgcggggcatcatgttgcagcagctcatcttcggttcctgcgaaagattgtacaccttgagggccactgtttccttcgactggtctgtttggacggtggagtccctcagcttcagcaggttcttgaagaacatcaggtccagggcgaacagagcggcgcagatgaagcaaagtgctcccaatgcataggcaaatatcagcagatcttcggacagctgctccaccgtgaagaatatcagtagtcctggaggagagagttcatcactctgacattactgcatcccaggagccatattaccctctatggtgaagaacagaacgccacaggtcaacagaattatctcacaggtgccatagtttgaggtgccctcgatgatcctaagaggagatggtcttagcatatcatatatatatatgtcatagtcactgggtggttagttacctcgtgagcagcagcacagctgcaatgaaggtatagcccacgaaggtcagcgtgccgaagtcatcgccctccttcgaccaggagatgctgttgaggagggtccactccctggactgcttcttgttgatggcgaacacccgttccgagtgcttgtccgacaatcgctttacaatcagggccgccaccgtggcaatctaatggggatgtatctctatcattcaaggtaactcaaagtctccttctaactcgaagatactcgccagttggagaactttggtgcagatgcaagctggtagccccatgttagacgatcttgacgtgcactttgctactgcggcacgtacgttccgaatccgcctgacccatgcaaattttctcacattcaatttcgcagtttagcgtgggaaaagacgaactcaaagaagttggcctcatggcccatagtccataatagcccaaaaccttgaactgctcaacgaatcgagcacatctgagcatctgtgggcaattgctgtgccgcctatgcttcctatcggcagtgtaaatattaatataataaatatatatgtttatatgccccataaacaaaaggcgagacaaaagcagaggctttatgctctttcttatcagcgcgattacaaaaaacaagcacagcgattcatacggattgcgaatgcaagatactctcattagacttgcataattttactacttaaaggcctcagcgaacctctcaatgaagtccaagtacccaacttttgcagggctatcaggcggggaagccaaagagctcatcacggtgcgatcctcagtttcgtggaggcaatcggcgtgtagaaagcaatcccggcctatctcacttaggatcgcagctagcaattaaaattaatataagctgtaaccaatactgtaatatgatgagcgtttgcataattggggccggaaccgcgggtctttgctgtgcccgccattcgattgcaaatgggttcgagaccactgtgttcgagctatctgaccgaatcggcggcacctgggtttacaatgaggcaacaggggcggtcaatggcatcgatgtccacagcagcatgtacaagaacctacggtacgtaaatctttcgaaaaaccatttgatattctaagagtttccgggcctcttcaaagaaccaacctgcccaaggaggtaatgggcttcccggacttcgaaatcggggcaaacgaggcttcctatgtgagatccgacgagatctgcgacttccttaaccaatacgcgaaccatttcgacctgaagaagcacatcaagttcgatagctatgtgattcgagttttgcagaggaaaacaaagtggcaagtaagtcgtggagtcagc

SEQ ID NO: 31712 - DNA, 624 bp, DROSOPHILA
atgggtcaggcggattcggaacgtacgtgccgcagtagcaaagtgcacgtcaagatcattgccacggtggcggccctgattgtaaagcgattgtcggacaagcactcggaacgggtgttcgccatcaacaagaagcagtccagggagtggaccctcctcaacagcatctcctggtcgaaggagggcgatgacttcggcacgctgaccttcgtgggctataccttcattgcagctgtgctgctgctcacgaggatcatcgagggcacctcaaactatggcacctgtgagataattctgttgacctgtggcgttctgttcttcaccatagagggactactgatattcttcacggtggagcagctgtccgaagatctgctgatatttgcctatgcattgggagcactttgcttcatctgcgccgctctgttcgccctggacctgatgttcttcaagaacctgctgaagctgagggactccaccgtccaaacagaccagtcgaaggaaacagtggccctcaaggtgtacaatctttcgcaggaaccgaagatgagctgctgcaacatgatgccccgcactcacatcgtgaacgaaagcagcaggaactatctacgcaccgacttgtag

SEQ ID NO: 31713 - protein, 207 aa, DROSOPHILA
MGQADSERTCRSSKVHVKIIATVAALIVKRLSDKHSERVFAINKKQSREWTLLNSISWSKEGDDFGTLTFVGYTFIAAVLLLTRIIEGTSNYGTCEIILLTCGVLFFTIEGLLIFFTVEQLSEDLLIFAYALGALCFICAALFALDLMFFKNLLKLRDSTVQTDQSKETVALKVYNLSQEPKMSCCNMMPRTHIVNESSRNYLRTDL

SEQ ID NO: 31714 - DNA, 2858 bp, DROSOPHILA
catccaagtggtggattcaacgaagcaccttggacagacctcgcacttcgagctttctgaacccaatctgccgctcaagtgcattgtgttgaagaaagttaccaggtttttcaccgttatcggtgcacttctcttaatagtcgctggatttctcatcgtgtacgtcgcggtagtaatataccgagttaagcagaaggaagccctgttggcggtcgatcagttccaaaaggacataataaacgagctaatttacttgagctcccagtccgagagtcccgaggtagttattaaccagctgcaggagaagtttctgccggccaagaagcgctcaaagctcttgtcttcttggaacaaggccctcaagcagctggagaaaaacgatagccgtgtgctgttcggaatggtgaatcgtgacgggaaggcaatgcgcacaattgcgtggaacaggaacgttgacaaaaaggatgtggggcttgttaagaagtggcagagtcccgccttcgataactcgaacaagattgccaacccgccgactccctgcctgaagattaggcacatgttcgactcctcagaggtggatcaggccaatctgaagcagtccatcgtggagtcgatcatcgagaaggtcggcacgcgctgcaagatctgcgatgtccagctggacgtgcagtcctgctgcgtgtacatccgctgcgccagcgaggaggacgccggcacgattcacaaagagatcaacggctggtggttcgacaagcgcctgatttcgattaaattcttaagactggaacgctacctgagccgtttccccaagccctcggccgagccactttactttcacaccaacgaggcagccaacactcactcataaaacacacaactctacattagatacttaagttattaaatgcgaatttgttttacatgtacagctggagttgtcgtatttaatcgatttattatgaactagactttaaaacttaaaatctgctaaacactaccactacttagctagggagttggacgacagagcgctttccccagtttccaagtgtttgataagccggtacagggtagcagcctccttgattttgctgaaacccacgcagaaggcttcgatttcaatgaatagttcctggaaaataacaatagaatagtcactaagcacagtcgaggaaatggtagtagcgcataccctaacgttcacaatcttgttcctaatcaaggactgcagaaatacgcaaacgagtcgcaccaggcgagactgcatgtacttgtccttgactgtttcgcaagtcgagatgcaattgctgatgtataggtgaataaactcagtgggcaaaggtccggaggtggttagtctggaatgagagctcgagcatgttaaagaagccttcaatactcgatgtttggattcctaccggttgaccacctccatggagtgaagtgttatgtccatgttgaccaacacgttgaagtattcagttatgtcggaggtcgtcatcagtcttagcaagatctcaatggagatgagaggattgctttccacgagcagaggtagctgagatggaagcaatggataagacatatatctagcaatgttttcggttcttaccttgtccggggtcagtccatattggcgcgcaatgtccgtgttctgcttcagcaggtcgtcgaagaggatgtgctggttctggaggctgagtggctggagaaaagcctgctcgatgaggtgctttatgttgggggtaatgtagttggacttgtcgtagatgatctccaccttgtcgctgttcgactggtttatccagagcagctcgtcctcgaagtccattaggggcggggcgatggacagaaacatgctggtgcgctgattttaatttacaattattattattttccttgcaattttgtaaacaattttagtgtgaccgcgttgaggggttcttaagaacaatctgcacatgagagtgggccatctgaaaaatgatgtatgcaaatgtgcgcctaagggtgttaggttacacacttgtcaaaaaataaaaattaaaatatgaaaacagttcaatatttatattaaagcctgtttcaaagcttccatcgttccgaatcagagcagttgcacagacttctgcatgcgttagccattgagccctagcgcctgcactctggtcacactgcaactgttgcacggctgcaaatcgcaaagcaaaataaaatgcaccgcgcttgaattatccattttatggacagaaaaaaccttcacacacgaacagagaaaaatggatcgcgggaaaggaagcggctccaaccgatcgcagaagaaggttccgctgggcggagaactctttgcgctcggcaagagcgtacgcgatgactccaagtcgaagatcctgcccattaagggcatgtcgtcgtcggaccgcaagcgtgaagcctccaccgcactggccagctcgagcaagcggttccgcggcaacctgaaggacgcgggcgccccggacatgtcctccggtagtagtcagtgcgagacgtgggagcaattcgccgttgactgcgatctggataccgtggtcgagaccatatacgcggctttggagcagaacgacagcgaaactgtgggccggcttgtatgcggcgttataaagcagacaacgacgagctcctcgcgctccaaggtggacaacattgcccttctggccctgatctacgtggccaaggtacagccgagtatattctgcacagacatagtggcctgcgcgctgctttccttcctgcggcgggaggccaacgtgaaaatgaggtacaacaccaacctgcacattctgttcgccaatctgctgacccggggcttcatggag

SEQ ID NO: 31715 - DNA, 632 bp, DROSOPHILA
atgtttctgtccatcgccccgcccctaatggacttcgaggacgagctgctctggataaaccagtcgaacagcgacaagcctccagaaccagcacatcctcttcgacgacctgctgaagcagaacacggacattgcgcgccaatatggactgaccccggacaagatatatgtcttatccattgcttccatctcagctacctctgctcgtggaaagcaatcctctcatctccattgagatcttgctaagactgatgacgacctccgacataactgaatacttcaacgtgttggtcaacatggacataacacttcactccatggaggtggtcaaccgactaaccacctccggacctttgcccactgagtttattcacctatacatcagcaattgcatctcgacttgcgaaacagtcaaggacaagtacatgcagtctcgcctggtgcgactcgtttgcgtatttctgcagtccttgattaggaacaagattgtgaacgttagggaactattcattgaaatcgaagccttctgcgtgggtttcagcaaaatcaaggaggctgctaccctgtaccggcttatcaaacacttggaaactggggaaagcgctctgtcgtccaactccctagctaagtag

SEQ ID NO: 31716 - protein, 81 aa, DROSOPHILA
MFLSIAPPLMDFEDELLWINQSNSDKPPEPAHPLRRPAEAEHGHCAPIWTDPGQDICLIHCFHLSYLCSWKAILSSPLRSC

SEQ ID NO: 31717 - DNA, 2949 bp, DROSOPHILA
gagcgttctcccttaagtttaaaaccacccatgccccgcctggcgatatcctagtacaccgaggagatgtgctcacctcattgtacttcatagccaggggatccatagaaatccagagagccggcaatattgttgtacttggtgagttcagtgatttcggaccaactgtcgtacataaaattaaactcataaataagacactctctacctcttctttttttctagttgtgaactgtgttctatagagatatagttgcatgctagattttccgtacattcagagtttactttaattactactgcataagaagttatagttcgttggcatttgcaattgataattaatcaaaactcctcttgctcaaggtaaaaacgatatatttggcgaaaatccgtgtatttacccaacggtcggaaagtcgaacggcgtggtgagagcactgacatactgtgatatccacaaactgcacagggacgatttgctggacgtgctggactcgtatccggagttcctggagagcttcgttagcaacctggtaatcacctataacatgagagatgtgagtaagcggacctcgttgcagtgagtgcataactgaacggtggccatatcctgttcctttcaggacgagcactctggcgtcgatatcaagcaccgctacctgagagcaaagtcctccgacaaaatgaggagctctcctgacataccctctataagaatgtaagcgaataccacgttgcgggagaatgctgtcttacgtacttcttttcagagtcgggctgcgttataagaaacaaaatgttaatacttctgtgcataaagttaagaatgataactcccgagaccttaatatctttatagaaaacgaaatcgcaaactatcaccttgacttgttcgataataataattagggctcacttatgctcgctcaatccgaattatcttatttatttgtgcacaagctgttgcgaggctaaagagcgaaaagcaataaaggtcctaaccgaaaatcatggtcttgagttttttaatgaagtacgaaatgatctccagtaggttcagcagggaggcgccgaagaagagtcctgccacacttccgatgccgactgaaacgggattcggcgggattagttccgaagttagccgattgggttggcagcaggcatacctattagatccagcttggtctgggtgacttttcgttcgtaccgcaccgtgggtggagaggctatttgaatttcggtgatctgtgtattattattgtagagtgttccattttcagttatgaccctgccagagaagatgggctattagcaaggatataaactattttggggcctttaccccactagacttatctgctgctccacgcaggatggcaggcaaaccgtactgctaccgacgtactccttaactctggttgcaaacccttctgtaattcgattatcattaacattgacaacggatttcatcggtcaaagtctaagacatagtcacctttaatcaagcaatccgcgtgttgcaatccgcaatagagactttcgtctgcaaaagaaacagggcaatgaagtcacctttactttcatcattcaagtgcctcacgtactgcgatcctttgggttgaatagagagcagtcgcaagttttcatctcaaactcactccggatgatagacatgcaggccgagaagctgcgtggaacagaaaaagaagaagcagaagcaggtaactccggatgagtaactcactcacctactcctacctgtaaggaaacccctcgatggaactctcgctggggaacttgcacttgcgctgggaaatgggctcgtcgatgacaccttcgtggttgtgaatctcctcgacgttgaaggcgtatgttgtggggtcggtggagatggtataggtcaaggaattgaagaagggcagatcctcgggactgttgacgtacatcttagatgatgagcacaagtgttattttgttagctatgtgttagcccagcgaaacgtatcccatctcacctcatatttatacataacagaacttcgcatgtagagtcgcagacttcggttgttatccaacgaagaatacctgagaggcatttcttcgatgctgtcactggagtaggcatttattttattcgcgatttgaactactaaatattaacactaactagtccaatagattgttcgccagaaagcagtagcccatttccgtcacatgaaacttgaatatctcctcgcagtctgtcaccaattcgccacgaaagtatatttctttaaagcattcagtacaattggttggaaacatctagaagtgcaaatggtaatttagttcaaatataatccaaagtcccccccccccccatgcgacaccgacacctttcttcttatatccaaaatattgaaattgtacgggtaacttgtattcttggtaggctccttcgtaaatatgttgttggggttgagaaaagcatattcgtatatcattcttgtaaaggagaaggcaaagtcttcctgaaaatactcccgcatcattgccttgaattcgttaaacgctcggctttttgttaagcagattcctatcgatgggaaggtgtttatccagcgactgtaggcggtcgagacccctattgtcgtggagtccgtttcgtatctggttttcaatagaaccaatatggaaacggtgctccatccagaaatgccaatcacaaaaatccaaagcagcctgcaaagagtgatggttttgcgaaccgtagacaatatcctcgaatcgctgactcttaccctttattttccacaaaagaccttataaatcctcgaaaattcattactgacttccgccacatttcgtattcatgaaatcctttccacaatttcttcgtgactaattcgaaaatatatgatgtccatcctttatttaaatacggagggatgcacgcaagttctgatg

SEQ ID NO: 31718 - DNA, 534 bp, DROSOPHILA
atgtacgtcaacagtcccgaggatctgcccttcttcaattccttgacctataccatctccaccgaccccacaacatacgccttcaacgtcgaggagattcacaaccacgaaggtgtcatcgacgagcccatttcccagcgcaagtgcaagttccccagcgagagttccatcgaggggtttccttacagcttctcggcctgcatgtctatcatccggaaagggtttgcaaccagagttaaggagtacgtcggtagcagtacggtttgcctgccatcctgcgtggagcagcagataagtctagtgggggtcataactgaaaatggaacactctacaataataatacacagatcaccgaaattcaaatagcctctccacccacggtgcggtacgaacgaaaagtcacccagaccaagctggatctaatagtcggcatcggaagtgtggcaggactcttcttcggcgcctccctgctgaacctactggagatcatttcgtacttcattaaaaaactcaagaccatgattttcggttag

SEQ ID NO: 31719 - protein, 177 aa, DROSOPHILA
MYVNSPEDLPFFNSLTYTISTDPTTYAFNVEEIHNHEGVIDEPISQRKCKFPSESSIEGFPYSFSACMSIIRKGFATRVKEYVGSSTVCLPSCVEQQISLVGVITENGTLYNNNTQITEIQIASPPTVRYERKVTQTKLDLIVGIGSVAGLFFGASLLNLLEIISYFIKKLKTMIFG

SEQ ID NO: 31720 - DNA, 5264 bp, DROSOPHILA
tagccgtaggacttgggggaatcgaatcggaatggataggtcatgttacccacctagcagatgaacatctaaatatccttgagtgtgttcttcttcggtcaatagatttcgaaatttatatatatcccacacttggccagcttgtcatcccgacttcttcataggtactccccctagctgctttgccccccaatatttatatgtatgtatttttctaagtgtagcgaggaggagctgaagcttgaggcggactaggatgagcggcattccagtgcactttccgatcagaactcgacgcgtttcaaaaacagtttggaggagtctctggtaggcgagagttcccgtaaacccgtaaacccaaaaacccggaaaggcccgctttaaggacactactagtcaaagttatccacatcagcaaaccgtagaataagctagacggcacttttgtgccattttacacccaaatcgatggtgtttttttttggggaaaacttaaaaccaagttagctccatcgaaatggcgatacgaacctagttactcgaacaaacgaatatgcaaacttagtctgaaggtcaattggtcctcatttagagtcgttgaatgttcattacttgctttccgtgtacgttgacgacatttaccgaagatggatctggtttcactggacaaatccactccgattagcactcgaaaatcgaaagatagtgaagcaaaaccgactaagtctgttagctgttagatggaagtaggaaattacaagtaaaacgcgtaggaaaagcgaatcgataccaagtactttttccaagtagctaagtagctgagtaagagaggagcccgaactcgcatcagcatagaaataattcgaaagggatcgtaggaagtgtaaggattgtatttcgggctctgggaggttttcaaagtcggactcctgtgcttgaaaaacatatataaatgtacgaatatactaaacacctcacaaccggactttcactttcacgttcactcgactcgatcgccgtgatcctgcggaaaggggtgtcaggattaagcgagtgggtaatgcagcctggactcacatgggggaaaatctcgccgctgttcttgcacagattcgcatacttatcggagctaacgacgccccagtcgtcgcaggaggaggtgggatccccggccttgtacacatacgaaccagccatgttgtggaagtcgaagtagcaggtcaggaagtggcagaacctggtggagcagcgggttcggggataacacgttcgctaccgcgacaccagcgtactcacttgatggatggattgcagttggcgcccacggcgacaccacatcccacgcgcgacacgcgatcgcttatgatgttggtgaagtgtcgcacctggaagtccctgtagaagcgagggatcagcacaagggcgggacaaccacattttccagctcacctgtccgggtcgaaggcatggaggagagcgtccggatccgatacatgctggtactcggcgaacatcggtgtgaacgctttcgaatatatctccttcaggttgagcttctccctgggcgtcaccagggcaatggcctcgccgacgtgggggaagcgcagggtggaacggcactgcgatgacttcagggacaaggtggacgcatggttgttgcccatgtaggctagctccttgtcccagaacagctggcgcatccgcctggccttcgcgaacgtcttgttgcccttcgtcctcagttccccgcccgcaaacttgttccgcagattgttgagtatgtccagtgctatcttctgcattctcatgttgttcggcacggaagcatggaacttggtcgagttcccgtagacggtgaagtccttcagatggcacatgaagtgctttttcttctccagcacacacttgtgcgtcttgttgttgcagtagttgtagccggaagtcagtggtagcaggagcaccacagctaacaaaagcctccacatcattttcacttcgaatttacacagtgttaaaaagtaaaagcagtcagtttgatctgattttgaaggaaatgaactggcgatctccagtacaaatgatatcccaatatacgaacataccaaactgcctctgactgcccccggccctcaaggatcctattgatcctgtggagaagaagttgttgtgaggaagtctagttggaaaaatgctcgtacttacagcggggatgaggttaccattgttatagcacagattcgcgaactccttggacttggtggtgccccagtcgctacaggaagaggccggcttgcctgccttatagacgtacgatccgttcacgttgtcgtagtcgaagtagcaggtcaggaagtggcagaagctgaggaaacaggaggacatatcagttacccatcagttgtcacgatgcagccgcttacttagagctggacccttgacggcagttggttccgacggccactccacaccccacgcgagacacccgatcgctgacgatgatggtgaagtgggagctaacgtagtccctgtgggagcattccgtggttatatatgtgggcgtgatgctgcctatccctggctcacctgatgggatggaagccctggagcagacccctcggatcctgaatgtgcagatgctcgtcgaacattattttgaacatctttttcaatgcttcgtgaacggtgtgcttgtacttgggcaccatcatggccaggcactcgcccaccctggggaaccgcactgtcgagcggcacttggtgtgctggaaggacacggtggaggcgtgggagcgggccatgtacgccagctcgctgtcccacagtatctggcgcattcgcttggcttgcgtgaaggtcctgttctcactcgtcctgaatgcgccgctagcaaattggtttcgaaaattgttgatgatccgcagaatctcggttcgcagttttgggatgtccggcacgatggcatggtaccgggtgccgcccagcgaaggaatcttgtccagtctgcacataaagtgttgggtattcagcaggatgcatctgtgggtcctgttgttgcagtagttatagccgtatgtcatggtcgaaatcatcagaatcacaggcagcacggcactcaaaatcattttactagcaatttaaacagtgtgggaaacttgaaacttgaatgagttgtgatgtaaagggaaaaggacctttgatcgattaagggtccttcaatgatttaagaattaaacgaattttcaacgagttcgggaaatatcaaaacctaactacgctcttactcctgcaacaacaaacgatgtagcacgacatagatataagcaaaggagtatcctctcaccaggggaaagatctcgcccgtgttttcgcacagattcgagtacttgatgctggcgatggttttccaatcgttgcagcccgtggtagcttttccagtcttgtagacataggagccgttcacgttggtgtagtcgaagtgacaggtgaggaagtgacagaagctggaggagcagatgatcaggggcgagcgccaagtggaaggatcaccgtctcacccgactttgccgtccttctcgcagttggaacccacagcgaaaccacagcccactcgagacactcgatcgttgacgatgatggagaagtgtcccacgctgtagtccctacatcagcaaggagttatcccagctcggagaacttagttagcggccagtgcttaccttttggaatcgaatctacgggcaaagctctgcggatcctgaaccgtcttgtattcgtcgaaaatatgtgcaaagaccatgcgcagcagctccgtcagactgagcctgtgcccgacgggaggcgacagggccaggacctcgcccgccagcgggaagcgtagggtagaacggcactcggagtgcatgaaggagacggtggcggcgtgggtgcgcgccatgtaggccagctcgctgtcccattggagcgccctcatccgcttggcgctcgggaacgtcttgttctcggcagtgtccagttcccctccggccaacatgtcacgaaaggtgttcagtacggcaagcgtgtcctttcgcaccttcagcgtgtccggtatgctggcgtagtactttgcccggcctccatagggcttcagttcccccagccggcacataaagtgctttctctgggccaggtcgcacacatgggtccgattgttgcagtagttgtagccggccaccatgggcagcagcagcagcagcaacccggcgagcagcaggatggaggtcattgggagcaggaactctagttcgatcagtattcggggtgaggtggagtatagtagaatatattcccccattcaaacaaggcttgactatgtcaaaattgtattttattgttattttttcgttagagattttaggaagagctgctgctaaattcattcggtaatagtatgcaaagttatgtaatgtaatgtaaatggtttgagcgaaggttgtgccgaaatggccttggtttaatttcaatccttagtcggtctaaagtctagatatattcctgcggtctgctggccatggcatatagagaaaggcgtttggaactcgaaacgtcaacagaggtgtacaaaaaatacaacaaactattcaacatagcgcaatagaggtacgtgggtatagcttacaaaaatatctcgaggatttcgattctagcgggatgcttcatcaacaggaaacaatagtaacatttaacaaacaaatggctttgggaactgtcacatatgtagcttgggtgggtgggatgatgtggagatctgtgtccactgggtggtggccaggcggccactgagttctcgtaaagtgtgaatcaaaaactttcagtttacaacccgtaccagttctgttcgatttattatgttgccttatttatgcgtagctcggttcttcgaattgaaatcgcttatgttacggctataggtgtacaagtactatctatgcaagatcggtatataactctatgtactctgatttactgtcggaaatacgtattgtgaatgcaactattagtataaggtatatattatcagttgatttcctagaaaacttcaaactttcaacttcgaattttgaatttaactctctcgctcctcgcgccggatgcacacgtacaaatatataaatgtctatacgctgtatatactcgtatatatgtatatgtagatgacttattcagggaggcacgtaatttgaaacagaagcgcccttaacaatgggaaacaatctaaaactaat

SEQ ID NO: 31721 - DNA, 2607 bp, DROSOPHILA
atgacctccatcctgctgctcgccgggttgctgctgctgctgctgcccatggtggccggctacaactactgcaacaatcggacccatgtgtgcgacctggcccagagaaagcactttatgtgccggctgggggaactgaagccctatggaggccgggcaaagtactacgccagcataccggacacgctgaaggtgcgaaaggacacgcttgccgtactgaacacctttcgtgacatgttggccggaggggaactggacactgccgagaacaagacgttcccgagcgccaagcggatgagggcgctccaatgggacagcgagctggcctacatggcgcgcacccacgccgccaccgtctccttcatgcactccgagtgccgttctaccctacgcttcccgctggcgggcgaggtcctggccctgtcgcctcccgtcgggcacaggctcagtctgacggagctgctgcgcatggtctttgcacatattttcgacgaatacaagacggttcaggatccgcagagctttgcccgtagattcgattccaaaagggactacagcgtgggacacttctccatcatcgtcaacgatcgagtgtctcgagtgggctgtggtttcgctgtgggttccaactgcgagaaggacggcaaagtcggcttctgtcacttcctcacctgtcacttcgactacaccaacgtgaacggctcctatgtctacaagactggaaaagctaccacgggctgcaacgattggaaaaccatcgccagcatcaagtactcgaatctgtgcgaaaacacgggcgagatctttcccctggtgagaggatactcctttgcttatatctatgtcgtgctacatcgtttgttgttgcaggataaaatgattttgagtgccgtgctgcctgtgattctgatgatttcgaccatgacatacggctataactactgcaacaacaggacccacagatgcatcctgctgaatacccaacactttatgtgcagactggacaagattccttcgctgggcggcacccggtaccatgccatcgtgccggacatcccaaaactgcgaaccgagattctgcggatcatcaacaattttcgaaaccaatttgctagcggcgcattcaggacgagtgagaacaggaccttcacgcaagccaagcgaatgcgccagatactgtgggacagcgagctggcgtacatggcccgctcccacgcctccaccgtgtccttccagcacaccaagtgccgctcgacagtgcggttccccagggtgggcgagtgcctggccatgatggtgcccaagtacaagcacaccgttcacgaagcattgaaaaagatgttcaaaataatgttcgacgagcatctgcacattcaggatccgaggggtctgctccagggcttccatcccatcagggactacgttagctcccacttcaccatcatcgtcagcgatcgggtgtctcgcgtggggtgtggagtggccgtcggaaccaactgccgtcaagggtccagctctaacttctgccacttcctgacctgctacttcgactacgacaacgtgaacggatcgtacgtctataaggcaggcaagccggcctcttcctgtagcgactggggcaccaccaagtccaaggagttcgcgaatctgtgctataacaatggtaacctcatccccgctgtaagtacgagcatttttccaactagacttcctcacaacaacttcttctccacaggatcaataggatccttgagggccgggggcagtcagaggcagtttgtgaaaatgatgtggaggcttttgttagctgtggtgctcctgctaccactgacttccggctacaactactgcaacaacaagacgcacaagtgtgtgctggagaagaaaaagcacttcatgtgccatctgaaggacttcaccgtctacgggaactcgaccaagttccatgcttccgtgccgaacaacatgagaatgcagaagatagcactggacatactcaacaatctgcggaacaagtttgcgggcggggaactgaggacgaagggcaacaagacgttcgcgaaggccaggcggatgcgccagctgttctgggacaaggagctagcctacatgggcaacaaccatgcgtccaccttgtccctgaagtcatcgcagtgccgttccaccctgcgcttcccccacgtcggcgaggccattgccctggtgacgcccagggagaagctcaacctgaaggagatatattcgaaagcgttcacaccgatgttcgccgagtaccagcatgtatcggatccggacgctctcctccatgccttcgacccggacagggacttccaggtgcgacacttcaccaacatcataagcgatcgcgtgtcgcgcgtgggatgtggtgtcgccgtgggcgccaactgcaatccatccatcaagttctgccacttcctgacctgctacttcgacttccacaacatggctggttcgtatgtgtacaaggccggggatcccacctcctcctgcgacgactggggcgtcgttagctccgataagtatgcgaatctgtgcaagaacagcggcgagattttcccccatgatcacggcgatcgagtcgagtga

SEQ ID NO: 31722 - protein, 868 aa, DROSOPHILA
MTSILLLAGLLLLLLPMVAGYNYCNNRTHVCDLAQRKHFMCRLGELKPYGGRAKYYASIPDTLKVRKDTLAVLNTFRDMLAGGELDTAENKTFPSAKRMRALQWDSELAYMARTHAATVSFMHSECRSTLRFPLAGEVLALSPPVGHRLSLTELLRMVFAHIFDEYKTVQDPQSFARRFDSKRDYSVGHFSIIVNDRVSRVGCGFAVGSNCEKDGKVGFCHFLTCHFDYTNVNGSYVYKTGKATTGCNDWKTIASIKYSNLCENTGEIFPLVRGYSFAYIYVVLHRLLLQDKMILSAVLPVILMISTMTYGYNYCNNRTHRCILLNTQHFMCRLDKIPSLGGTRYHAIVPDIPKLRTEILRIINNFRNQFASGAFRTSENRTFTQAKRMRQILWDSELAYMARSHASTVSFQHTKCRSTVRFPRVGECLAMMVPKYKHTVHEALKKMFKIMFDEHLHIQDPRGLLQGFHPIRDYVSSHFTIIVSDRVSRVGCGVAVGTNCRQGSSSNFCHFLTCYFDYDNVNGSYVYKAGKPASSCSDWGTTKSKEFANLCYNNGNLIPAVSTSIFPTRLPHNNFFSTGSIGSLRAGGSQRQFVKMMWRLLLAVVLLLPLTSGYNYCNNKTHKCVLEKKKHFMCHLKDFTVYGNSTKFHASVPNNMRMQKIALDILNNLRNKFAGGELRTKGNKTFAKARRMRQLFWDKELAYMGNNHASTLSLKSSQCRSTLRFPHVGEAIALVTPREKLNLKEIYSKAFTPMFAEYQHVSDPDALLHAFDPDRDFQVRHFTNIISDRVSRVGCGVAVGANCNPSIKFCHFLTCYFDFHNMAGSYVYKAGDPTSSCDDWGVVSSDKYANLCKNSGEIFPHDHGDRVE

SEQ ID NO: 31723 - DNA, 4134 bp, DROSOPHILA
cttagccgaagactggttgaaaggactccgcgacatacggtccaccatacgacgcacttgctcctcgttgccgtacttctgggcatcggccacaacggcggcatgatgggaattagcctctgctgagatttcgtcctggatctggcgactcagtttaaaggacgacctgttggggatggtgaaagttcagtgtgactacttaaattctctggttcataatcattaacctgacggaggtgaagccaaagagtgccccgacgaagcctagggccatcagaaccacggccacctgccagttggagaccctcttcagaccacggatgccatagtacggtcctggattgggatcgtagttgggcctcacatcccacgcctggccgggattgaccgtctcgccaacgggactgcggtccgagcgcgatggctgccacagcaggctgtcatcgtagtctctcctccgctccggctttatcagggtcttgtacgcctcggagatctgaacaaatcgggctgtgcgctccggacacgcagcattgctcttaacatctgggtggtactgtggaaagggcagggtttaggaggctcctttggaatcttggagttacttaccaatttggagagctggacaaaggcattacggacttcacgggtgctgcaatcattgcgaatattcaaaacttcatagtgtgtttcgggttttcttggtttgtcgttcgagaaactgcgcaataggcaaacatttactttacataacaagttttatagacgtaaagtccttacttacgcacatatccagctcgagttggaaggcacaaccttagcattgtgagctttattagtattatttgtgctgatctgtcggagaaagcataattttaaactaggactttcaaaataaaatcaaaacacaaaacagctgatttgagggccttactctggcaatcctggctggccagctacaaaaatagagttggcagctctgttcgatgaaacagcaactcagttgaactatcgacagcgagcagtgctgccagactgtcggagcgctagcaacagaaataacaaacatttaatatttctttagccacttgacaaggcaaatcaatatgagtgcacaggaaaaagccttcgaactgcagcgccaggtgcgccagaacgcgcgggagtacgagaactccgtgaaggacttgtactcctgggagcaagacattaaaaacaaggagaaagagctccagaagtcgccgctttctgccgccaataaggttagctttaaattctttggtattaacaagtaaagctcacactttcaatgcaggatctgccagtgcgcagtcatgtccagacagacaagtcgcggaaggagagcccatcctcctcggcggccagctcacccacggagaaacaggacttgccagtggatcctgtggcccagcagtacaagaaggccaacgacatcaaggaccgtggaaacacctatgtcaagcagggggagtacgagaaggccatcgtggcctactccactgccattgccgtctatccccacgatcccatttaccacattaaccgggcactgtgctacctaaaacaggagaggtaggactgtttagaatgttctcgatacttcttccttacatgcatatttatccttgcagctttgatcaatgcgtggaggactgcgaggccgccattgcgctggataagctctgcgtgaaagcttactaccggcgaatgcaggccaacgagtccctgggcaacaacatggaagccctgaaggattgcaccactgtgctggccatcgagccgaagaacatcgaggccaagaggagcctggccagaatcaacgaccgtctgcgcaagattggtaaatataattttgattacctagtaagcatattttaaggcttttcattggcatccttacagccaccaaaagtgggccaaactttacacccgatcgtcctggcatgattgagatcttgccaatcgagaagcctgcttataaacgctccaagaaggcaatgcgcagtgttcccgttgtagacgtggtatctcctcgtgctaccatcgatgatagcaaccaactacgcatttcggatgaggacatagataagatatttaatagtaactgcggcataatcgaagaggtcaaaaaaacaaatccaaagccgacgccaatgccagacacatcaggtccacccaaagctgagaccattgctaagacctccaaagaagtcaagcctaccaaacagactgcggttaaagtagctccagctgtggaaacccccaaagaaacagaaacacgcaaggataccaagattgtgcctgaatccgataatgaggccaagccaagtgcacccaaaaaaacggctgtcgaggtccccaaggttcagactcaagtttctccaccaaagaccacaatagaacgcagcccagaagtcaataccgtgcaaactgaaaaaattgaacaagcttcgagcaacaacgcaatgtcacccagtccaatagaggtaggttcgcttaagatcaaagctgaattattattaaaccaattctctatgatttagcgcttcttaccgcccgcacccacgagcacagcacagttccatgtgacctggaaggagctgagtggtccgcagaagtaccaatacctaaagtccattgaagtcccgaatctgtgtaagatcctgggagcaggcttcgattcggacacgtttgccgacctgctgcgcaccatccacgacttctttgtaccaaataaggagccaaacacagcagctgtcttgctggagatcagcaaaaatgacgaattcaccattttggccatgctcatgtccgcagaggagaagaaaagtaggtgacaaaacttttcttgcataatttcgtttgcatttcatgtactttccccttttcacagtggtttcgtctatcctcaacgccatcaagaactggcccagcaagaatccggctgtgctggacaaccttttcaaggaatacggagtagcctaaacacccaatgttttatgttaaaatgtacttatgttgcttcaaattgttagctccaaaatcaactaaaacaacaaaaatgtttaaaatataaagaggatttgtagataggatcccaaaacgttacacagaatgcgaatgattgaatgtgttttgttcagcgtttattagatacgctaagatgctcactagttacacatgctgggaatatctcaaagtgactcatgttttttagcctagtataagccgaaaattccatatgcagaagaccatttgagcaaacaaaccgttcttgcccgaccagaccatgaatattgaataaccaattgagtaatacgaattagtgtaatttacataaatcagcgcattaattcaatctgcgaagccacctaaaatgggccttccagcaagaacaacaactccattaagcgacgttaagttggaagcgctgatgatcagtcggcttatccgatccgtgcacatatcattacagcgaaaccacagccaggagcaccaggaggggcccccaaagcaggaggggcatctcgccgagaaccgcgcaccaccgaggcacccgggcggcccactaattgcgtgagagctggtgcactaagcacaggggccgggttttactttagcccattgtgccgccgctagttataatttaatttacatttttcttaaccaacgctggctgcgatttatcaatttctcgccgcgagagaattcgcgagagcggcttcctccagggttgccgctccatttggcgcccggggagctgcaagtcgagctggatccgatctggatgtactgctttaatgtcttcaccagctaaaaatgtttctataaaatgtttatatgcttgtatagaaaatcaatcatatacgatcatataatcatataatcctgatacgaatgccacataattttgatacaagttcaagctatgtgtttatattttcgataaatcccgcccagctagcgttccagcgagccgcaagctccaagctgcgatctccgggcgcagtggcaacccccgacagagccgagctccggagagaccgattccgagtccaagcgaacgaggtggaacgggaatcgagcgagcttggggctatcgctcattcgaga

SEQ ID NO: 31724 - DNA, 1839 bp, DROSOPHILA
cagttgaactatcgacagcgagcagtgctgccagactgtcggagcgctagcaacagaaataacaaacatttaatatttctttagccacttgacaaggcaaatcaatatgagtgcacaggaaaaagccttcgaactgcagcgccaggtgcgccagaacgcgcgggagtacgagaactccgtgaaggacttgtactcctgggagcaagacattaaaaacaaggagaaagagctccagaagtcgccgctttctgccgccaataaggatctgccagtgcgcagtcatgtccagacagacaagtcgcggaaggagagcccatcctcctcggcggccagctcacccacggagaaacaggacttgccagtggatcctgtggcccagcagtacaagaaggccaacgacatcaaggaccgtggaaacacctatgtcaagcagggggagtacgagaaggccatcgtggcctactccactgccattgccgtctatccccacgatcccatttaccacattaaccgggcactgtgctacctaaaacaggagagctttgatcaatgcgtggaggactgcgaggccgccattgcgctggataagctctgcgtgaaagcttactaccggcgaatgcaggccaacgagtccctgggcaacaacatggaagccctgaaggattgcaccactgtgctggccatcgagccgaagaacatcgaggccaagaggagcctggccagaatcaacgaccgtctgcgcaagattgccaccaaaagtgggccaaactttacacccgatcgtcctggcatgattgagatcttgccaatcgagaagcctgcttataaacgctccaagaaggcaatgcgcagtgttcccgttgtagacgtggtatctcctcgtgctaccatcgatgatagcaaccaactacgcatttcggatgaggacatagataagatatttaatagtaactgcggcataatcgaagaggtcaaaaaaacaaatccaaagccgacgccaatgccagacacatcaggtccacccaaagctgagaccattgctaagacctccaaagaagtcaagcctaccaaacagactgcggttaaagtagctccagctgtggaaacccccaaagaaacagaaacacgcaaggataccaagattgtgcctgaatccgataatgaggccaagccaagtgcacccaaaaaaacggctgtcgaggtccccaaggttcagactcaagtttctccaccaaagaccacaatagaacgcagcccagaagtcaataccgtgcaaactgaaaaaattgaacaagcttcgagcaacaacgcaatgtcacccagtccaatagagcgcttcttaccgcccgcacccacgagcacagcacagttccatgtgacctggaaggagctgagtggtccgcagaagtaccaatacctaaagtccattgaagtcccgaatctgtgtaagatcctgggagcaggcttcgattcggacacgtttgccgacctgctgcgcaccatccacgacttctttgtaccaaataaggagccaaacacagcagctgtcttgctggagatcagcaaaaatgacgaattcaccattttggccatgctcatgtccgcagaggagaagaaaatggtttcgtctatcctcaacgccatcaagaactggcccagcaagaatccggctgtgctggacaaccttttcaaggaatacggagtagcctaaacacccaatgttttatgttaaaatgtacttatgttgcttcaaattgttagctccaaaatcaactaaaacaacaaaaatgtttaaaatataaagaggatttgtagataggatcccaaaacgttacacag

SEQ ID NO: 31725 - protein, 534 aa, DROSOPHILA
MSAQEKAFELQRQVRQNAREYENSVKDLYSWEQDIKNKEKELQKSPLSAANKDLPVRSHVQTDKSRKESPSSSAASSPTEKQDLPVDPVAQQYKKANDIKDRGNTYVKQGEYEKAIVAYSTAIAVYPHDPIYHINRALCYLKQESFDQCVEDCEAAIALDKLCVKAYYRRMQANESLGNNMEALKDCTTVLAIEPKNIEAKRSLARINDRLRKIATKSGPNFTPDRPGMIEILPIEKPAYKRSKKAMRSVPVVDVVSPRATIDDSNQLRISDEDIDKIFNSNCGIIEEVKKTNPKPTPMPDTSGPPKAETIAKTSKEVKPTKQTAVKVAPAVETPKETETRKDTKIVPESDNEAKPSAPKKTAVEVPKVQTQVSPPKTTIERSPEVNTVQTEKIEQASSNNAMSPSPIERFLPPAPTSTAQFHVTWKELSGPQKYQYLKSIEVPNLCKILGAGFDSDTFADLLRTIHDFFVPNKEPNTAAVLLEISKNDEFTILAMLMSAEEKKMVSSILNAIKNWPSKNPAVLDNLFKEYGVA

SEQ ID NO: 31726 - DNA, 2333 bp, DROSOPHILA
atagcgccgccaatttgttcggtcagcagatccccagattgacgagcaatcggatccaaatgggtgggccagtgcactgatgtctgaaatctaatccgttttcctattccgcacaggatgaaccgctgaacaccttcctcgaccttggcgagtgcaaggagctggagaagtactccctgaaaccgctacccgacaactgctcctacaaggcggtcaacaagaagggcgagattatcggtgtgttcctaaatggacttatgaggcgtccggtaagtgaacccattaagtatgatatgaatgatgcatgacttattgtgctccatctatgcatagtcccccgatgatgtgcccgaaaaggcggccgactcctgtgaacatcccaaattcaagaagatcctctcgctgatggaccacgtggaggagcagttcaacatcttcgacgtgtatcccgacgaggagctcatcctggacggcaagatcctgtcggtggacaccaactaccggggcctgggcatcgcaggccgcctgacggagagggcgtacgagtacatgcgggagaacggcatcaatgtgtaccacgtgctctgctccagccactactccgcccgggtgatggagaagctgggcttccacgaggtgttccgcatgcagttcgccgactacaagcctcagggagaggtggtcttcaagccggcggccccgcacgtgggcatacaggtgatggccaaggaagtgggtcccgcgaaggcggcgcagaccaagctgtagacgatctgagttcggattttgtactatcgtatgtgattctttagtttgtagttcggtggcgggttcccagtagtgtatcaacgttcgattcagcgtagtgtaaacaaacagtacaagttacgtatttatctaatttaatcttcccgtcgcgacggtaaacttaagtgttttgtgtttagaacgagctcaaaataaaaccttgtcttaataacataaccgactggacaacaacttagcccctgctggcacggcgggagttcgacttcctgttcttgccggagcgcttggcctggctccgtttggcctgggtcttcttggcgttcagtttccggttgctcctggtcctggaactacggctggtgctgctggcggtggtggtgcccacacggatcttcctcacaatcgagtacgtcaagttggacaggtacactttcttgggcgtgctggacgagctgtaggtgggactggtggaagtggaggaggagttctgtgaactggagaagtccaggcagcagatcacgagcaccacgatgcacagggtgccgatttgaatagttgacttcatgttggtagtaggattgcttttaatatgcttcgatggatgcggccggagtgcttaagtagtcgccctggttgtttgcacagtttgctcaatcgcctacgaaggccgacgaaattgtttaattttggcaaaacacactggcgcttaagcaatcgctcttgagtttgctttgccttgaaccaaaacaaaatattcaaaaatagctatatgctttcacgtttaatttgaccaaaggaaatggggaaatgggattacttagccgaagactggttgaaaggactccgcgacatacggtccaccatacgacgcacttgctcctcgttgccgtacttctgggcatcggccacaacggcggcatgatgggaattagcctctgctgagatttcgtcctggatctggcgactcagtttaaaggacgacctgttggggatggtgaaagttcagtgtgactacttaaattctctggttcataatcattaacctgacggaggtgaagccaaagagtgccccgacgaagcctagggccatcagaaccacggccacctgccagttggagaccctcttcagaccacggatgccatagtacggtcctggattgggatcgtagttgggcctcacatcccacgcctggccgggattgaccgtctcgccaacgggactgcggtccgagcgcgatggctgccacagcaggctgtcatcgtagtctctcctccgctccggctttatcagggtcttgtacgcctcggagatctgaacaaatcgggctgtgcgctccggacacgcagcattgctcttaacatctgggtggtactgtggaaagggcagggtttaggaggctcctttggaatcttggagttacttaccaatttggagagctggacaaaggcattacggacttcacgggtgctgcaatcattgcgaatattcaaaacttcatagtgtgtttcgggttttcttggtttgtcgttcgagaaactgcgcaataggcaaacatttactttac

SEQ ID NO: 31727 - DNA, 333 bp, DROSOPHILA
atgaagtcaactattcaaatcggcaccctgtgcatcgtggtgctcgtgatctgctgcctggacttctccagttcacagaactcctcctccacttccaccagtcccacctacagctcgtccagcacgcccaagaaagtgtacctgtccaacttgacgtactcgattgtgaggaagatccgtgtgggcaccaccaccgccagcagcaccagccgtagttccaggaccaggagcaaccggaaactgaacgccaagaagacccaggccaaacggagccaggccaagcgctccggcaagaacaggaagtcgaactcccgccgtgccagcaggggctaa

SEQ ID NO: 31728 - protein, 110 aa, DROSOPHILA
MKSTIQIGTLCIVVLVICCLDFSSSQNSSSTSTSPTYSSSSTPKKVYLSNLTYSIVRKIRVGTTTASSTSRSSRTRSNRKLNAKKTQAKRSQAKRSGKNRKSNSRRASRG

SEQ ID NO: 31729 - DNA, 2731 bp, DROSOPHILA
actttaatgctcgctcgtcatcaaactgctgttcagtgccaatggccatcgctcgaagcttttgacttgcttgcctgcgttgagttgtgcttatattttaaagcttaaaggcaataggtttcgcaaacatggccgttaaagtacatattcgtatgtagtagaaaagagtaccagctcgcacacacacacacacacagcctcgtaaacttgtatactatagcatagcagcttacagtggagcactcacaatcacatgcttcgacaagcacaagtttcaatttgttgcactttttgaagcattaagtagccgtccaggcttaagtgtgcgagtgtgtaagtgggtgcctgcgtgttggtgctactatgtgttgctgtgtgtgtgtgtgagagttggcaaagcggtttagtttcatttagcatttaacagttactagtatttggttttttcgcttattttttccggtttgtttccgtttttcatattacacaacactgaaagcacacgtaaagtttttgtttcctagtttcctccttattttcggatttctgttgcacatttagttaaaattacaatttacgcactaaacatgcagaaaatttcgtaaaactacggcaaatgcagtacgtccttaaagatcccctccgccaatacttttctaagccttacgatctagtggctatcggttctcgacgcctcggcaattttatgttacattttctatagacctggcgaaacttcttttgattttagttcgggattgcacaacaaacattttggctctacttagatgctaaaaacttaattggtatttgctgcattaaaggactgtgtctgttctcactctcaaacattctgaatttctgaacatttctgcattctggaaatattcagaaaattctctaaaagtgaaaacagccactgtcccttagttaatttcatttcgtttccaattgggaacaaaaggtcggatcacaattacaaaagtgggatgcacgggccttaggagttgcccaggttggacggcgacggtggccactggcgcttgatgaccgcaaagtgagtcatctggaaggtgttggtcacctggcagcggcgctccacgaatccggtgaggcagtagcccatgttgtagtcctccatcgagatgttcgacgtcagatacagcttgaactcgtcgttccacgcgggctgcgacttgtcacagcccgttgaccccgtccggattgcatcggcaggtattgcgggcgtgggcgtggcagccaccgaaccgttgcccgatgccccgccccccgctggcgatgcagctcctccgccccccgccgtcgtccggcgaaagtgtccggcaatcaggagggatccctgctgctccagcggcagcatccgggctttcgtcgcgcgccgttgggttccggagcactcgacgatgcggcagcgattgggctgccagaagcagggcgtgatggtccagtaactggatgaggcggtcctcgcccagccctcctcgggatacagcagtatctgaaaggaggcagagatgatgaaagggtatgtgagtgcactgtgggaaaataataatgtcttgttaatagattatgttataatatctaagggaagtcttatcagatcttcgttggtaatatgagtttagagttaaagatcaaaaatttacatttgtcctgcttagaatctcttaaccagacttttttctgagtgtaggtcgttcgggccatcggagccaattgcaaattggttttctgtgtcgcactttaattgaaaatcgtaattaaaatcgtgcagattgtttagccgggatttggaatcggattcggtttccatgaaactgcaccttaatcaagtccactgcgagtgtttatcattaagtgggcaattattgccgaacaggctttcgtttaatttgttcgaattaaattggcataaaatcgacatgaaattgcttttgacgcttttacggtggcgaattttacaccacgggagagtcaggccatataatcagattttcataattcacttgcacgcccgtcattcacctgttgttcttaggcaatgccccctgtccatttggcagctcctgctccactgtttgccgtgctgcattcccgtattaaattgacatttatgtcactgccactgaaaccgcagttggccagcagaagccgtaaatgaaattcgtcagctagtttatcattgccaaaatgagtagcctccgctcggcttcaatttcatttaccgattttgaatgcggccgctgcggtcaatgcacgcagctctttcataattaatacatttcacagtcgctaaatgccagacatttcaaatatttgcgcacaacgaggcgtatgcttaataagcgtccggcaaacaggaagcaggatggaaagcacgcagctccgaggggctaaccaaacattgaacttggcttaaaggctcctgcgctggcgagctgcaaagaaaactccagcaaaattgaaaaggggaaccaagcgcgaggagcaggaaaatctggagccaaagtgggtgaggcgaggcgaggaggtgcccaaagaggaaaggccagcggccaatggccaccgcagcaccctggaaacataaccaggcgccagccaccaccaggagctgatgcttttgaaattgaagtggctgcagctggagccacaaggaaattcgccacgggggctctcagtttcccagtttttccatgattttccctgg

SEQ ID NO: 31730 - DNA, 549 bp, DROSOPHILA
atggcccgaacgacctacactcagaaaaaaatactgctgtatcccgaggagggctgggcgaggaccgcctcatccagttactggaccatcacgccctgcttctggcagcccaatcgctgccgcatcgtcgagtgctccggaacccaacggcgcgcgacgaaagcccggatgctgccgctggagcagcagggatccctcctgattgccggacactttcgccggacgacggcggggggcggaggagctgcatcgccagcggggggcggggcatcgggcaacggttcggtggctgccacgcccacgcccgcaatacctgccgatgcaatccggacggggtcaacgggctgtgacaagtcgcagcccgcgtggaacgacgagttcaagctgtatctgacgtcgaacatctcgatggaggactacaacatgggctactgcctcaccggattcgtggagcgccgctgccaggtgaccaacaccttccagatgactcactttgcggtcatcaagcgccagtggccaccgtcgccgtccaacctgggcaactcctaa

SEQ ID NO: 31731 - protein, 182 aa, DROSOPHILA
MARTTYTQKKILLYPEEGWARTASSSYWTITPCFWQPNRCRIVECSGTQRRATKARMLPLEQQGSLLIAGHFRRTTAGGGGAASPAGGGASGNGSVAATPTPAIPADAIRTGSTGCDKSQPAWNDEFKLYLTSNISMEDYNMGYCLTGFVERRCQVTNTFQMTHFAVIKRQWPPSPSNLGNS

SEQ ID NO: 31732 - DNA, 2813 bp, DROSOPHILA
ataatttctcacagtgcaatggcataattgaacatctctttttctggtgctttcggaatagaaggagcacgcagccattgttgtgcatcgacctttttgattggcttttcttttgcacgtttttaattagtgggaatttggggatatcggacgaaagtgggtaaactgtagagccacagtgtgtggggcggagtggaatgttgtcctttggcgcattaaacaaacgaaatatttcataagcgcattgcgttctggccacaatgccgaatgatttatatgcaaagtggcataagcattctgagtgtgcgaatgtgtgtgtgtagcctggccctattttcccaggccatcccatcgcattttccattttacctaggccaaaccaaacaaaccgggggcaatcgagcgaacttcactccgcagcttttgctacaaattttccaaaatttataacaaaggccccacacacacacacacgcgtctataattgtggggtaacgggacagacgggcgggttctggaggacccctgggtattggctaccttacggttgagtggctcctggctcatggctcgtggcactttggcgccaggactccggctacgaggtcttcgcctcgcaatggatgacaatgtagtcaggagactgtaaaatttatgcacttttaggattgtttgcaatgcgctcgagaaggggattgttccattatgcgataagcactgggacgctcccaaggtgttccactgtacaacaaaaggaccggcttctcgaaacattccagctgcactgggtcagactagaaattaattatccacttattcgttcgctcaagaacctaaaaaggggaagatgctggtagctgctccttaaccctttctggttcactttgtcaaggaaacggagtatttcttccaacatattcccccttttaaatcgaatactttccagctaagagcatcgcaaaatcaatgctagagtatgctttgattattccacttcaagtcaattgaatccactgaatgcagcagcttcgcgagcaaggatttgatgcgcatcccgccgaatctccgtatcttttgtgcggatatagccattgaaatgcccctgcccttcgccactcaccttgttggaattgccattgaatttaagcagcttcttgcaggacttgccgcgactctcgaagtagatttcctgcggcgtccggcggcgtcgctgtccggaaacggcagcaggtgtggcgactcccttgcgctgcaactgcagctgggagaagggatcgctgcccgccaccgattgcgtggccttgtggcgactcacgcagaggaggcggcccaagatgccgcagcagccgctgggcggcgcctcacttccggcggccggagtcctggtggctccaactccggctccggcttcggctgcattgttgttggagcagcgggcggatatggtcattaggttgccatggcggccggtcgggcgattgacgtccatttccatgttggctagcagcggaatcgttgcctacagggcggcgtcgacttcctttgttgatttcgctcgatttccagtgtttgtttacaatttttgattgcggtttccctgaccgcaggctgtgtccttgtgtcctttccgcctttcttgcttttttgtcaatgtttttgctttgttgttgtttactggtggttaaagtctcaccgaaaagttggcgccctctcacagacacacacacgcgcactcacaaaacacgtcgcttccacaccagcaaaggaaatgcgaaaacttcgcaggaccttccagcgcgtcgaagttcacagcacaaagtcagcgagccaactgataaaagccgtggcttctggttcgtaaatgtgtgctttgcagggttgccagcttttcgaaagagagcggcaggactctagtacgaaggataagcataagcatcgagccgagcaagagagagagagagagggagagagaggagagagaggagtgcgcagaaacacgaatcaccttgtgtgcatgaatgaagcacagttattacggccttttttgtggcccatagtttcgtagttcttgctgtttacgtttcccagggtcaaagttgtacagccccccgctttatgtttgtaattgtttgaggcgccccacgttaggctgtgaatttttcggtcgcgacgggggaatactcgagtgtaatgggtaccaaggaggcatttctgcgtattaattatggtaattttcatctttgaatctacaatacctactaccttttgttgttttattagaaagtatgcaccatcgatagggctagaagatgattgggtgcgaacaaaacagaaatctattaagttttctttcgcccgtagactatgtatttaatcctggtaaataaactggttaaaaagtttacacttaagttgatacaattgccaattaatatcgctgatcagtaccattcatatatcggaatcccctgccgtaggtattaaaaagttcgtagagctggcaaaaacatttaatttcggtcaacacggacgggaaagaagaagaggcggcgggtgaccgtgtgactgtgtgtgtatgtgttcgtgtgcggcgagtgtgtggtggtagtgcctatgactatgagtgctttcggctctagacgtaatttcaatgtttcaacgtaatctttgatttgattatgctgttgagctgccctcccagggggcgggtcgtgagtgtttgccagtttgtctgtttgtttgtttgcttgctttcagtctggaccacttccgggcggagctataaacggattataaagtaatttaatgctttg

SEQ ID NO: 31733 - DNA, 813 bp, DROSOPHILA
gctgtgaacttcgacgcgctggaaggtcctgcgaagttttcgcatttcctttgctggtgtggaagcgacgtgttttgtgagtgcgcgtgtgtgtgtctgtgagagggcgccaacttttcggtgagactttaaccaccagtaaacaacaacaaagcaaaaacattgacaaaaaagcaagaaaggcggaaaggacacaaggacacagcctgcggtcagggaaaccgcaatcaaaaattgtaaacaaacactggaaatcgagcgaaatcaacaaaggaagtcgacgccgccctgtaggcaacgattccgctgctagccaacatggaaatggacgtcaatcgcccgaccggccgccatggcaacctaatgaccatatccgcccgctgctccaacaacaatgcagccgaagccggagccggagttggagccaccaggactccggccgccggaagtgaggcgccgcccagcggctgctgcggcatcttgggccgcctcctctgcgtgagtcgccacaaggccacgcaatcggtggcgggcagcgatcccttctcccagctgcagttgcagcgcaagggagtcgccacacctgctgccgtttccggacagcgacgccgccggacgccgcaggaaatctacttcgagagtcgcggcaagtcctgcaagaagctgcttaaattcaatggcaattccaacaaggtgagtggcgaagggcaggggcatttcaatggctatatccgcacaaaagatacggagattcggcgggatgcgcatcaaatccttgctcgcgaagctgctgcattcagtggattcaattga

SEQ ID NO: 31734 - protein, 164 aa, DROSOPHILA
MEMDVNRPTGRHGNLMTISARCSNNNAAEAGAGVGATRTPAAGSEAPPSGCCGILGRLLCVSRHKATQSVAGSDPFSQLQLQRKGVATPAAVSGQRRRRTPQEIYFESRGKSCKKLLKFNGNSNKVSGEGQGHFNGYIRTKDTEIRRDAHQILAREAAAFSGFN

SEQ ID NO: 31735 - DNA, 3715 bp, DROSOPHILA
tttgctcagtcgcagcggcgccaccgccaacaatggtcgaaatgcattaaaacactccatcaatccgaaccttttggcagggcggccaaaaatacgacggactgcatggtataatggctatatggctatgtggcgcaccaacttctgttcgctcgtccggattgcgggggatgatgacgaggaggatggcccatggcgttggccggaagtagccggtcataaaaataaaactcgagatggccgaccatctcgccaagtcaatgagtcatttgctgcaatggaatggccatcctgtcctgcccctttggaaactgcatccttgccagctcgaagctccctgtttccctgtgtccatgtgggtgtatcggcgagctcatttgtcttagcagtttgtcattagaaaaattgctcgtaaatttcgcatttaattacaatacaagagccagcaaattcagcaaagggccagtgcccaggggacttgagcgcaatctttggctgcaacaaagttgcagcggcatcagcgaagatggataaacaaagttggcgaaaggacaaggatagccgaagagggtataccctttcggatgccccgtaattaagccaacttgtataccaaaggtgatttaaaagtatgcagtgagagatacaaaatgagattctttttgacaccattgttatttcattagttagttagttagttattgttaagttaagttataagttataagttacgacttatctaaccaagctgatcctttagtcagggagggtatggccaaaagccgctgactcatttggttcagttcggctcagacaggcggcaaaacaaattgcgtgtgataatttagtgtcatcatttttgacaaagggcgttaacagctcacttactccgcccctcgaagagccgccttcatctcgttctccgtcttccagatttgtgctgaacctgaacgactcgacgccgctgacgattcgcttttcggcgcccgtgggccgcaagatgtactacaatcagacaggtaagtccgcccctttgaggagccgcataccgccaccaaccgccactaacccgccacccaaccgcctctgcaggaaacccccttcggccggcggcagtggcacctgggccaggtgtggctgtgggcagtctggtgctgccctgcgccctgcgtggccagtacgacctcttcgtcctcgcccgccactcgggagccctcaaggtggacgccctggcagagcatccccagcacgactggcccctcctcaacgccacgcaccgaatcgccattcgcacccagaatcgcgtgcggaagcgcgagatgatcgtcaagtgggaaaggaggtgagatctagatgattttattacacggatatacttataacttatgattattcaaaatcgtttcagcaagtttgatttccatgtcatgcactattgcctggtgattcagagactctccatggacacgccgcggatgatcttcaccaacttctgccaggcggtgtccgcctacacggaccagcagcccatgactcccagttgcgccgcaggcggtcccttggaagggatttggggtgctccaccccagcgggaaaggagacttaatcctaggcagaacgttcacatcgtgtgcacggggaagaggcgccaacagctgctgcgacgccttcttccgaggagcagttaccatctggacctgttcggaatccaccagggtagacagaacctcaccctgcgactggccagcagccaggtgaactttaaccgcacccaacctctggccctgaagcagcaggctctgatgcaactcaagatcggtggacagcacgggaagcaggtgtacagcttcaaggttccgcagacgactcgccagctgggggagccgttcatgaggcaccttttgatcccttgctcgggcagcgaaatccgggtgaagctgctacggcaacgcagcgaggtggggaaaacggaggccttctatagtccaacgtacattcggcagaagggagtcctaccaggggagcgctatctcatgcggttcgagcccagcaacgatgacgaggcgttgcgagctcagaaggtcatggtagggagataatcagtccgcggactatgtggcttggcccaaagtaatgtatacccctatttaacaggtggccctgagcagcgaggctctgttccgggatttgcccgagctgccgcagaacacgacagtcttcaatgtgcgaacgcggtgcagcagagccaccattgcatggaatggctcaccggatgaacgggagctgaggtaaagcgccaatgcagagttatgtgtgtgcgccttcttttaaactaaatttacttgcagctactgcatcatagtgttcaacctgccgcagcgcaatcgcagcgtggtggactttaccaactactgcatggactttgtgcccaagcgggtgatgcagtacagatacttcgagtggatgacctgcagggagaggcagcagaggtgggtcttagcagagcctatatgtaacgatatgataatatgatgcactactccccacagtcccgacaacatcgagacggagaccatactgaacctgatgccgggttccagctacctggtctacgtaacggccaacctgagcatgggcaagccgctgccctaccaggcgctgaccctccacatggccagtcagtgcctggacggatcgcacgagtccttctactaagcgctaccagtggtggtcgtaatcccccaatccaaacccatacccaaagcttcgctgcattttcgaatacaaacactgaactatccgtcgttgtaaagctaccttatccactacgattactacactatcctacaaaaaactatgctggttaaaagactatacacctagctccatatactatatatatatatacaatatcgaggcatgtgttgtgtgggcgagtgagtgtgtgcgtgtgacttctgattgagttgccatttgattccaagtattttcgagtgcttagttttgtaatttgtagctagccgttaatgtttgtataaactgtttcattggtttcccactccgctttattcgataagctcgttttctagattttagctttagcactcttagtttaatgtttaaagttagtttcgctgttaagtttacaccgtagtcgaggcgtcttgagtagttcttttgtacattaagcttacacttagctctacattagatataccatgtcgaacctacgagtctacgaacatacgaacatatatatgtgcgttgaaagcgttgtattttttgaagccgaacttatgcaaccgaaaggagacaataaacaaatgtgctataaaggacgaaagtgtcgcaaataaatgtgagccactgctaaagaagaccgatttgcgcaaggtgttttactcggcggcggcggcaagaagcgtttggggcacaaacgacggatgagtgattgccactcgtaccatcatcatgacgatggcgtgtggaacgacgtgcgcatagtaatgacagcggatggcaatctgaacgataagcggcacccgataatgaaacattaaactaaaccgtcggtagtcgctggccataaatctgtcggcagtctgctcgcagaagcttttaggtgcggaccccttgcgcggcatactttcgggcttccgttccgttccgttcgccaatggccctgctccactacaccttcgaccagctcgagttg

SEQ ID NO: 31736 - DNA, 1389 bp, DROSOPHILA
atgtactacaatcagacaggaaacccccttcggccggcggcagtggcacctgggccaggtgtggctgtgggcagtctggtgctgccctgcgccctgcgtggccagtacgacctcttcgtcctcgcccgccactcgggagccctcaaggtggacgccctggcagagcatccccagcacgactggcccctcctcaacgccacgcaccgaatcgccattcgcacccagaatcgcgtgcggaagcgcgagatgatcgtcaagtgggaaaggagcaagtttgatttccatgtcatgcactattgcctggtgattcagagactctccatggacacgccgcggatgatcttcaccaacttctgccaggcggtgtccgcctacacggaccagcagcccatgactcccagttgcgccgcaggcggtcccttggaagggatttggggtgctccaccccagcgggaaaggagacttaatcctaggcagaacgttcacatcgtgtgcacggggaagaggcgccaacagctgctgcgacgccttcttccgaggagcagttaccatctggacctgttcggaatccaccagggtagacagaacctcaccctgcgactggccagcagccaggtgaactttaaccgcacccaacctctggccctgaagcagcaggctctgatgcaactcaagatcggtggacagcacgggaagcaggtgtacagcttcaaggttccgcagacgactcgccagctgggggagccgttcatgaggcaccttttgatcccttgctcgggcagcgaaatccgggtgaagctgctacggcaacgcagcgaggtggggaaaacggaggccttctatagtccaacgtacattcggcagaagggagtcctaccaggggagcgctatctcatgcggttcgagcccagcaacgatgacgaggcgttgcgagctcagaaggtcatggtggccctgagcagcgaggctctgttccgggatttgcccgagctgccgcagaacacgacagtcttcaatgtgcgaacgcggtgcagcagagccaccattgcatggaatggctcaccggatgaacgggagctgagctactgcatcatagtgttcaacctgccgcagcgcaatcgcagcgtggtggactttaccaactactgcatggactttgtgcccaagcgggtgatgcagtacagatacttcgagtggatgacctgcagggagaggcagcagagtcccgacaacatcgagacggagaccatactgaacctgatgccgggttccagctacctggtctacgtaacggccaacctgagcatgggcaagccgctgccctaccaggcgctgaccctccacatggccagtcagtgcctggacggatcgcacgagtccttctactaa

SEQ ID NO: 31737 - protein, 462 aa, DROSOPHILA
MYYNQTGNPLRPAAVAPGPGVAVGSLVLPCALRGQYDLFVLARHSGALKVDALAEHPQHDWPLLNATHRIAIRTQNRVRKREMIVKWERSKFDFHVMHYCLVIQRLSMDTPRMIFTNFCQAVSAYTDQQPMTPSCAAGGPLEGIWGAPPQRERRLNPRQNVHIVCTGKRRQQLLRRLLPRSSYHLDLFGIHQGRQNLTLRLASSQVNFNRTQPLALKQQALMQLKIGGQHGKQVYSFKVPQTTRQLGEPFMRHLLIPCSGSEIRVKLLRQRSEVGKTEAFYSPTYIRQKGVLPGERYLMRFEPSNDDEALRAQKVMVALSSEALFRDLPELPQNTTVFNVRTRCSRATIAWNGSPDERELSYCIIVFNLPQRNRSVVDFTNYCMDFVPKRVMQYRYFEWMTCRERQQSPDNIETETILNLMPGSSYLVYVTANLSMGKPLPYQALTLHMASQCLDGSHESFY

SEQ ID NO: 31738 - DNA, 3772 bp, DROSOPHILA
agtcagtgcctggacggatcgcacgagtccttctactaagcgctaccagtggtggtcgtaatcccccaatccaaacccatacccaaagcttcgctgcattttcgaatacaaacactgaactatccgtcgttgtaaagctaccttatccactacgattactacactatcctacaaaaaactatgctggttaaaagactatacacctagctccatatactatatatatatatacaatatcgaggcatgtgttgtgtgggcgagtgagtgtgtgcgtgtgacttctgattgagttgccatttgattccaagtattttcgagtgcttagttttgtaatttgtagctagccgttaatgtttgtataaactgtttcattggtttcccactccgctttattcgataagctcgttttctagattttagctttagcactcttagtttaatgtttaaagttagtttcgctgttaagtttacaccgtagtcgaggcgtcttgagtagttcttttgtacattaagcttacacttagctctacattagatataccatgtcgaacctacgagtctacgaacatacgaacatatatatgtgcgttgaaagcgttgtattttttgaagccgaacttatgcaaccgaaaggagacaataaacaaatgtgctataaaggacgaaagtgtcgcaaataaatgtgagccactgctaaagaagaccgatttgcgcaaggtgttttactcggcggcggcggcaagaagcgtttggggcacaaacgacggatgagtgattgccactcgtaccatcatcatgacgatggcgtgtggaacgacgtgcgcatagtaatgacagcggatggcaatctgaacgataagcggcacccgataatgaaacattaaactaaaccgtcggtagtcgctggccataaatctgtcggcagtctgctcgcagaagcttttaggtgcggaccccttgcgcggcatactttcgggcttccgttccgttccgttcgccaatggccctgctccactacaccttcgaccagctcgagttgtacctagaatgggcgttcgcccagcacggagaggccacgccgattccctcgatccagccgtatccgggcgtgttcgtgggcgatctcagccagctgaaccgcttcaagcgacatgccttctccgccgtcgtgggcacgctcttcgtcctcgccttctgcggcaacctgagcaccctctatgtgaacagccgccggaagctgcggcccttcttccgggcctgcctcatctcactggcctgcagtgaccttgtctccagcatattctgcaccgtatcctacatggcccagttccaggcgcagtatctgcagctctgggtgaggcggcagggattgagcagactcaacacaagctaattacaaatctccttagacaattggtggcttcatgtgcaagtttgtgccgttcataaccaccacgtcggtgttgtccggcagcctgaccctggtggccatcgccttggaccgctacttggccgtgatgcgacccgtgctggggttctggagtcccgacaaacgcttcagcactctgagcatgctgctcatctgggcatgttcgataggatcctctggcccgctgctgggcatctacgactaccgaaagatctatctcctggatgtggaggactccagcgaggagagcgaggaggtcgtgaccgctgtgcccgaggagctggtggtcaccgagctggaaatggttcacatgtgcctggccggggacgtaagtcaacgactggattatcgcttaatacagttgacagcgattaaggggatttggacggggggatgtcaagttgttgaatcaatgttccgattatcttatcagccgcgtcgaaaacaatttatgcaattctataaatattccgttttagcacgacgtcggactctactacgtcatactgttcaccctgatcttcctgccgtgcattgtgtccttcctatggctgaatgccgtgattgcgaggcagctctggctgcggagacactaccaccaggagcagcaggagcagcatcaggagcccaaggagggtcagtttaagaccatggcgaatggcggggatctcttgatgccctccaccttggtcagtgccatgggagtggccgttccctttgcgctggacaacactcccttgccgcccaagagtaccgtcaacgctcctggcaagaagaccactgctgctgctctagccagggaggccaggcaccgcaagatggtggtggtggtgctgctaatgatggcggttttcatatgccttcgactgcccgcctgggtcttcctgatcatgcggctttatggatcctactccgagcccatcgactggctcctgtacttcagcttcggcatactgaaccttttcagttgcgccctaaatcccatcttctacaccttcctcacccagaccattaggaccttgacgctggtgaaacacaaaattcagggatttcttggctgtccgcctggtaaagtgccggatggtatgcccacggatcagatggacaaaagcgggtgctgctgcggcctgaggccacccaccttcacatggaggtgccatcccagccgcgatagggcagcagccaccgtaatccgggatgtggaccagccagatccgccctccgaccaggtgcaaccggatccgagtagcctacggcggttcctcagctacaagcaggaggtgttcaccatttacaagcagtgcggtgactcgtcgagtgcgtcaatcgagtcctccgcctgataggcggtggtcataaatcacccgggtgcatttgtcggatacgggggccaacggttagcagaaccccagaacttgattgatggatggatccagcccccattcactctgtacaggcgcaaaaacggtttgtcacggtgggtatatcacccacgaatacactagcacgcatataagatataagctcacatattatgtacctcatcaaatgtgtaaatatgaggaataaacgaatgggtgttggcagctaactaaccattaacacatggcgcaatcgaaatcgggaaggtctcagctattattgtgacgaaaacctaagacctttcaagtaccacttaaaactatatttagagaacttaagcaaattgtgagattaaaatgcaatgcaactcctaaaggtgcgaatatacctattcttaaatatttttactctagaaatactgacatctttatgtgcttagttttcgttcagacagactatctttgttatttctaagaacgtagtaattagttaatggaattaattagtaaccgaaacttaaaattgagtcatgccaaaaaaagagaattggcctgacaagacacacattatagagtcagcagatcgtggacgagacaatgagcccgcaatgcaatggaactagattgtatcatatactagatacttccgcttggaacaatggttaacagatctcgtgagagatggggctgaaagcagttgttaattgtcaaatgttgagcacgccagttaaatttagctatgcagcgaaagctctctcccatactctcttcccatgaacttttttaagccgcagagcccgaagctcgactcaaagctgaattctgcgttttctggcattcagtgtcggcggtttgcggcgagcggttggattcggattctttggtcggtaaaacgcgaaatcttctgtgcggcgggtgaaatcttcggcagaagaaacaacaaagcgacaagtgtggagtgtggagtgcataccgtaccacg

SEQ ID NO: 31739 - DNA, 1566 bp, DROSOPHILA
atggccctgctccactacaccttcgaccagctcgagttgtacctagaatgggcgttcgcccagcacggagaggccacgccgattccctcgatccagccgtatccgggcgtgttcgtgggcgatctcagccagctgaaccgcttcaagcgacatgccttctccgccgtcgtgggcacgctcttcgtcctcgccttctgcggcaacctgagcaccctctatgtgaacagccgccggaagctgcggcccttcttccgggcctgcctcatctcactggcctgcagtgaccttgtctccagcatattctgcaccgtatcctacatggcccagttccaggcgcagtatctgcagctctggacaattggtggcttcatgtgcaagtttgtgccgttcataaccaccacgtcggtgttgtccggcagcctgaccctggtggccatcgccttggaccgctacttggccgtgatgcgacccgtgctggggttctggagtcccgacaaacgcttcagcactctgagcatgctgctcatctgggcatgttcgataggatcctctggcccgctgctgggcatctacgactaccgaaagatctatctcctggatgtggaggactccagcgaggagagcgaggaggtcgtgaccgctgtgcccgaggagctggtggtcaccgagctggaaatggttcacatgtgcctggccggggaccacgacgtcggactctactacgtcatactgttcaccctgatcttcctgccgtgcattgtgtccttcctatggctgaatgccgtgattgcgaggcagctctggctgcggagacactaccaccaggagcagcaggagcagcatcaggagcccaaggagggtcagtttaagaccatggcgaatggcggggatctcttgatgccctccaccttggtcagtgccatgggagtggccgttccctttgcgctggacaacactcccttgccgcccaagagtaccgtcaacgctcctggcaagaagaccactgctgctgctctagccagggaggccaggcaccgcaagatggtggtggtggtgctgctaatgatggcggttttcatatgccttcgactgcccgcctgggtcttcctgatcatgcggctttatggatcctactccgagcccatcgactggctcctgtacttcagcttcggcatactgaaccttttcagttgcgccctaaatcccatcttctacaccttcctcacccagaccattaggaccttgacgctggtgaaacacaaaattcagggatttcttggctgtccgcctggtaaagtgccggatggtatgcccacggatcagatggacaaaagcgggtgctgctgcggcctgaggccacccaccttcacatggaggtgccatcccagccgcgatagggcagcagccaccgtaatccgggatgtggaccagccagatccgccctccgaccaggtgcaaccggatccgagtagcctacggcggttcctcagctacaagcaggaggtgttcaccatttacaagcagtgcggtgactcgtcgagtgcgtcaatcgagtcctccgcctga

SEQ ID NO: 31740 - protein, 521 aa, DROSOPHILA
MALLHYTFDQLELYLEWAFAQHGEATPIPSIQPYPGVFVGDLSQLNRFKRHAFSAVVGTLFVLAFCGNLSTLYVNSRRKLRPFFRACLISLACSDLVSSIFCTVSYMAQFQAQYLQLWTIGGFMCKFVPFITTTSVLSGSLTLVAIALDRYLAVMRPVLGFWSPDKRFSTLSMLLIWACSIGSSGPLLGIYDYRKIYLLDVEDSSEESEEVVTAVPEELVVTELEMVHMCLAGDHDVGLYYVILFTLIFLPCIVSFLWLNAVIARQLWLRRHYHQEQQEQHQEPKEGQFKTMANGGDLLMPSTLVSAMGVAVPFALDNTPLPPKSTVNAPGKKTTAAALAREARHRKMVVVVLLMMAVFICLRLPAWVFLIMRLYGSYSEPIDWLLYFSFGILNLFSCALNPIFYTFLTQTIRTLTLVKHKIQGFLGCPPGKVPDGMPTDQMDKSGCCCGLRPPTFTWRCHPSRDRAAATVIRDVDQPDPPSDQVQPDPSSLRRFLSYKQEVFTIYKQCGDSSSASIESSA

SEQ ID NO: 31741 - DNA, 4249 bp, DROSOPHILA
cggccacaagatccattaatgaaacagatgatgaattgtctcaacaagttgccatgggaattttccaaggcgccatctgatttatgactccaaatatctagtatctggcggattccttttgaattctgaaatctatatgaattatagattatgtagatcccattaaactggtcattcgttattgttttgaaatcgtactgcgtaccttcttcaattttattcattactttttattgatttcattcgaatggtttacgcttcatcaacctagtttactacctattcaatgggaattgccaagaatcaacgaatttatttcccgtaactcacataattccgcaaaagttgtccctgctccgtggcgctacttccaattccatttgggatattttccaactgaaacttgcgccatctgatatccgagcgatatttgtttggctgccctgcagtaacttcctttgcaatcagcgaatgcgccacttatagggatatctgcttaactcgttctttatctctgtttacgcccagagttttccggcagcagagcagctgggaaagctgaggctgattgtcaatttgcggaaagcggggcgaggagctcgtccactgcgcactgccctgcccgcctccacttccattcccgatcccaatcccaatgccaatcccagaggcacgggcacagactccccgccgttgttgtttgcaaaaatagaattttgtctctgattttaagtatttcgcgtgaaaagtaacagaagcgacccgaacggcacgggccagaccaaccacactatactatactacactatgccatactatatagactatagaccagacaagcgccccagacatcgcaggaggatggaggatgggggatgaaggacggggggacgggcttggggattgccagtcagagtcagagtcagtgtctctcaattgcaaatttatgtgaattgagtcaattttatcgcagccatctagggagttagtttgggttagtttacttttgacttgtttgtccctggaaaactttgcgtcgtttgactggcgtaaatcgaacgactggagccacttgaacttgtcgctgccagcggttatccttttctggcttcctcctcctcctcctcctcctcctcttgtcactcctcctgtcctgctgctcgctcgtgctgaccagctgggttcgccatctgtggattattagctcgccaatgaacgtgagggcggcccagcagctgcccaccaccaggatgaagaagggtcccttcaggtgctccgtggtcaggacgatagccgtttccgggaactgggggcgcatcttgttgatcctgttgaggtacgtgttgttgtacctaaagtccgcgtcgatcttctgaaaaatgcccacgtcgcgcatgaggcggatgatgctgttcatctcgaagagaaaggggaatcccgccttcatgatcatctgcaccggactgctgaaaacgttgttgggaaaggcgtatatgacgtccgccaggggactctgcatcgtgtacatccggttgctcaggatgcaccgctggccccacttcaccgcctccaggttcttcgattgcggaatgaactccggcgaaatgttgtatccgttaaagatccacatgtcgtcgtcattctcgaaccagtcgcgactctcctcgtggccgccaaacggaatacccgcggccaccacttccgtcagctcgtccagctggtgaaggtagccgggatcctggaaggtggctatcatcttggacgtgtatgtagccaccacgttcaggccatacaaagtcagggccatgaagaacagcctcgtcgtctcgcaaatgggtcgttcctggacggctatcgatatggtgacggccagggcattaatggccgtaagactcaactgttggtaatacttcggctccggaagaatcataaccagggtgaaccagaacagccagctgattattagaatcaggatgaatccaatccaggtgtaggcttcgaaaatacccaccaacgcctgccaggcgggtcttctgtcggccatttttatgtaccacgtgtgcgcatcctgcagataggtatcggatccccaaaaatggtccgccacctcgttgtccggataatagccgccgaagacaaagtcgcactcgttgttctggactttccccagtaatccagtccagttagctgggccatccatttcaccacgtgactccaggctgcaggtttggtttaccttaccagtggaaaataggatagttgttagcttagcacaataagcaggacttttgcaagccaagacgatcttgaagtatgaaagtgttaaatactcacatcgaatttcagtcgatttttcatgaaccccaggatcctcatctctagtcccaggatacagtcggcctccacaaagggagcagagatggaggaacaggcaaaaaaggtgcagttcctgggactgaatcctgatacgtagtcctgcatggaggccttaacgacagcattattggggtaaagtttgccatcgtggcactggcccacgctctggacattcagaatcctgcagtttacattgctgtagtaatcattgaccagcagattgtagttcatggtggagttggcatagagaagagcaactcggtgcacgtaaaacatttccatgaggtccttgaaaatattggaggctacgccaagcggtcgattccgacaagtcgcattatgaaagagcaccagaaaacgcgctcctggattccaggatcgcatttcgacaatttttttcttcattagctcttttaatcgatccaccgagtccaccactatcacataattgtccgctaggatcagctctcccttgtcttcggtcccattcgtgatgttgtaatcactggccacgcgcatttggaagagttcctccctgtccggcggccctggattcgtgactgcttcgttgatcagtttgctgaatccttcctggatctgatccgccggactggacagatgaaaggcgtgcaccagcatcaagttataggctctggtgaagcgctccttcgggttgcgaaagaagaagatttgggcgaagctatcgaggcagcccactccagccttccacacatcgggacccaagtccttttcgggcagcatgaagatgaccgtgttggccgtctcattcgaaagattcactatcccctggcacaggtttaaaatctgccccagaaagatgatgatgatgagacccggattattacaccacattattgcttctgtcacgtcggacaattgcgaattaactgcggctggtgtgagtttccgtgggaaggtgatgtgactgatgtcctacatttgattgcttgggtatatcggtttggggtctggaacagtattaacactacacagtgcctctgactgatccatcgcaaatcgctgtaatatgataatccgtccattaaacaaccactgctggcttgtaaaagtgcattaagtcattctggagtttcgcgtccggaagcgcattcaactttcgcctttggccgttgtttgccttgtataattgactgctgtcagcgtgccgacaacgaggatgcccccagcaacaataataacaacagcagaaaacaacaaacaatcgccattgcaacatgcaaggcttaaattaaagcaaatatttgctcagtcgcagcggcgccaccgccaacaatggtcgaaatgcattaaaacactccatcaatccgaaccttttggcagggcggccaaaaatacgacggactgcatggtataatggctatatggctatgtggcgcaccaacttctgttcgctcgtccggattgcgggggatgatgacgaggaggatggcccatggcgttggccggaagtagccggtcataaaaataaaactcgagatggccgaccatctcgccaagtcaatgagtcatttgctgcaatggaatggccatcctgtcctgcccctttggaaactgcatccttgccagctcgaagctccctgtttccctgtgtccatgtgggtgtatcggcgagctcatttgtcttagcagtttgtcattagaaaaattgctcgtaaatttcgcatttaattacaatacaagagccagcaaattcagcaaagggccagtgcccaggggacttgagcgcaatctttggctgcaacaaagttgcagcggcatcagcgaagatggataaacaaagttggcgaaaggacaaggatagccgaagagggtataccctttcggatgcccc

SEQ ID NO: 31742 - DNA, 2151 bp, DROSOPHILA
atgtggtgtaataatccgggtctcatcatcatcatctttctggggcagattttaaacctgtgccaggggatagtgaatctttcgaatgagacggccaacacggtcatcttcatgctgcccgaaaaggacttgggtcccgatgtgtggaaggctggagtgggctgcctcgatagcttcgcccaaatcttcttctttcgcaacccgaaggagcgcttcaccagagcctataacttgatgctggtgcacgcctttcatctgtccagtccggcggatcagatccaggaaggattcagcaaactgatcaacgaagcagtcacgaatccagggccgccggacagggaggaactcttccaaatgcgcgtggccagtgattacaacatcacgaatgggaccgaagacaagggagagctgatcctagcggacaattatgtgatagtggtggactcggtggatcgattaaaagagctaatgaagaaaaaaattgtcgaaatgcgatcctggaatccaggagcgcgttttctggtgctctttcataatgcgacttgtcggaatcgaccgcttggcgtagcctccaatattttcaaggacctcatggaaatgttttacgtgcaccgagttgctcttctctatgccaactccaccatgaactacaatctgctggtcaatgattactacagcaatgtaaactgcaggattctgaatgtccagagcgtgggccagtgccacgatggcaaactttaccccaataatgctgtcgttaaggcctccatgcaggactacgtatcaggattcagtcccaggaactgcaccttttttgcctgttcctccatctctgctccctttgtggaggccgactgtatcctgggactagagatgaggatcctggggttcatgaaaaatcgactgaaattcgatgtaaaccaaacctgcagcctggagtcacgtggtgaaatggatggcccagctaactggactggattactggggaaagtccagaacaacgagtgcgactttgtcttcggcggctattatccggacaacgaggtggcggaccatttttggggatccgatacctatctgcaggatgcgcacacgtggtacataaaaatggccgacagaagacccgcctggcaggcgttggtgggtattttcgaagcctacacctggattggattcatcctgattctaataatcagctggctgttctggttcaccctggttatgattcttccggagccgaagtattaccaacagttgagtcttacggccattaatgccctggccgtcaccatatcgatagccgtccaggaacgacccatttgcgagacgacgaggctgttcttcatggccctgactttgtatggcctgaacgtggtggctacatacacgtccaagatgatagccaccttccaggatcccggctaccttcaccagctggacgagctgacggaagtggtggccgcgggtattccgtttggcggccacgaggagagtcgcgactggttcgagaatgacgacgacatgtggatctttaacggatacaacatttcgccggagttcattccgcaatcgaagaacctggaggcggtgaagtggggccagcggtgcatcctgagcaaccggatgtacacgatgcagagtcccctggcggacgtcatatacgcctttcccaacaacgttttcagcagtccggtgcagatgatcatgaaggcgggattcccctttctcttcgagatgaacagcatcatccgcctcatgcgcgacgtgggcatttttcagaagatcgacgcggactttaggtacaacaacacgtacctcaacaggatcaacaagatgcgcccccagttcccggaaacggctatcgtcctgaccacggagcacctgaagggacccttcttcatcctggtggtgggcagctgctgggccgccctcacgttcattggcgagctaataatccacagatggcgaacccagctggtcagcacgagcgagcagcaggacaggaggagtgacaagaggaggaggaggaggaggaggaggaagccagaaaaggataaccgctggcagcgacaagttcaagtggctccagtcgttcgatttacgccagtcaaacgacgcaaagttttccagggacaaacaagtcaaaagtaa

SEQ ID NO: 31743 - protein, 716 aa, DROSOPHILA
MWCNNPGLIIIIFLGQILNLCQGIVNLSNETANTVIFMLPEKDLGPDVWKAGVGCLDSFAQIFFFRNPKERFTRAYNLMLVHAFHLSSPADQIQEGFSKLINEAVTNPGPPDREELFQMRVASDYNITNGTEDKGELILADNYVIVVDSVDRLKELMKKKIVEMRSWNPGARFLVLFHNATCRNRPLGVASNIFKDLMEMFYVHRVALLYANSTMNYNLLVNDYYSNVNCRILNVQSVGQCHDGKLYPNNAVVKASMQDYVSGFSPRNCTFFACSSISAPFVEADCILGLEMRILGFMKNRLKFDVNQTCSLESRGEMDGPANWTGLLGKVQNNECDFVFGGYYPDNEVADHFWGSDTYLQDAHTWYIKMADRRPAWQALVGIFEAYTWIGFILILIISWLFWFTLVMILPEPKYYQQLSLTAINALAVTISIAVQERPICETTRLFFMALTLYGLNVVATYTSKMIATFQDPGYLHQLDELTEVVAAGIPFGGHEESRDWFENDDDMWIFNGYNISPEFIPQSKNLEAVKWGQRCILSNRMYTMQSPLADVIYAFPNNVFSSPVQMIMKAGFPFLFEMNSIIRLMRDVGIFQKIDADFRYNNTYLNRINKMRPQFPETAIVLTTEHLKGPFFILVVGSCWAALTFIGELIIHRWRTQLVSTSEQQDRRSDKRRRRRRRRKPEKDNRWQRQVQVAPVVRFTPVKRRKVFQGQTSQK

SEQ ID NO: 31744 - DNA, 3239 bp, DROSOPHILA
aaaaggccgagacttaaatctgaaatctgctttcgggcattgtaacgtgctcttaactttcgaagcatttttggctcttgccccagttttcgatcaactttcagtgggttaattgaacaaagaacggtcctctttagaattggcgccttcatttgaatgccaaaacacgcttttaaataaatcagcgcattaattattctcgattgcataaatcgtttcgctgtcgatgctgcctgcccgcccaggaaactggctgccctcccacatcacccatccaattttccgatttggcgacccccttctgctgctgccaacacctccgcacatttttattagctacgcataattgctgcggcaataaagttgtttttccctttggtcccgctggccgaaaaacggacgagagtcgaaggacatggtcatggacatggatttggatgtcggatagacgtggttgtggggcagcctggaggcagtgcgcgtgacccgacaacataacgacatttaagtggccaccgcagcaggagcagcaacatcagtggcatcggtatcagtatcggtggcatcgggcggagtccttctgctccaggctgtgggcgtgtgggcgtggtctcggccatgtttggcaacatgttacaaaaaattgatgccattgctgtttttcccagctattgttgctgcagctgcacacagtatttattgttacaagctggggaaaaatgctgggagtcagtgaaatggtataaaatatttgcctaacttggcagaattcaccagttttttgtatcagttgtatggaagcactattggttttggggaatagaaatgcacaggttcttacatacagatttttctcaaatattaaatagatcggcggataatcacgtgtctcgtttcgaaaaattttgaaaaatatttataaaaaaaaagttttggtatttctagtgtcatttttcctttggctgaagttatactcagcatgatttacacatatatgcaactaattcttcagatccttcttgttctccgcctccaagtccccgataacctcgagtacatcatccaaggatggaggttccatcagaacacccaggtcgcccggcatatcgaagcccctcaaacgcatgcaaatagtctcgatggcctgccaatcttccacgtttcccggagtagcagatgggcctgggaattttcccaaggccctctcgcagacgtggttcaagtccaagttcctgccgctgctttcttcccagttaatgcaagtggagccccacaatggatcatttttggatctctcatcggtgcagatgctaagcggaaatttgtcgtcgttgcccatcaaggcatacaagtcccaaggcggagaattctttgtcagcggctgggaggtgcgcgatggagtcagcagctcgggcatcagactttcgacccccatcctattttccagatccgccatgaaagggaagtccgcgtctttgctcggcgaagctgtccatccggacggcagattcggaatcttcggaatctggcatggattacttttactggtcgacggctggcaatcccactgggagatgacatcattcagggtctgatggtaaacagaatcttccgaacctgctttgcagcgcttggaagtactcatcagcctcgtgtgcttagtcttgctatttagaccgcttagatgggccaccattcctgacctttgatcttctgcacgcgtgttcggtgcctttcctgtgactgtgtggctctttttcccagtgtcttctatttttaaatcgggataattgttgttgtctcttgaaatgttaacagaacttttcgaaggaactgtactgaacatctgagggctactacgattattccgagaaaaaccgccgatcggccaaggttttcgccagtcgggtccaagctcatccatcttgggcatcgtggaagttgcagccaggtggcgactcccttctttgcgatgctgcttgttttccttggctctcatattattccaagtgccatctggcctgcccttggtggagagtagcagagaaggcatctcacgcgaattcttagacgtggagctttccttcaaaactcggttttccatgggttttgcaccctgctgtggacgctccttcttcgccgagtgagaagtatggaacagggtctccacggtcatccgaggtccggatgatgctctcccgcgtgcgccttcagctgcggtgctcctgccgggcatcatggggtttatttcgacgaattcgctcctgggcagggacaccgagcgctggttgcggttccagcagcgctttgactgcgaaatacaaggaaatattttaggtgtgaaattatttgacgtatgtggacttttaccatcgcgttttatcgaaatcaattctctgaactgaaaagttcggaaagaagaaaacacgtgcgtcaagcacgagtggaagaacctgggctaagatggcggcaatcgcgaggcagagttgccatggttccataggattttaaactgattctataaaagccacactgttaaggccacactgcttttggcaattaaatgaaacactaacaacgatgaacattctcattttgcatttcaaaatagtatcaaggtactgccaactgactgcgaaaagcttttatcggtggcgctcccaaataacagttccaattttcgtttaaatccagtgctgcaaaatctgcaagtttcggtactagaaattcaaatttaaaagttactttcataatacatgttctaatcccaactgattatatctcctcagcccgatgaactcgacccactgccacagattggaggcaatgcctcaacatgtggccatttaacccagaggcgcatttcctatagccataaattgaagtagtcaggaaccttccgccaatcgtcagttgtcttccggctttagcccaccagatcccgattccgatccgatgtcactttcagtggctgtcaattgcgttggcgccattgtttcggccagcgtgtaaagcgcggagggaaattgttatttaattactcaagcaaaagcatgacaagtggaaatgtcgcctgggcgaggtcctggtcctggtcccggcatccggcatccagagtcaggcccagcaggcctgtcagcttgtcaggagcaggcgccctggaaagccgaagccaccgtcgcattggtcactctgccgctcttcactgctgctgctgctcgcttttgtttaaatttaaa

SEQ ID NO: 31745 - DNA, 1239 bp, DROSOPHILA
atgatgcccggcaggagcaccgcagctgaaggcgcacgcgggagagcatcatccggacctcggatgaccgtggagaccctgttccatacttctcactcggcgaagaaggagcgtccacagcagggtgcaaaacccatggaaaaccgagttttgaaggaaagctccacgtctaagaattcgcgtgagatgccttctctgctactctccaccaagggcaggccagatggcacttggaataatatgagagccaaggaaaacaagcagcatcgcaaagaagggagtcgccacctggctgcaacttccacgatgcccaagatggatgagcttggacccgactggcgaaaaccttggccgatcggcggtttttctcggaataatcgtagtagccctcagatgttcagtacagttccttcgaaaagttctgttaacatttcaagagacaacaacaattatcccgatttaaaaatagaagacactgggaaaaagagccacacagtcacaggaaaggcaccgaacacgcgtgcagaagatcaaaggtcaggaatggtggcccatctaagcggtctaaatagcaagactaagcacacgaggctgatgagtacttccaagcgctgcaaagcaggttcggaagattctgtttaccatcagaccctgaatgatgtcatctcccagtgggattgccagccgtcgaccagtaaaagtaatccatgccagattccgaagattccgaatctgccgtccggatggacagcttcgccgagcaaagacgcggacttccctttcatggcggatctggaaaataggatgggggtcgaaagtctgatgcccgagctgctgactccatcgcgcacctcccagccgctgacaaagaattctccgccttgggacttgtatgccttgatgggcaacgacgacaaatttccgcttagcatctgcaccgatgagagatccaaaaatgatccattgtggggctccacttgcattaactgggaagaaagcagcggcaggaacttggacttgaaccacgtctgcgagagggccttgggaaaattcccaggcccatctgctactccgggaaacgtggaagattggcaggccatcgagactatttgcatgcgtttgaggggcttcgatatgccgggcgacctgggtgttctgatggaacctccatccttggatgatgtactcgaggttatcggggacttggaggcggagaacaagaaggatctgaagaattag

SEQ ID NO: 31746 - protein, 412 aa, DROSOPHILA
MMPGRSTAAEGARGRASSGPRMTVETLFHTSHSAKKERPQQGAKPMENRVLKESSTSKNSREMPSLLLSTKGRPDGTWNNMRAKENKQHRKEGSRHLAATSTMPKMDELGPDWRKPWPIGGFSRNNRSSPQMFSTVPSKSSVNISRDNNNYPDLKIEDTGKKSHTVTGKAPNTRAEDQRSGMVAHLSGLNSKTKHTRLMSTSKRCKAGSEDSVYHQTLNDVISQWDCQPSTSKSNPCQIPKIPNLPSGWTASPSKDADFPFMADLENRMGVESLMPELLTPSRTSQPLTKNSPPWDLYALMGNDDKFPLSICTDERSKNDPLWGSTCINWEESSGRNLDLNHVCERALGKFPGPSATPGNVEDWQAIETICMRLRGFDMPGDLGVLMEPPSLDDVLEVIGDLEAENKKDLKN

SEQ ID NO: 31747 - DNA, 2484 bp, DROSOPHILA
cttacgataataactgggaaacgagcactaattgtatactcaccgtgtcttattgtcttagcttaaataaataacactaatttctaaccactctccttacataggctccaaaataattcaaattttttctaaaatatccacttcaagcatttccactgtgcgatggttaagtgtggacaacggacgacctgggcggtggattggcacgcgccgcggtttccgtgggcttcggtttcggtcttggtcttcaacgttgacttggtcttcagccggaagccgttagttgtttgggccatgtgggcttttatggccgagtgttgacggcggagacagaaatcaaagactacagccatcccactcgctgtggcccggtcaaagttgagtgggtcactaaactcggatatcgacggtgtttgcgaatggaaccgcaattagcgttgattatggccagcagagttgattgacattttgtgggcaagtcccggtcccggtcatgtgtgtgtttgtctgtccacccgtgcttgtcccggctagccgcttcattattaaccgcacccacgcaaactcatgtgaatattgatcctggtcgcggcacgggtccgctccgctgtcctgccataccgacgattattaataatggtcacgcgcgcggaaaactttgcattgcaatttctcggtagtcagttgccatcgcgttgtccctacaaacggctgtgtcctggaggactagcatacctgcggaaaatccaatcctgcgaaaatcaatactaatgagccattaaacgtggcctccgctgcagtcggccgtagtctaatgagctgagcggcggcggaaattgaatgttggctctaaccaagcggctgcagaaggaaatcacatcggcatcgctcttagccatctctccgccgaacggaaacggtaaaggcgaaagtatcggtagcaggagcactaaaacggaagtcttaggcgtaatgccttgcgcctgagtggatgcgtagcatgggctgctccagttccaagacctccgccaccgtagaagacaccaaatcatcgaagccctgctcctgctcagccaagtccagtacaacgagaatggccgccaagaaggagtaccgtaggttgagatataaaacccattaatgggaatcttatcaggcacctcgtttcagctgcctcggaggccttcaccattcctttggagagcgatgacggtccggagatgccgctaaacgagacggttcgccagccaccgaagaggattcagcaactgatgcaggaggcggccagctcggagccactcaccttggaggagctggaggagaagcagctaaaggccgagcagaggcgccaggagctcatgcagcagaaactggagatcatacaaaagaatgcccagatgctcatgaagcctcatgaggaaaccgttggcgaaggcgaaggagaccggaacgaaggcaaggaggaactacccgaaaaggtctagctatgtacttctttttcattcacatttttattgttagctttaaattatatatgtattactatatatcgtagtatatttccaaacaattagattgtatgcaattaaatctgctctcatcgtcaaaatgctgtccatctgttcttggttgcaatcctatatgtcgaacctttctcttggtagtcaaaacgtgatctatttgtaatcgagtgttaaatatgtacgtctaaaggctaaatgtaggtatttcggattggtttgctcgactcgcgttgactggggtcggatatatattgtttgcagtactatatgcttcattaggatgtgtgtgcgtggttgtaaatcatgtcttttgggttggttggtttggttggttgtttacgcttgttcttgttcttgttgctcggtatcgttacttcatatttaacgttcatatttatatatatgtacttgtatatatcgtatcgtatcgttaggtataaatatgcgtactgtgtcacagacactacaaatgtcgctttgatttcggcttgattcgcaccaggccccgcgtcactcggattaactggggccaacaatttgttaatatttcaattagttacctacacactcattaaaaatgttcgctccccgatcgcatcgaatatatcgtagtacctggatgtcgtttgcttacactgtatgtattttactctctcatatgccttgaatgtgaatatgcttgcggttcactattagttagttactggaattggtgcacttcgaagaagcaattggttaatagctatgagttgtggtacgattcgggatgctgcccaaagagatggtccgccagtcaacggattggccactttcagcacaacctattgttagggttactaatactatccgtctagtgtccgggtccgcacgcgcactcccacgcttatgatccttgatccttgattcccgccccacgtccgtgtctgtggcctgatccttctcaactgggccatctcttcga

SEQ ID NO: 31748 - DNA, 429 bp, DROSOPHILA
atgggctgctccagttccaagacctccgccaccgtagaagacaccaaatcatcgaagccctgctcctgctcagccaagtccagtacaacgagaatggccgccaagaaggagtaccctgcctcggaggccttcaccattcctttggagagcgatgacggtccggagatgccgctaaacgagacggttcgccagccaccgaagaggattcagcaactgatgcaggaggcggccagctcggagccactcaccttggaggagctggaggagaagcagctaaaggccgagcagaggcgccaggagctcatgcagcagaaactggagatcatacaaaagaatgcccagatgctcatgaagcctcatgaggaaaccgttggcgaaggcgaaggagaccggaacgaaggcaaggaggaactacccgaaaaggtctag

SEQ ID NO: 31749 - protein, 142 aa, DROSOPHILA
MGCSSSKTSATVEDTKSSKPCSCSAKSSTTRMAAKKEYPASEAFTIPLESDDGPEMPLNETVRQPPKRIQQLMQEAASSEPLTLEELEEKQLKAEQRRQELMQQKLEIIQKNAQMLMKPHEETVGEGEGDRNEGKEELPEKV

SEQ ID NO: 31750 - DNA, 8599 bp, DROSOPHILA
aggacacattggcgtacttagtctagaccactgggtgagcttaatgttttgccgttcggttatatatcatgcggtgatttgtggacttagcataaaacctaactgaacggcccggcgacatcccgactctctggcgactttggacgggccacgataaatcaaggcgcagatccgggagcccggcatatagtggatatagtatgcgtggcgaaacttaataagagatgcgacaacaaacaaatgatacagatagacagacggcaggcgacagtcgcggtggtgcgagaggtgggtaggtgggtaggtgggaaatgggattgtggaaagcggaaaaatctttaaagcaatgccgctgcacaggacatttttcaccgcgccatccattcgcagacggatcgccaaagagagacatcaacgtgactcgcggggagaacaagtgttttgatttatcgccagcaatggcaatggcagggcggacggggattgccatccaattatactgctaactttcattatgtcactgtgctatttcgggaccggattcgccgccatattggcccattgttgcgccattgtctatgcacagctctctgtttagcagtgacacactgcggtttcggtggcaggactcatctccatcctgccgcctgccttagtcgtcccttgccgcttcctcggtggactccgtctgataaatcgtcagcgcggcttccctttcacatgctttgacttcattatggcgtaacaaatcgtcggcattttgcattcctcgctgcggaaacggaagcggaagacatccccgaaagaaactgcgaactgggcctttgtggccacacgacgaattggtcacgcgccatatagacaattccatctcagttttccacatgttttgattgctcaacgttgtcaagggactttgtgctgctgtacttttttcgcttacactttaatagcttccgaagagactcatatccttcatatcctttcttgcagctctgccatggatctaaagactggctctctcctggtagcacccgccgtgaagaactccagctgctcgcatccgcgctactccggccacaatttcatcgcccacatagggattgcggagaccatcgaggcggtgctcatcctggtcctcacactgggcgtcatcggggccaactgcctggtcatcttcgtcatcaacaaccgccgctatgcggcctacatacaccaacaggtgggaggctgagtcactggcttaacaccttgtacatcttatgtctctccttgtagccccgttatctgctcacctcgctggccctgaatgacctgacaattggtctgctaattacaccattcggtctaatgccggcattgttccactgctggccatacggagagatcttctgtcagatacaggtgagcgggtcaagagtgggtcaacaccaggtcaacaagtggggcggaagtgcgataatttgttatggaacacccgtctcccgtttgcggctgttgccactgcggtcaattaactctctcttaacaatgcacagtaattactggacataaatggcggtgatggaaacggacaatcccgattaacgggcggaacaatgtgtaatgctagtattaacgtggtcgagagtgtgtaggattctgcggtaagagtcagggttccgatgcagaaggtgtgacaagcggaaagttatcccagccatatggttaggaagctagtgcacatggaaaaaccattgtgccattaattatcatgacggtggacagggggcatcgtggttagggtgtgcaacagaaactgttagtttatcacttatcaagtgtcaaaaagcatgcaacgaaatcacctagaatccatcacaacaattgttgcatacatgcttaaaaaggttgggtttttatgaaaatcagagttgtaaacattgtaataaaatccagttaacactcatacaactattttcatgggaaccagactcttgttatatattttatacgatgtcgtttcacaaaatttgaattttccaactgccactttagggttattggtaaaacatgcacgcattccacgcataactctcacaaatattgaaacacatactgacgattaataattttattaaaagtttttcgattcgcctcgacaagcgaaaaagtttgccgaaagcaataatacaaataataaacttctaaacgagcactaacgcattttctggctttttcgcgttttccaggccctgctccgaggggcgctttcccagcagagcgccgtcatcctggtttgcatggcagtcgatagatacatgtgtgccctgcatccgcgccgctactaccagcactccagcaagaaggtaagattccacgtcctatcgcctcgcatcgatagggaacttctattttgggttgcccggataaggcacgctcctcggcgatccttatcctgttgttcttgcactcgcgctcgcgctcggaaggacaataaacaaagctccggcataatgacgagaaatcacgcgccaataaaatcgactataacaatgggaagagcaccgcacagcaactacacaatatggtcggcgagccaattacgcaagcataaataaggataatgggctttaagcagcttgacagtcattaaacaggcaaaaaatgggtgggcagcgccaaagagcaagtgcaaaacaaagcatcatggagaatgaaaaagcaaagttggcaaaaaccaacaaaaccgaaaaaaaaaacaacgggggccaagtcgaatagacattcgaaaagtgtataaaatgtggataaaaaaaagggagcaaagttggcctagagattttttacgcgcaatgacttcggcacagggcgacgaccacagcaaagtccttttccaggacgcaggcaggcaaatgaagcggcacctcccacggaaaccgcagccaggaccaaagagcagcaaacgagctctcaaccaaccctatttcccattccccccttcgtaatttatggctcccggactgtaaacaaacgaaaactaggaggccaacagtcggctaagaacaccgaagtccgaatgtccttgtcccaaatgaacgggactgtttcagctgaaattggcgatcaataaatgtatagtttagaatccatttcccgcaaaattcaagctaacaaacagattttagcttacatatatgattatttaacctttttgatttacagtcttaatttctcgctgtttgcttggggattttgcaaacagttgtaattactaaactaactaaaaaaggaaaatgccatcaggccaaataaaacaattggaaaacgggaaagtaccaatagtggaaaataaatttacataacaattttgtatgctccgaaaatcggcgccatttcggttttttcatgccatctggacgagtgggcgaaattggcgcactgccacgccccatttgtaaaaatgatgggcgcagtgtcgaaaattaataaatggatgctgaatgcgaaatactggggatgctgaaaaaccaatgctcggcggaactcggtaatggtaattgggaacttttgactttcgtttttgcttactttcaaaagtgccataaattcaaagccagtcttggacatatctctttatttatagtgaatttaacagcttgactcaaaactcgtcttgttgttcgccactcacaatttgtattaaatgcacttgaaaattcaattattttgttatctaggatatttgctgactatccttacaacttcagcagtcgccgggttgtgctctacgaaaaactcctgcaatcctgcaaaaaaaaaaaataatatttacatttcaaaaattgtacccaactgtttgagatcgccctgctttgtttgtttcgttcgggaaaagttttaaatgtgatagcgtaaattaaattaatcacagccatggtccgtttcaaagagacacggacaaaagttgagcttcccttttttccatgactttttggcacttgggatggggccattttcattttttcaggtggacaggtggacaacattttcccattcaggatgtcagaatgctgcatttagtaactcagccagtcagtgcgattgtggcagcacttttccacttccaaagagcggaagtatcgctttccctctgtggtctgcaccctttaccaagtgattttggcataatcaaaagtttgtaattctatttttggcctcttggactcccttgttgaatgtcagacgaaatgtgcagtgaagcgagtggaattttagcaaattagaaagttgaagagggaatttccgacttatctgcacgccttagtgtgatataagccacttccggctaaataaacacttaatatgaattacccaaccttcattcattttcaattcagtattggccatattggcctgaaatgcagggaatacgtgcctgaagcccttcgccagtcataaatcagaccgcacctggcggaaatgtgctccactaattgtgtattcattttgcagggctgcgtggccatactgagcttaacctggattatcagcctgacggtgtttggctttctggtgctgcccaaaggtgagctgcccgagattggcccgacatcaatgtgctctcgaacacgtcaaaccataaactatatgcgcaggttactacttcaacaatacgggtctaatggcctgcgagcccttctacagcaagccatcctacaggatactgtccacgtgcgccctctactttcccacgacgatggtgctgatgtactgctacggctccagcttccacatgagccgcttccggctaaacgatccgaccatgcccctcacggcggccgcccaccacccccatccgcacccacatcccaccgccgcccagcagctgcagatgcaccagcaccagcaacatcaccagcaggcgggaatgcactcgcacctctaccacggccactcgcatcaccccagccaccccagtcacccaaaccaccccaaccaccacggccacccccaccatcatggaccgcccgttatgggccatctcagcatggccatgagcatgggactggccggcatgccgaacatgacaaacaagattaccaaaaaggtgagccagctgaaccgggtgaactgaggaagccaggtggcctgctggccaaaaggatgaagatggatgaaggaggatgaaagaggatgaagtgggcgggctccacaacagtttgctcaggcgggcgatttggggattaagttagcagtaaatagaattttctcggcatcgccaaacaaattgttgggtctatcagtatgcactcgcagaacttaaagaagtgttaacagcttttagtatttgtgaacgggctattcaatattggtaccagctaattcaattaaattccagaactcaggtaaactaaactaaaactcacttaaaaaagaactcgagttgtgcaagttactttacttactttccgtgcataaaaatatttccagaagccaatattacattttagcaaaatagaaagcagcagaagttgcatttgaaaatatatagaatactcaactatattgctaataaacaggaatagaaatttcgtttgggcagtatctacacataattgaatcaacaatagtcactttaattcaatcgccgcaaacattcccacagattgttcccatccaagagaagaactccagcggatccacctcgcgctcgatggccgccatttcactgggcttcatagtgatggtcactccgtggacgattcaggaaatagtcaccgcctgcacgggatccaaggcaagtgtcctgtacaaaggattattgtgtgaccgctttgtgctccgtacaacgcggcgcatacataatgaggtcacgcgtggctcatcagttttgattttgtgacatttaatgttctatgtccgtccacagctgccgccgttcctcgatttcctggtcacctggacggcgctgagcaatagtctgtggaacccgttcatgtactggctgctgaactccgatttccgccgcatgagtcgccagctgatgccgaacaaagtgagtatcgggtatccaacagtgggaagatgaatctcctcttctggcgctaatttactgcatctctgatctggagcgatgttcactgtccgtttcagcagcaaatctgccataagccctgattgattgattcgcttatccctattccaaacaccacgtgcacactttcattgacctccccgaacgccaatccccaagcccaaatatgggtatttcgcccaagtgcatcctgcagctcgcaaattttcctcctgcacagcgcaaagtttgcaaaaacaggagctacatcctcccgaaagcccccataaatccgtaaccgaaggtgtaagctccagaatgctggcagactgacccgggcaaagtaaacaatcaaccgacgcagcaacaacaatagcaggtcctgcaaagtgattttgaattatgaaagagcaaatctaagacggcatttacatcctcgtagccccacaaaccccatcccataggtcctgattccattttggtaaacgcagtcaagttgcatgatttacttccggagagccggggtcagtctgtggaatatttatggcccaaccttgtgctctgccagaataaatgcgcatttaaaatccttattaatttttgtgcgagtcggaatttatgatgcctccctgccgtttcagtgcttcccccacgaggatacgcccgagcacaaatcaggctgttgtcacatcaatgctaacgatttcgaaatcacaacgcttccgattcccccggagccgccatcatcccgtcctccgggcggagcaggaggaggaggtggaggtccatccagtggaggtcccagctctggcggcggagtggccagttccattggcggctccgtccttggaatctgcggccgctcgcgcacaaacagcctcagccgcagcgcctcccagtacatccgagggacaatgggcggaggagtccacaatcaccaggccacggaaaccttctccaccacgaggcctgacattgagggcctctccgagaagtactggggcgagatcctggagagaaccgtcagctcgggcaacctgaatgccatgcagaagcacctgccgccccacctgccctacgcccaccacctggtccaccagatccaccagccgcagcagcaccaccaacagcagaccacctccttcagcaaggccagcgatctgcagctgaacctgaacctcagccaagcagccacggctgccgagctgggcaagttctccaactcggagccgaagctgtgcgagcacctctttcacgacgtaaactgcgccaagagcaaggccgccaacggggatggggagtcctccggcaagctggcctgcggtcgcagcattccggacatctagtacgccgaggacgtgatcctggccaagaaccaactgctggccaggcaggccaagtgctcgcaccatccgctgcaccagcaggccaagacgcgtctccattcccacacgggcagcctgcgcttcagccggattcgcgctgcctgccacagtccgccgccggagaagtccgcctttccaatggccgagtatcgcaagtaggatcacagagggcactgggatcaaggatgccgggatacggtactccaggatgtccaggatatggtataaccatgcacagaatagggagtgagagcgagcgagtatctataagattccataggtgtatgtgcgtgtgagtgtctatataataccgcatgatcaaaccataatatgtgtgttttctattaggcttaagatctaggaggtcctttggttgggttttcaatttaaagtctctgagattcgcaaaatacccatggcctgtagaaagcgccctgaagcctaactaaaagaatatgaaagatagcacctatcctcagatattccactctttatataaagtaatctgtgttggttataacctgaatgattgctgtccatctgagaactttcaataccattagctagactttctttactatacatggatctggggaatcggaattagccgagttaagcagaagttaaccatagtaagtgttcattcaatgtttgtgataccctaagtttcccagcccaacatacatacctaccagtaacatataatataatcctagttgttgtgcgtgcgtcggctaaattaaacgtaggatatatggaaacagagatatcagactttcctatcagaacccgctcgacattcggaagcccttcgccaaattctccaccacttagggactaaggatctacgtagactctgatatcggcggaccttaaagcgttgtggttaatcatagttgtagttccatagctcgagtcgtatacaccaaattactcactgttcgacgaatcaaaatcaaatcctaactttgtgattgtcaagaatttaagtcggttgatgtggacattgctgttaaattaatttttatttgtagctaagtaattgactagttaaagccaaataaatttaccgtttaagtaagtctaactttagttaaataaacgagcggtgtgtaacaaatgtatttcataggcagaggattcaaatcgaaataaataa

SEQ ID NO: 31751 - DNA, 2121 bp, DROSOPHILA
atggatctaaagactggctctctcctggtagcacccgccgtgaagaactccagctgctcgcatccgcgctactccggccacaatttcatcgcccacatagggattgcggagaccatcgaggcggtgctcatcctggtcctcacactgggcgtcatcggggccaactgcctggtcatcttcgtcatcaacaaccgccgctatgcggcctacatacaccaacagccccgttatctgctcacctcgctggccctgaatgacctgacaattggtctgctaattacaccattcggtctaatgccggcattgttccactgctggccatacggagagatcttctgtcagatacaggccctgctccgaggggcgctttcccagcagagcgccgtcatcctggtttgcatggcagtcgatagatacatgtgtgccctgcatccgcgccgctactaccagcactccagcaagaagggctgcgtggccatactgagcttaacctggattatcagcctgacggtgtttggctttctggtgctgcccaaaggttactacttcaacaatacgggtctaatggcctgcgagcccttctacagcaagccatcctacaggatactgtccacgtgcgccctctactttcccacgacgatggtgctgatgtactgctacggctccagcttccacatgagccgcttccggctaaacgatccgaccatgcccctcacggcggccgcccaccacccccatccgcacccacatcccaccgccgcccagcagctgcagatgcaccagcaccagcaacatcaccagcaggcgggaatgcactcgcacctctaccacggccactcgcatcaccccagccaccccagtcacccaaaccaccccaaccaccacggccacccccaccatcatggaccgcccgttatgggccatctcagcatggccatgagcatgggactggccggcatgccgaacatgacaaacaagattaccaaaaaggtgagccagctgaaccggattgttcccatccaagagaagaactccagcggatccacctcgcgctcgatggccgccatttcactgggcttcatagtgatggtcactccgtggacgattcaggaaatagtcaccgcctgcacgggatccaaggcaagtgtcctgtacaaaggattattgtgtgaccgctttctgccgccgttcctcgatttcctggtcacctggacggcgctgagcaatagtctgtggaacccgttcatgtactggctgctgaactccgatttccgccgcatgagtcgccagctgatgccgaacaaatgcttcccccacgaggatacgcccgagcacaaatcaggctgttgtcacatcaatgctaacgatttcgaaatcacaacgcttccgattcccccggagccgccatcatcccgtcctccgggcggagcaggaggaggaggtggaggtccatccagtggaggtcccagctctggcggcggagtggccagttccattggcggctccgtccttggaatctgcggccgctcgcgcacaaacagcctcagccgcagcgcctcccagtacatccgagggacaatgggcggaggagtccacaatcaccaggccacggaaaccttctccaccacgaggcctgacattgagggcctctccgagaagtactggggcgagatcctggagagaaccgtcagctcgggcaacctgaatgccatgcagaagcacctgccgccccacctgccctacgcccaccacctggtccaccagatccaccagccgcagcagcaccaccaacagcagaccacctccttcagcaaggccagcgatctgcagctgaacctgaacctcagccaagcagccacggctgccgagctgggcaagttctccaactcggagccgaagctgtgcgagcacctctttcacgactacgccgaggacgtgatcctggccaagaaccaactgctggccaggcaggccaagtgctcgcaccatccgctgcaccagcaggccaagacgcgtctccattcccacacgggcagcctgcgcttcagccggattcgcgctgcctgccacagtccgccgccggagaagtccgcctttccaatggccgagtatcgcaagtag

SEQ ID NO: 31752 - protein, 706 aa, DROSOPHILA
MDLKTGSLLVAPAVKNSSCSHPRYSGHNFIAHIGIAETIEAVLILVLTLGVIGANCLVIFVINNRRYAAYIHQQPRYLLTSLALNDLTIGLLITPFGLMPALFHCWPYGEIFCQIQALLRGALSQQSAVILVCMAVDRYMCALHPRRYYQHSSKKGCVAILSLTWIISLTVFGFLVLPKGYYFNNTGLMACEPFYSKPSYRILSTCALYFPTTMVLMYCYGSSFHMSRFRLNDPTMPLTAAAHHPHPHPHPTAAQQLQMHQHQQHHQQAGMHSHLYHGHSHHPSHPSHPNHPNHHGHPHHHGPPVMGHLSMAMSMGLAGMPNMTNKITKKVSQLNRIVPIQEKNSSGSTSRSMAAISLGFIVMVTPWTIQEIVTACTGSKASVLYKGLLCDRFLPPFLDFLVTWTALSNSLWNPFMYWLLNSDFRRMSRQLMPNKCFPHEDTPEHKSGCCHINANDFEITTLPIPPEPPSSRPPGGAGGGGGGPSSGGPSSGGGVASSIGGSVLGICGRSRTNSLSRSASQYIRGTMGGGVHNHQATETFSTTRPDIEGLSEKYWGEILERTVSSGNLNAMQKHLPPHLPYAHHLVHQIHQPQQHHQQQTTSFSKASDLQLNLNLSQAATAAELGKFSNSEPKLCEHLFHDYAEDVILAKNQLLARQAKCSHHPLHQQAKTRLHSHTGSLRFSRIRAACHSPPPEKSAFPMAEYRK

SEQ ID NO: 31753 - DNA, 4290 bp, DROSOPHILA
caggcgtcgaaggtgtagtcgaacaaaaaaggcttatacccattggcctttttcatcgtcttaaagtgaactgatatatttctggccggctccacgaacgtgacatttatattcaagctggtcttggctcgagaataggccttcaggcggcagtagtgaacaaccacccacgatttgttatacgatttgcacactgcatttgtcattttgagatagggcgcctcctgatggaatgtgtagctttaattgaaatgtaattaggtcctacaatccgatttcttactccgcagcttagataggccactaatagcgaaacggcgaaaatgaaaaccttgtgatccatggctcttggtcggtcgaccacccgtggataactgacgtaacctggctctttagcttgaatatgtgttctatttttgatcaaattgaattgatggttaagtggagaatgcgtttattacattatcattaaatatcgatttaaaacggttaataaatgtttcaataacaccaaatgcaaccagccaatacacttttagaggctggtactgatcgaaaactcgaaaccacttgacactcgaagtaagttaatattcctctaaataggtgaaatacaaattcgtagcaaactgcggccttaaatcgaatagccggaagtggaacatgaacttcaatgttatgaacgtcgcttaccacctgcaagccctaaaatatcgaaaaatattccgacaaactggataaagtgaccttcaattttcacttgaatcatccatctattctaatttgaacttggccattatttattctttgcgcgtaacccatgcagaaaataacaaaagtacctaggtaaatcgatatggaagcacagtagtccaggtgttgacatatattttgtttataagcgaagctttcctgttttctgaggagatcatacatacaacacccttgccgaatcaacaacattacgaactgatcctatattcatgttgccatagccaaaatgaatgtgtgcaagcccaaggaagtgggtcccgatggactttttgtccggaagcgctttacgcggcatccggtggtgatctcggccaagcggtttgcagccataaagggacgttctcgccaggatgagaagcatgcccaaatggaggccgtcgaggaggaacgcaggtatcggcagtacctgaaggacggcaacgagcttctttgcagcctgttcacagatcccaatgctccgaaggtcaagaaatcagctagggcgcagagcaaggaagccatggcagtggtaaaggatgtggacacaaagttggcggacgagcggctgcgcaagcaaaggatcttgcgagccaatcgtctactggatcaactgaagcccggaccccgcgctctgcaccaggcgctcatttacagcgaaatgattcatcagaggaagtacaatgaggcccttaacgaggagatagcggaggcagcccgtgcccaggaaagggccgatgaggagatgtgtcctgcggccctggtgcccttcggccacgccaccgaggaggaggaggtggccaggcagaccgcgaagaatatggaacatgccgagctcatgcgggcggacatcgcgcagcgggcaaggatcagggaggccgagcgggagcaacgggtcttcgaggagcaggtggatcgggctcagtacaagtgtctgcaggacaaggaggagaaggcgctcaaagagaagaaggcccggaaaatcgccttcaatcgaaaggcctacaaggaggccctccaagagaaggcggagattgcagaacgtaagtactatttagcagaactggatatattcatattattcctcatccccagacgagcggatttgcgacgccattgacgaccggcgcaactgtgtttacatcgtggctagtcgcaatctggacagtcgctatggaagccacgtgaagcagctgcggcagaagcgtcaggaggagagggagctacaggcactccgtgtctcccaggcgcagcaagtgcttcaaaagaagctggaagagcgccagattgacgcggaggaccgccatgcctttgagacgcaggtggacgacagccggcgtcagtgcgaaagggagatgctggccaaggagcgccgtgcgtatcagaaattggagcggaagcaggacgccgagaagctccgccgccagcaggagctgcagcgcttccatgtggcgcgccgccttaagaacgccgaggcgaatcgcttcttcgatgcctctcagaagcgaaagagggacaaggtaaaggaggagctgcgcaacgttctctttggccagcgggaagagttcctcgagaagcggcgcgccgagctaatgaacctggccgcctgcaatgaggatccatacctggaggatgacaagaagttctttgagcaggcggtcgagatcatggaggagtcgagaaaggtggggcgacctctctatcccattgccaccgccgtagatcgctacgagcggcagaaccagctggacatgcgaccagagggcaggatggtgaagagaagcagtctaagggactactgctggccaggattcttttccaaggcggaactggcgtaccgcaagtacgagcagcgggagaagtgccgcgaggagcaggtggccgatcgccaccagatttactgcaactcggtgaagatcaagaagctggccgaggtggagaagccatacattccctgtgtcgcctcctgtcccatcaattgctttcaccgaaggggaatgcccgacacggacagcaaagagtcctttgactatggccgtcatgtttgctatacggatactcctacggtcgccgcttgtcccggtcccatgcaggtgatccacaatgacccgctggataaccagaggaaaatcagccagctttccatgaagctgccgcccatgccggacttgaccaaaagtgtacagcccaatttccgaagtgttgtgggcaaggctttgactaccctcaacaaaccagacttggctcccaattccagggaatcaggttccagcctgaaaggtcctcctccgcttactagtccacccatcagcacatccaagcccactgcaccggaaccaaaacttgccgaggccaaagatgtgccccttcccaaatcccagcctccagtgagaagtaagatgaagaggaactccaaaagagctggttccgcggtggcaactcctccaactggtaacgataggccagcacccgtgcccaatcccactggaacctggggatccggatccctacagccagattcaaagaaaaaagccaagtaaccaggaatcatcgcatccactttaacaaaatttacgtttctcggtcttattgtattaatgttttccgttggcaaagataaatatagaaaaaaggatgctcggccatcatcgaatggagccagacagctgaggaaatgacgttaatggttttttaaaagcacttaaacttggcgcaaaaggacttctcttcccctttgccagttttccatttcctctgccattttctcggcgaagtcggaggattggtgagtaaccctttccagcgacacttacgcgctttgtttagcgcagaatctccggcgtagagtggccggcttcataaattcccattaatgcgtggccaaagttattgggttacgacctccaccccaggacctcaaagacctcctgcttcatcttcatcaacttgcggcactgagtgacatccatttttgttttcatttagcttattaccgggcagacatgtccggcgttccgcccgtaacttaatttgagctgctaaccaggctgatgaacccagcgtcctccggcggagtgaagtggactgagtgttccggccggccaatctcgccgggataattacggccgtgtcctttctggagcaggccatccgtcccaatgggttaatcagccggctcctaggactttgcagctgtctttcggggcttggtcaaccgctcggctccaaattaacggaaccgccgtcttactctcctttggcaagtttgcaaaagttgccgccttccaaagttaaccaatttagtgccattaaccataaattgctgaaccgcttagcccgaacggggttaatagaggagagtcttaaaattacgtcaactatgcgaagtatggaccgattgtcagccaaagagataatgaaacatttgaagtcccaatttggttgcatgcaacaatggatatagtctagggaataaagagtcgaggggggaaagttaatgacctgagttcttaaactatatgtatatctacagcagagcaa

SEQ ID NO: 31754 - DNA, 2238 bp, DROSOPHILA
atgaatgtgtgcaagcccaaggaagtgggtcccgatggactttttgtccggaagcgctttacgcggcatccggtggtgatctcggccaagcggtttgcagccataaagggacgttctcgccaggatgagaagcatgcccaaatggaggccgtcgaggaggaacgcaggtatcggcagtacctgaaggacggcaacgagcttctttgcagcctgttcacagatcccaatgctccgaaggtcaagaaatcagctagggcgcagagcaaggaagccatggcagtggtaaaggatgtggacacaaagttggcggacgagcggctgcgcaagcaaaggatcttgcgagccaatcgtctactggatcaactgaagcccggaccccgcgctctgcaccaggcgctcatttacagcgaaatgattcatcagaggaagtacaatgaggcccttaacgaggagatagcggaggcagcccgtgcccaggaaagggccgatgaggagatgtgtcctgcggccctggtgcccttcggccacgccaccgaggaggaggaggtggccaggcagaccgcgaagaatatggaacatgccgagctcatgcgggcggacatcgcgcagcgggcaaggatcagggaggccgagcgggagcaacgggtcttcgaggagcaggtggatcgggctcagtacaagtgtctgcaggacaaggaggagaaggcgctcaaagagaagaaggcccggaaaatcgccttcaatcgaaaggcctacaaggaggccctccaagagaaggcggagattgcagaacacgagcggatttgcgacgccattgacgaccggcgcaactgtgtttacatcgtggctagtcgcaatctggacagtcgctatggaagccacgtgaagcagctgcggcagaagcgtcaggaggagagggagctacaggcactccgtgtctcccaggcgcagcaagtgcttcaaaagaagctggaagagcgccagattgacgcggaggaccgccatgcctttgagacgcaggtggacgacagccggcgtcagtgcgaaagggagatgctggccaaggagcgccgtgcgtatcagaaattggagcggaagcaggacgccgagaagctccgccgccagcaggagctgcagcgcttccatgtggcgcgccgccttaagaacgccgaggcgaatcgcttcttcgatgcctctcagaagcgaaagagggacaaggtaaaggaggagctgcgcaacgttctctttggccagcgggaagagttcctcgagaagcggcgcgccgagctaatgaacctggccgcctgcaatgaggatccatacctggaggatgacaagaagttctttgagcaggcggtcgagatcatggaggagtcgagaaaggtggggcgacctctctatcccattgccaccgccgtagatcgctacgagcggcagaaccagctggacatgcgaccagagggcaggatggtgaagagaagcagtctaagggactactgctggccaggattcttttccaaggcggaactggcgtaccgcaagtacgagcagcgggagaagtgccgcgaggagcaggtggccgatcgccaccagatttactgcaactcggtgaagatcaagaagctggccgaggtggagaagccatacattccctgtgtcgcctcctgtcccatcaattgctttcaccgaaggggaatgcccgacacggacagcaaagagtcctttgactatggccgtcatgtttgctatacggatactcctacggtcgccgcttgtcccggtcccatgcaggtgatccacaatgacccgctggataaccagaggaaaatcagccagctttccatgaagctgccgcccatgccggacttgaccaaaagtgtacagcccaatttccgaagtgttgtgggcaaggctttgactaccctcaacaaaccagacttggctcccaattccagggaatcaggttccagcctgaaaggtcctcctccgcttactagtccacccatcagcacatccaagcccactgcaccggaaccaaaacttgccgaggccaaagatgtgccccttcccaaatcccagcctccagtgagaagtaagatgaagaggaactccaaaagagctggttccgcggtggcaactcctccaactggtaacgataggccagcacccgtgcccaatcccactggaacctggggatccggatccctacagccagattcaaagaaaaaagccaagtaa

SEQ ID NO: 31755 - protein, 745 aa, DROSOPHILA
MNVCKPKEVGPDGLFVRKRFTRHPVVISAKRFAAIKGRSRQDEKHAQMEAVEEERRYRQYLKDGNELLCSLFTDPNAPKVKKSARAQSKEAMAVVKDVDTKLADERLRKQRILRANRLLDQLKPGPRALHQALIYSEMIHQRKYNEALNEEIAEAARAQERADEEMCPAALVPFGHATEEEEVARQTAKNMEHAELMRADIAQRARIREAEREQRVFEEQVDRAQYKCLQDKEEKALKEKKARKIAFNRKAYKEALQEKAEIAEHERICDAIDDRRNCVYIVASRNLDSRYGSHVKQLRQKRQEERELQALRVSQAQQVLQKKLEERQIDAEDRHAFETQVDDSRRQCEREMLAKERRAYQKLERKQDAEKLRRQQELQRFHVARRLKNAEANRFFDASQKRKRDKVKEELRNVLFGQREEFLEKRRAELMNLAACNEDPYLEDDKKFFEQAVEIMEESRKVGRPLYPIATAVDRYERQNQLDMRPEGRMVKRSSLRDYCWPGFFSKAELAYRKYEQREKCREEQVADRHQIYCNSVKIKKLAEVEKPYIPCVASCPINCFHRRGMPDTDSKESFDYGRHVCYTDTPTVAACPGPMQVIHNDPLDNQRKISQLSMKLPPMPDLTKSVQPNFRSVVGKALTTLNKPDLAPNSRESGSSLKGPPPLTSPPISTSKPTAPEPKLAEAKDVPLPKSQPPVRSKMKRNSKRAGSAVATPPTGNDRPAPVPNPTGTWGSGSLQPDSKKKAK

SEQ ID NO: 31756 - DNA, 2627 bp, DROSOPHILA
attgggcggaatcgatctgcgatactgtatcaaacgtcacatagaactcgcaatcgcagcgaaagtatcgagtttcggtgatatattgcgatgcccacagatagcaaagctgggaccggaaacaaaacccaacgtgcggctaatttatgcagtcttcctggattcctggattcctggaggcaagttcaggtggcaaggaggtgcacaaacaaagccaagtcccgaaaaactaccaaaacacctttaacgaacccttcgaatgagcaggtgggagtgactcggaaataaacaagccaattggaacggctccaaatcaatgctccaccacatatatcctgggcgtcgcaggagggagggatgggaatggaagggagtggaagggaacgacctgtcgatttctttgggcttatggagtttcctgctgcaactgcaccacgacacacgaccccatgcatataaacatttcacagtgtggcgacatatctgagatatttttatggccaccgtgtgggacacgcttccttttgggccgggctaaaaatacacggaagcgcgcgagagatgtgtctgtggagcgctcttatctgtgtataatccaccttatatgttctcaccaccaccacacaaattgaaaataaacacaaattcgggttacgagggaaccgaaaatccagttgcagattaccatttattgggaattaaagctggcatttatagaacgtgcttcagcacaaactcacgctggccattcggaaatattagttacatttgatacggtacttttttctgcggttcagcagataaaataaacttaaaattcgccatgaaaacatttaagaggtttccgaccacaaaagtaaaaggccgaaagttgttgccctgtcagccggtctatcccttttccatcaaagtcaaaaaatgtgtctttggtgtacaacacaagcttatatcccacaataaacacaataaacaattagcgtccaaattttaaagtaaagttatgcagcgactagcttcagttaattcaagaaatataaggccatctatttccgcgttgcacacggagaagccccacaatgtggccaagacttctccagcttcttctaatctatcagatcatacaattcccgagaagacagcgcagaaatcggaatcgaaaccgaaaacgaaatcaactcaaaatcaaagtgcaggactagcgagtgctaggtcacaactggtgataaagtccagtgtgggtgctactcccaggccaggatcaacgccaggctctggagccactaggaacactgcctccagtaggacccagcacttttgcattcccgtgcggagctgttatactgtgaccagccgcactcgccgctcctccgagcacgcggccttcctgtaccatctgtcccagttggagcagaccggatttggcaagagcgcggtggatcccatgaaggccgtgccggcggctgagctgcaactgctgcagagtggccagaggaccacctacctggagcggcggtacgaacgcagcccagacgacaagtacaactatccggaggccaccagctggcgatatgggtggttccaccgcgagtcagatctcctgcagaagcgcgtgcccaggcgagattagaacagcatttcgtcctgtcctgcccaatttcaatgaaatgcttctatccacagaggcctctaaaatattcggattagaatgcgtacctcttgcttttcaatataaataaaaaaaaatttacaataaagtttttagttatatcccaactgaatattcggcgttcctgcaaaaactaataaaacgtaaaagggaagggccagccagtttagatcagaataattcagttgggcttgatttggcccaagggcgatattaaaactttattaaatgaaagaatgtccaaacctggcaaggcgaaataactctatcaaatatggttgcatgcaatccatccggcaaacgcatctggtgtgcgcctcgacgagctcatcccgggctatgtgtggagcagatgccaagagccaagagcaaagagctccactgacagcgccactttccgacaggccgacctttgttgttttggcgctttcgaaagtgcagcagttttcaagttggacggaaaatgaaatccagcaaggacaattgcattagtctgccgctcgcatgacgtacaacggggcgtatgcttgttgtctgacattcaaagtgggccaaagttgggcaacttctcgcagcggaactcgttgcggctgcctctcttttgattgactcatgaaagtcggcaactttttaattgttttgtaacatttcttcaaataattttgcaatttttccgccaacccgccactggaatgagcattctccgagcgttggctctaaaacttactaacttcgttccatggcgcaatgctttaagttcacccggttcgcttgtcctgtgtcctctgtcctctgtcgctgattgtctgcacttcagaccattcatggcagatttcgagtttcattgttgcatccgaagcactttgagctgcgcaaactttcgccgaccaagacgctctgccaactttcccgtcctgcccatccagcatattccgaccagcgaccgacccctccggatcac

SEQ ID NO: 31757 - DNA, 627 bp, DROSOPHILA
atgcagcgactagcttcagttaattcaagaaatataaggccatctatttccgcgttgcacacggagaagccccacaatgtggccaagacttctccagcttcttctaatctatcagatcatacaattcccgagaagacagcgcagaaatcggaatcgaaaccgaaaacgaaatcaactcaaaatcaaagtgcaggactagcgagtgctaggtcacaactggtgataaagtccagtgtgggtgctactcccaggccaggatcaacgccaggctctggagccactaggaacactgcctccagtaggacccagcacttttgcattcccgtgcggagctgttatactgtgaccagccgcactcgccgctcctccgagcacgcggccttcctgtaccatctgtcccagttggagcagaccggatttggcaagagcgcggtggatcccatgaaggccgtgccggcggctgagctgcaactgctgcagagtggccagaggaccacctacctggagcggcggtacgaacgcagcccagacgacaagtacaactatccggaggccaccagctggcgatatgggtggttccaccgcgagtcagatctcctgcagaagcgcgtgcccaggcgagattag

SEQ ID NO: 31758 - protein, 208 aa, DROSOPHILA
MQRLASVNSRNIRPSISALHTEKPHNVAKTSPASSNLSDHTIPEKTAQKSESKPKTKSTQNQSAGLASARSQLVIKSSVGATPRPGSTPGSGATRNTASSRTQHFCIPVRSCYTVTSRTRRSSEHAAFLYHLSQLEQTGFGKSAVDPMKAVPAAELQLLQSGQRTTYLERRYERSPDDKYNYPEATSWRYGWFHRESDLLQKRVPRRD

SEQ ID NO: 31759 - DNA, 7176 bp, DROSOPHILA
acgcacgcacgcactgagctacgtcatcgacgcaatatcgcgcgatcttgatttgtttttgtttttgcctcgcacactccttcacaccaaattacacaacacagcaacaaatttcgaagtatcgcatttcgtgcgagtgacaaccggttaaatcacgcctataatttagccgccgattacatcgagccctcagtgcagcttatatgtaatccatttgtcattcctaccgtgctagtaaataataaaatctaaactaaaccgtctgttttttcacttttctcacgtttgacatcagagagaccgttctgcgagtgctaaaaaataccaaatgttaattgccatagttagggggactcctgcgcttacagacacatgtaatgtaactaacgatgtaaaatagttgtgtaaaatgtagagccatgtatttgaagaaatgcatgaaatgaagaattaaatcgaagcatcttcaatagcaacatatattgcaactttaaccttttttttatctagcttagcattttatagcttgttcttaacaaaaatagaccactttcgattaacacacagctccaattaaatcctatgacatacgattaaccattgttccaaaaacaatgcgtacttttccggcagttatacgacttaacttcttaattacccaaaaaccctgagaactcgtgcagtctacttgattccgcactccagagcagacaactcgaaaatgaggcggagtttgtatctgatcatagccatcggattggtggacgttcactgcgtatccctaagatacattctgaatgctctcgagaatgagttgcagtacagagcgattctcctcgtagaaagtgcgagtgaaattgaatcgtgttgggagcagaagtacattcaaggagcggtgccaattctgaactttaatgcgaatcaaagtttgtatcttaaagatgcgcttaatacgaatatactggcactagtttgcctaaacgaaaacgttgagagcaccatgcaggctctttacgaaaatctcgaggatatgcgcgacacgcccaccatactattcgtcctttcggattccaaagtccaggatgtctttctggagtgtctgcgaagaaaaatgcttaatgtcttggctttcaaaggattggacagggggttcgtctacagctttcgggcttttcccacatttcgtgtcatagagcgcaacgttatggacatcctccagtacttcgagcagcaactcgaagatctgggtggccataccctcactactctgcccgacaacattatcccgcgcaccgttgtctacaagagcccggatggaagtcgccagctggctggatatctgtaccccttcctgcggaactatgtgagcaccattaacgcaaccctcaaggtctgctggcatctggttcccgaggacggcatgatccagttaggtgaggtagtcaggctctcggagatccatgatgtggatttcccactgggcatgcatggcattgagcacgggtcgacgagccaaaacgttcctttggaggtctccagctggttcctcatgctgcccatggagccctccctttctcgggctcaatttttcatcatgttgggttttgagaaggtaacgccagtgctgctgctgctcacaatcctcctgagcactgcccatcggattgagatgggcttgcggcctagctggcgctgctacgtcttgggagacagagttctgcaaggaacactgggccaagcattcttcctacccagaaggctttccgtcaagctcatgctggtttactcgctgatcctgctgaatggattcaccttcagcaactattccatcaccagtctggagacctggctcgtgcatcccccctcgggacatccaatccacagctgggagcaaatgcgcaccttgaacctgaaagtccttattgtcccctccgagctggattccatgaccaaagccctgggcaagcaattcacggagagcaacagcgatctcttcgaactctcgaaatctggcaatttccaagacaagcgcttggctatggaccaatcctacgcctatcctgtgacgtgcaccttgtggccactgctggagcacgcccagatccgactgccgaagccagagttccgacgatctcgggagatggtgctcataccgctgcttatcatggccatgcccttgccgaagaactcaatgtttcacaagtcactgaatcggtaccgggcactcacccaccagagcggcttgtacgagttttggttcaagcggagcttcaacgagttggttgccctccggaagatccactacaaagtgaatggtgatcatcagatatatcgagacttcgagtggcaggactttagctacgtgtggctgggcttcgtgggcggaaccatcgctagtatcctggtactcctcgccgagattggataccacaggtggcaactaaatcaaaattagcattgaacttgaataaataaacactatgaatatctattaggcattgctctgggaatcctaattggataaaggcactcataaatgcaggcactagactgccattaaaataagtaacaactcgttgttattgctttccggtataactgaaggataccagatctaatcgcagtaaccattaccctgtggacaaagcagcagagtggcagtatgtattagcagctcgtttcggatagtcgccatggaaatgcggctcgcactattcttcactttcgcctgcctggccggggcacatgatggttccttgagaaatatgctgaaatctctagaggatgagctgggctacaggactattttacttttagaaggcgttcaatggctccattagggagttcgtttacagcttcaaggcattcccaactcttcgagttgtaaagcgcagggtgaaggatgtgcgtcggtacttcgagccgcagcttgaggatctggggggatgtgtcctgaaggttgtgccagatggcatcatgcccagaactatggtgtaccaaggtgaggatggagagctgcagatgggcggatacctcagccacttcatccgcaactatgtgagcaccattaacgccagtctgcagatccgctgggacctcttcccggaggacggtgacttcgatatggacagcctaacgggaagcaatcacgtcgacttccccttggggctgggcagtctcagtttccagacattgcacaaggacgtcgccatggagatttccagctggttcctcatgctacccatggagcccagccttcctcgagctcgattcttcataaggttcggcatatcgctatacctgataccgctgataatccttctagccatcgtgctaagtaacgcacatcgctttgaagctggcctaactcctagctggcggtgctgttcaatgggcaatacggtgctccggggagtcctggcacaggcgttcgtccttccgaaggggctatccccaaaactaatgtttgtctactggctgcttctggtgagtggcttctttgtgagcaactacgtgattgtctatctcacagcttggctcatacaacccccgacaagtgatccagttacagacttcgatcaaatgcgcagggccaagctgaagatccttatggtcccgacggacatggactacctgaagtcgataaggggagcggagtatgtggatgcgcacagcgatgtgtttcagacagccgactccacggattttcagacccagcggatgtccatggagctgcacttcgccttctccgtgacgggcaccttgtggcccctcttaaggcaggcccaagtcaaactgcaccgacccatcttccggcgctccaaggagatggtctttctgcccttcgtaatcatgggtatgaccatgccgaacaactcaatattcctcagttccctcaagcaatataggttgcggacaagtgaggccggactttatctgctctggttcaagaaaagcttttccgagctggtggcgatccacaaaatctcctacaaggaggactgggttcatgactcctattccgatctgaagtgggaggattttctctttgcctggcttggctttcttggcggaactaccgtgagttgcctggcattgctggccgagattgggtaccacagatggctctggaaacgcacacaccaataaactaattgtgtaatctgacaatctttgacttaccaataaatggtacttgctctctggaatatatcctggtttcttggttctcattcctgcatgaatgttttaaatgagttttccctctttgcagtccaattaaaagcagtgactatggaactcataagattggtggtctctaattgcttgactcatttagattcggatttcagatccgtgtgaaaattctgtcaagttgcagtttatcctaccccagcagtgtgagcagtcgccttaaaaatgcggcttgccatatacgttgcgtttcttagttcgattggcaatcggagtggcttcttgagcagcttgctgatgtcccttgggaaggagctacattacaaaaccattctgctcgtaggaggttcctctacgtgctggagcctggagccctttgaaacgggtgttcccatcttaaacttgagaggggagaacaacgcgtatccacaggatactttcaactcacagatgcttgcacttgcctgcttgcaaaccgaaagcgaagatgcagtgaagttgctttatagaagtcttaaggatatgcgagatactcccaccttactattcgcatcctcggaggagcatatacacgatacactattcctgggatgtttcagagaaaacatgctaaatgtcctggcacttacggcttctagtaaagagttcatctacagctaccaggcattcccaacattccgcgttataaaacgaaagctggtggaaattcatagatacttcgaaccacaacttaaggatcttggtgggcatatagtgagtgcactgcccggcaacataatgccacgcacaatgtgctacaggaatgccgagggagagcgccaattggctggatacctgaataccttcatacggaactatgtggagagcattaatggaactctgaggatttcctggggcctcgtgcccgaggacgatatgaggcacttaaccatatcaaggctctcgaagatacagcacgtggacttcccactgggaatcattccactttacaacaagacggacaagcagcatgtgtacatggagatttccagctggttcctgatgttgcccatggagacatccgttccgcgagctcatctcttcgtcaagctgggcctagagagactgctacccatcatagttgttgtgggtgctgtgctcggcaatgctcatcggatcgaagtgggcctggggcccagctggcgttgctactacctggcggataaggtgctgcgaggagccttggcacaacccattgtgcttccgagaaggctctcccccaagctgatgcttatttattcgctgctcctgctaagtggattctttctgagcaactactacatggccagcctgacgacgtggctcgtacatccgccggcgagtgatcgaatcctggagtgggatcaattacgctacctgcatctaaaagtccttaccatccccgaagagttcaagtacatgtcattgatattgggcacagattttatgacagcctacggcagtatatttcagctcacgaactcgacggatttccagagaaggcgcatctcaatggatccctcctacgcctacccagtgaccaccagcctttggccctttctagagctgtcccaagtgaggctacggcgacccctattccgacgatcctacgacatggtgctccagccttttcaagttatgtctttgccgctgccacggaactcaattttccacaagtcccttctccgctatgctgctctaactcgcgagaccggactgtactattactggttccggcgcagctactacgaactggtggctctcgggaagatctcgtacaaggaggaggagggtaacccgtactgcgatctcaagtggaacgactttcgtatcgtgtggctggccttcctgggaggaactatcattagttgtctggcgctcctattggaggtagctcactacaggtggcacttggggaactcctcactctaaacggattattcgtatctccccaaccagactaccaataaaggccacattaccacgaatgaatgctaaacgttctctcatttgcacgggttaatggttacagatttagtcttgcccgtgattggaaatttattaccaactcccaactaccaactagtttcggccctataaatgcagcccagccagaacttttgcagaaatatgccgaagtcgttgcttctaagatgcggttccatttaaatatagcaaacagtggtttgcttgggcttcacttgtgcccaacaagaagtgctttacctgaacaaaatccttgtttctctaaggctggagctgtcatttgaaaccttactcttccttggaggcgctggagggaacgatgtctgctgggagcacttcgaccttgaacgctacccacacctgaacttcaatgctaatcaaagtatctaccttaaaggaagagtcagcaggaaaatgctagctctggtttgcctggattctgctgaggagacaaactgaactacaccgtggatcccgcgccatcgccctaccacgatcgccctatcacgacctgtactacgtttggattgcctacttgggaggcaccatgatcggcatagggatgctagctgtggagatcgcttgcttcaagtgggatctattgagacgaccacccatttaaatgtactaaggataaatcaaatcaagtttataattaagaactcgacgggtcgcaatttcaaacactttttgcaaaagcatttttttattcaagtttcacatgtctctgctcactgcatcttgattttcatcgttaaatgttttccgtttcttgttctttttcatttttcatttttcattattcattttcgattgtttttaggtttgttaataagtaggtattcgtaatatgttataattaggatttcgcttcaatggaattacatatataatgcatatattatacgccatccgtgtcgctattatctgtgctccttgtgggttcgctagtcattaaaatcggacttcgaggggcac

SEQ ID NO: 31760 - DNA, 4343 bp, DROSOPHILA
atgcaggctctttacgaaaatctcgaggatatgcgcgacacgcccaccatactattcgtcctttcggattccaaagtccaggatgtctttctggagtgtctgcgaagaaaaatgcttaatgtcttggctttcaaaggattggacagggggttcgtctacagctttcgggcttttcccacatttcgtgtcatagagcgcaacgttatggacatcctccagtacttcgagcagcaactcgaagatctgggtggccataccctcactactctgcccgacaacattatcccgcgcaccgttgtctacaagagcccggatggaagtcgccagctggctggatatctgtaccccttcctgcggaactatgtgagcaccattaacgcaaccctcaaggtctgctggcatctggttcccgaggacggcatgatccagttaggtgaggtagtcaggctctcggagatccatgatgtggatttcccactgggcatgcatggcattgagcacgggtcgacgagccaaaacgttcctttggaggtctccagctggttcctcatgctgcccatggagccctccctttctcgggctcaatttttcatcatgttgggttttgagaaggtaacgccagtgctgctgctgctcacaatcctcctgagcactgcccatcggattgagatgggcttgcggcctagctggcgctgctacgtcttgggagacagagttctgcaaggaacactgggccaagcattcttcctacccagaaggctttccgtcaagctcatgctggtttactcgctgatcctgctgaatggattcaccttcagcaactattccatcaccagtctggagacctggctcgtgcatcccccctcgggacatccaatccacagctgggagcaaatgcgcaccttgaacctgaaagtccttattgtcccctccgagctggattccatgaccaaagccctgggcaagcaattcacggagagcaacagcgatctcttcgaactctcgaaatctggcaatttccaagacaagcgcttggctatggaccaatcctacgcctatcctgtgacgtgcaccttgtggccactgctggagcacgcccagatccgactgccgaagccagagttccgacgatctcgggagatggtgctcataccgctgcttatcatggccatgcccttgccgaagaactcaatgtttcacaagtcactgaatcggtaccgggcactcacccaccagagcggcttgtacgagttttggttcaagcggagcttcaacgagttggttgccctccggaagatccactacaaagtgaatggtgatcatcagatatatcgagacttcgagtggcaggactttagctacgtgtggctgggcttcgtgggcggaaccatcgctagtatcctgaaggcgttcaatggctccattagggagttcgtttacagcttcaaggcattcccaactcttcgagttgtaaagcgcagggtgaaggatgtgcgtcggtacttcgagccgcagcttgaggatctggggggatgtgtcctgaaggttgtgccagatggcatcatgcccagaactatggtgtaccaaggtgaggatggagagctgcagatgggcggatacctcagccacttcatccgcaactatgtgagcaccattaacgccagtctgcagatccgctgggacctcttcccggaggacggtgacttcgatatggacagcctaacgggaagcaatcacgtcgacttccccttggggctgggcagtctcagtttccagacattgcacaaggacgtcgccatggagatttccagctggttcctcatgctacccatggagcccagccttcctcgagctcgattcttcataaggttcggcatatcgctatacctgataccgctgataatccttctagccatcgtgctaagtaacgcacatcgctttgaagctggcctaactcctagctggcggtgctgttcaatgggcaatacggtgctccggggagtcctggcacaggcgttcgtccttccgaaggggctatccccaaaactaatgtttgtctactggctgcttctggtgagtggcttctttgtgagcaactacgtgattgtctatctcacagcttggctcatacaacccccgacaagtgatccagttacagacttcgatcaaatgcgcagggccaagctgaagatccttatggtcccgacggacatggactacctgaagtcgataaggggagcggagtatgtggatgcgcacagcgatgtgtttcagacagccgactccacggattttcagacccagcggatgtccatggagctgcacttcgccttctccgtgacgggcaccttgtggcccctcttaaggcaggcccaagtcaaactgcaccgacccatcttccggcgctccaaggagatggtctttctgcccttcgtaatcatgggtatgaccatgccgaacaactcaatattcctcagttccctcaagcaatataggttgcggacaagtgaggccggactttatctgctctggttcaagaaaagcttttccgagctggtggcgatccacaaaatctcctacaaggaggactgggttcatgactcctattccgatctgaattcgattggcaatcggagtggcttcttgagcagcttgctgatgtcccttgggaaggagctacattacaaaaccattctgctcgtaggaggttcctctacgtgctggagcctggagccctttgaaacgggtgttcccatcttaaacttgagaggggagaacaacgcgtatccacaggatactttcaactcacagatgcttgcacttgcctgcttgcaaaccgaaagcgaagatgcagtgaagttgctttatagaagtcttaaggatatgcgagatactcccaccttactattcgcatcctcggaggagcatatacacgatacactattcctgggatgtttcagagaaaacatgctaaatgtcctggcacttacggcttctagtaaagagttcatctacagctaccaggcattcccaacattccgcgttataaaacgaaagctggtggaaattcatagatacttcgaaccacaacttaaggatcttggtgggcatatagtgagtgcactgcccggcaacataatgccacgcacaatgtgctacaggaatgccgagggagagcgccaattggctggatacctgaataccttcatacggaactatgtggagagcattaatggaactctgaggatttcctggggcctcgtgcccgaggacgatatgaggcacttaaccatatcaaggctctcgaagatacagcacgtggacttcccactgggaatcattccactttacaacaagacggacaagcagcatgtgtacatggagatttccagctggttcctgatgttgcccatggagacatccgttccgcgagctcatctcttcgtcaagctgggcctagagagactgctacccatcatagttgttgtgggtgctgtgctcggcaatgctcatcggatcgaagtgggcctggggcccagctggcgttgctactacctggcggataaggtgctgcgaggagccttggcacaacccattgtgcttccgagaaggctctcccccaagctgatgcttatttattcgctgctcctgctaagtggattctttctgagcaactactacatggccagcctgacgacgtggctcgtacatccgccggcgagtgatcgaatcctggagtgggatcaattacgctacctgcatctaaaagtccttaccatccccgaagagttcaagtacatgtcattgatattgggcacagattttatgacagcctacggcagtatatttcagctcacgaactcgacggatttccagagaaggcgcatctcaatggatccctcctacgcctacccagtgaccaccagcctttggccctttctagagctgtcccaagtgaggctacggcgacccctattccgacgatcctacgacatggtgctccagccttttcaagttatgtctttgccgctgccacggaactcaattttccacaagtcccttctccgctatgctgctctaactcgcgagaccggactgtactattactggttccggcgcagctactacgaactggtggctctcgggaagatctcgtacaaggaggaggagggtaacccgtactgcgatctcaagtggaacgactttcgtatcgtgtggctggccttcctgggaggaactatcattagttgtctggcgctcctattggaggtagctcactacaggtggcacttggggaactcctcactctaaacggattattcgtatctccccaaccagactac

SEQ ID NO: 31761 - protein, 1436 aa, DROSOPHILA
MQALYENLEDMRDTPTILFVLSDSKVQDVFLECLRRKMLNVLAFKGLDRGFVYSFRAFPTFRVIERNVMDILQYFEQQLEDLGGHTLTTLPDNIIPRTVVYKSPDGSRQLAGYLYPFLRNYVSTINATLKVCWHLVPEDGMIQLGEVVRLSEIHDVDFPLGMHGIEHGSTSQNVPLEVSSWFLMLPMEPSLSRAQFFIMLGFEKVTPVLLLLTILLSTAHRIEMGLRPSWRCYVLGDRVLQGTLGQAFFLPRRLSVKLMLVYSLILLNGFTFSNYSITSLETWLVHPPSGHPIHSWEQMRTLNLKVLIVPSELDSMTKALGKQFTESNSDLFELSKSGNFQDKRLAMDQSYAYPVTCTLWPLLEHAQIRLPKPEFRRSREMVLIPLLIMAMPLPKNSMFHKSLNRYRALTHQSGLYEFWFKRSFNELVALRKIHYKVNGDHQIYRDFEWQDFSYVWLGFVGGTIASILKAFNGSIREFVYSFKAFPTLRVVKRRVKDVRRYFEPQLEDLGGCVLKVVPDGIMPRTMVYQGEDGELQMGGYLSHFIRNYVSTINASLQIRWDLFPEDGDFDMDSLTGSNHVDFPLGLGSLSFQTLHKDVAMEISSWFLMLPMEPSLPRARFFIRFGISLYLIPLIILLAIVLSNAHRFEAGLTPSWRCCSMGNTVLRGVLAQAFVLPKGLSPKLMFVYWLLLVSGFFVSNYVIVYLTAWLIQPPTSDPVTDFDQMRRAKLKILMVPTDMDYLKSIRGAEYVDAHSDVFQTADSTDFQTQRMSMELHFAFSVTGTLWPLLRQAQVKLHRPIFRRSKEMVFLPFVIMGMTMPNNSIFLSSLKQYRLRTSEAGLYLLWFKKSFSELVAIHKISYKEDWVHDSYSDLNSIGNRSGFLSSLLMSLGKELHYKTILLVGGSSTCWSLEPFETGVPILNLRGENNAYPQDTFNSQMLALACLQTESEDAVKLLYRSLKDMRDTPTLLFASSEEHIHDTLFLGCFRENMLNVLALTASSKEFIYSYQAFPTFRVIKRKLVEIHRYFEPQLKDLGGHIVSALPGNIMPRTMCYRNAEGERQLAGYLNTFIRNYVESINGTLRISWGLVPEDDMRHLTISRLSKIQHVDFPLGIIPLYNKTDKQHVYMEISSWFLMLPMETSVPRAHLFVKLGLERLLPIIVVVGAVLGNAHRIEVGLGPSWRCYYLADKVLRGALAQPIVLPRRLSPKLMLIYSLLLLSGFFLSNYYMASLTTWLVHPPASDRILEWDQLRYLHLKVLTIPEEFKYMSLILGTDFMTAYGSIFQLTNSTDFQRRRISMDPSYAYPVTTSLWPFLELSQVRLRRPLFRRSYDMVLQPFQVMSLPLPRNSIFHKSLLRYAALTRETGLYYYWFRRSYYELVALGKISYKEEEGNPYCDLKWNDFRIVWLAFLGGTIISCLALLLEVAHYRWHLGNSSL

SEQ ID NO: 31762 - DNA, 3045 bp, DROSOPHILA
gacgtgtgcccgctgcccagggagttgtggccatgccgtccgagaacagcggcggccgccaggtggttactggctgcgtgcccaccgccgacgtggctcaggtgaccagctgcagcggcgtggtggtgcagctgctgctggtggtgcgccgctgccagcgtgtggtggttcagggccggctgctgctggtggtagttcgccggattgccgcggaacgtcatggagttgacgaacataatggctgctggctgtttgtggagcgtggtggcggctagtggagtgctgtaggtgctgtaggtggattctgcgtcctggtggccgtggctctggatctggataccgctgtagatgggcccgagaatcttgacggcgttcttgtcctggtcctagtatttcacttcacttcccgatttacctgggatgtcgggaatctgcgttatggccaatctagtcgtaatccagcggaatgcccacttaccaggatttgcacacggaatatgaccaaggattcgcggagttgaaaaaatcgtttttctctcgcacagactcttttcaacgctcttcgctctctctttctttacctctctggctcttcctttcgctcttttgtactttactttttctgggggctttcacttttgggctgattctttggggctctgctgggctttcgcgtaacactttccggtattgttttcgagtggcacctaaactagactcttcagcaattgcagcagtgtaaaacctggtttttgcagcttcggcgatggccctttattatttaattgtattttatgcaaaaactgtcgctactagtgattagtgatgttaaaaaacatcgatgcatctgccatcgatacgtgaggccttcatgttcttggccataccatcgatgactttctcgctcccgattgcttagcaagtccaccctccacagttagcggataatggccatcaaagcaacgcttaccaacactgcaccccttgttttggaaatgcaaccacaaaagcattggacacttgcttacttcaaataaaacacatttaaacaattagatgacgtgatggaccagaatggcgcatcgggaagtcatccgaacaggctatcccaaggaagaggagcccatgcgcgcgaacgtggcgccacagtttccgcggcggcaaatcggagtaacattatcgacgaaatggccaaaatatgcgaagccgatcgccagactttcgccatcgctcgacggactcggggtcacgagcggcttgcggtggacaacagcgacttcgtcgccgtggaggatcttattttgtcctacgcagagcccacgcccgaggaccaggtcgagatgatcatgagcgacttttgctcgtctccaacatacgcagaggatgaggatgagcccagccatgagtcggagccgtggtttcgatttcgcaacaaaaggatcagaacctacagccggaagagggatcccaaaagccacaaggccgttcaaaacgagaagcgtagaggttcctcaggcctctccgtgcagagggatctcaatacttcgttcacatctatggcttgtgatttcgatgcttcatcacagaagatacacgaggtccttttgaacctcagtcaatacttttccgcgaccgcgacagcttccggtccgactcctgtcccatcgcaaatagatctgccaaccgaagcaaggcaggattctggtgacgagtgtttcaacgctgaattggagaacttgagggatgacctgttgcagagcggatttacatttgaggcctctttctatgaaaatgagcatgagcaggaaggtagggagtgggatcgatatggcaagaaacacatttgtaactccttttatatgtacgtaggtccaggaactatggcagacactatttatggcgatagcatgcaatcggttcccactacgcgcctccgattgggtaattcatatgcaatttatgttgttgcgaagttcattaatataaacccttatttatagaaagtggaaaacgtaatgtttggtctgatgcagactctacattgaaaaaagctgatgtcgaaattgctgaaaataagaaacttttgatgggccaaacgcaagcaaaaaatgttgacatagaggagaacacaaacttcatattagaaggcataccactaagtgaatggctaactccgatggaactgcccgagatctccaaagatgtaatcaaacatatacccgataaaaagttaaagttggagccaagttcccagaaagaacaaaaaagtagcaaagattcaaatgcatcaaaggttagaggagcctcaaaacaatcttgtgatattaacacgaaaaacgaaggaactactattctggatcagcctaatgctgcagagcaagaaaacctattgaacgacggcgagcttcttgaggagtttctttttaatgattggcaaccaatgcagtgctctaatggcccatcaacctccaaaaacgcaattcaagggcctaaagaaaacatcaattcaataaatctggacgacaaggagcaaccagaaaagcagactcctaataaaagtcagaccataagcagtcatcaacttaatggcattcgaaagaagtccttcaaatttatcgaggtttcggaagaaatgaaaattaaaggcgaagagtttgtagacaaagttgtatccggcctatatcactttagtcacaagtgcaacttacgtactgaggaatactccgataatcatagtcaagtaatggaatcaacacagtgtgcggaattcaaatcagccccaagcaagcccatcgaaatattggatggtaaggaaacctacaatgcaatagctaaagttgacgttggagaaataaatggaaaattcagtcctctcaataacgatactatagcagagcccgagttttgtggctttcgcacagcctcaaataaggcaattccgatttctgagaagatgaaaatcaaaactgcagagtttatggctgagtttcaatccaaagaaacaattcaacaaaatgattatttagtccatcagccaaatgacaa

SEQ ID NO: 31763 - DNA, 889 bp, DROSOPHILA
accacaaaagcattggacacttgcttacttcaaataaaacacatttaaacaattagatgacgtgatggaccagaatggcgcatcgggaagtcatccgaacaggctatcccaaggaagaggagcccatgcgcgcgaacgtggcgccacagtttccgcggcggcaaatcggagtaacattatcgacgaaatggccaaaatatgcgaagccgatcgccagactttcgccatcgctcgacggactcggggtcacgagcggcttgcggtggacaacagcgacttcgtcgccgtggaggatcttattttgtcctacgcagagcccacgcccgaggaccaggtcgagatgatcatgagcgacttttgctcgtctccaacatacgcagaggatgaggatgagcccagccatgagtcggagccgtggtttcgatttcgcaacaaaaggatcagaacctacagccggaagagggatcccaaaagccacaaggccgttcaaaacgagaagcgtagaggttcctcaggcctctccgtgcagagggatctcaatacttcgttcacatctatggcttgtgatttcgatgcttcatcacagaagatacacgaggtccttttgaacctcagtcaatacttttccgcgaccgcgacagcttccggtccgactcctgtcccatcgcaaatagatctgccaaccgaagcaaggcaggattctggtgacgagtgtttcaacgctgaattggagaacttgagggatgacctgttgcagagcggatttacatttgaggcctctttctatgaaaatgagcatgagcaggaagcatgcaatcggttcccactacgcgcctccgattggaaagtggaaaacgtaatgtttggtctgatgcagactctacattga

SEQ ID NO: 31764 - protein, 274 aa, DROSOPHILA
MDQNGASGSHPNRLSQGRGAHARERGATVSAAANRSNIIDEMAKICEADRQTFAIARRTRGHERLAVDNSDFVAVEDLILSYAEPTPEDQVEMIMSDFCSSPTYAEDEDEPSHESEPWFRFRNKRIRTYSRKRDPKSHKAVQNEKRRGSSGLSVQRDLNTSFTSMACDFDASSQKIHEVLLNLSQYFSATATASGPTPVPSQIDLPTEARQDSGDECFNAELENLRDDLLQSGFTFEASFYENEHEQEACNRFPLRASDWKVENVMFGLMQTLH

SEQ ID NO: 31765 - DNA, 2594 bp, DROSOPHILA
ttcaataaatctggacgacaaggagcaaccagaaaagcagactcctaataaaagtcagaccataagcagtcatcaacttaatggcattcgaaagaagtccttcaaatttatcgaggtttcggaagaaatgaaaattaaaggcgaagagtttgtagacaaagttgtatccggcctatatcactttagtcacaagtgcaacttacgtactgaggaatactccgataatcatagtcaagtaatggaatcaacacagtgtgcggaattcaaatcagccccaagcaagcccatcgaaatattggatggtaaggaaacctacaatgcaatagctaaagttgacgttggagaaataaatggaaaattcagtcctctcaataacgatactatagcagagcccgagttttgtggctttcgcacagcctcaaataaggcaattccgatttctgagaagatgaaaatcaaaactgcagagtttatggctgagtttcaatccaaagaaacaattcaacaaaatgattatttagtccatcagccaaatgacaaaccgacgtctgttggacttgatacagccttaaaaagatcaatagagagttcagaggaaatgcgatcgaaagcttccaagttggtggtcgttgatactacaatgcgggaaccgcatcaacccacacttgacccagtttgccgtgacttaaatgaatcacagtttttcggctttagaacagcgtcaaacaaagccattgagattaccgaggcgatggagaagagaggagccatgtttctggcccagtctaaagctacagaccaattaaacgggtggcagccaagcgattttcctgatgttctacccacctctccaaacaatgagattcattcaataaatgttgaaaataataaggctgtgaatactaaaaccgtatctgagaccgaattcttcggctttcgtaccgcttcaaataaaggaattgtgatttcggaaaatacgaaaatcaaagttgcacagttcatgagtgaatttcaagccgccgatgcaagcactgactcgaaccaaccaactgtgatctctgaggaatcgagaaatattgatgccaagttcgtagatgaagcggcggcagaagacagtgccaacaagccaactttttgcaatgtacaaagtctaaaaaatacctcagatattgagcatttcaaacacgacttcttcgtggagcattctgcaaaggaagagcatccgctgtgtagccagccattggtgaggacacccagaaggtcgcaggagatccactcctcactatcgcaacttgccggcaaatcaccactggaccaggccaccaagaagtccgtaatagctcgccggaacctcctgtcactaaaaagaaagcgaaagatcattttgtcaactgaaacttccacttcctgcgccttacccactatggagcgattcgctcccaagccttcctcgacaagtactccgctggccgacagggacttaaatcgctccaaggactgtacaaagaatagacaggatgcggaggacatgtcccctatttgcatgcaacccaaaaagagtcgaagacttggtctgagtcgaagtcgctattagtacacattaagtaagcgttgctttatacccaaaatatttaaaccgctggccgatttgaaatgggtagagatttagttgaattaattaaggtatgccattagtggtctcatcatgacagattgaataattgtataagttatcataataagcgttttttgttaagtgcaccttataaggaaataaacgatccgataagggccacccgctaaccaacttccttaaaggtgcccacttacgagttccgcgaaaaaaacgagaagagacgaaatcagtcccacagttcacaaaacaaatgcgaaaaagtagtagtccaggtcgaatgccttagccggcggctcatcatcgcgcatcaaggtatagattccctgatggatgagctcccggaaagtgtccgccttcattttgatgctgatcccgtgctcctgcaggcgcctcatgaactcactggtcatcgccaagtacggcagactgttggacacgcagtaggattcgagggtaaaacccacggcctggcgaatcatgttgaagcgcggcgtcttcagcaggtactgctgcatcaggatcagctccaggcggtcctcgtacaatatgtatatgtagctctgattgagcccatcccggtacgcctttagcagggtggcgttcaagctcaagctgttcctgcggagccgttcgggcaggaaggttttcgccttcatctgacttctgtagtactcgtcgtgcagactggggtagggagccctggccagatcctccagagtgttgtactcctcgtcgtacagcccggatgtgaggatgctggagagcgtggccaagtagacgttggtcagtataaagcctccgatcgttagaatgccatggatggccacgtccctccagccagcaactctgattttctggtggcagttgtataggatgtggctgaggctgtacagcaagcactttccaatctcgactcgtgctcctcgcgcagccagatgcagcattacggttccgtaca

SEQ ID NO: 31766 - DNA, 594 bp, DROSOPHILA
atgagtgaatttcaagccgccgatgcaagcactgactcgaaccaaccaactgtgatctctgaggaatcgagaaatattgatgccaagttcgtagatgaagcggcggcagaagacagtgccaacaagccaactttttgcaatgtacaaagtctaaaaaatacctcagatattgagcatttcaaacacgacttcttcgtggagcattctgcaaaggaagagcatccgctgtgtagccagccattggtgaggacacccagaaggtcgcaggagatccactcctcactatcgcaacttgccggcaaatcaccactggaccaggccaccaagaagtccgtaatagctcgccggaacctcctgtcactaaaaagaaagcgaaagatcattttgtcaactgaaacttccacttcctgcgccttacccactatggagcgattcgctcccaagccttcctcgacaagtactccgctggccgacagggacttaaatcgctccaaggactgtacaaagaatagacaggatgcggaggacatgtcccctatttgcatgcaacccaaaaagagtcgaagacttggtctgagtcgaagtcgctattag

SEQ ID NO: 31767 - protein, 197 aa, DROSOPHILA
MSEFQAADASTDSNQPTVISEESRNIDAKFVDEAAAEDSANKPTFCNVQSLKNTSDIEHFKHDFFVEHSAKEEHPLCSQPLVRTPRRSQEIHSSLSQLAGKSPLDQATKKSVIARRNLLSLKRKRKIILSTETSTSCALPTMERFAPKPSSTSTPLADRDLNRSKDCTKNRQDAEDMSPICMQPKKSRRLGLSRSRY

SEQ ID NO: 31768 - DNA, 2642 bp, DROSOPHILA
tttgagttgcaggatgaagtagattccaaatcaaacagttttgaatttcccgcccactgaatggaaactttcaagcactggcagctccaccgatatatgcctccagttctggtcgctgtccagcactaccatatgtgcactttttattcccattccaattccagttggtaagaaaagtgtaattgttacgttgtggcagtgaaattgtatcataattcttttaccattccaaatcggagcatattagagtgttaagacccgcaaggtaacgacacttaattgccaaacgcccgcagatgagtttgtttacgccccctttgtggcaacaaaaacaaaaggggaaagttgtgtttacgttttctaaagccagataccgttttcggggtggttttggttcaatcggggagtttccaacggaaaggccttgtaattaagtgtgataagggccctcgctctcgctggcaattaaaactagacgtcttgtttcttctgataatcgtgtttttgagtcaaatacctacacaccaagcaatcgggtttacgtgtgtgtatacactaagtggggcggcattggggtggaccctttgcacagttgaatccctctgctcaactggcgttagctgtcaagtgtgtaagttatttgctcccagctgccccaaaattgaagctgtgctctgtgggacccaagtggcagaacaacatagtccagacatataggtaccagtacatacgaccgactcgctccgcactcgcgatttgaaagcccctttatcggaaccatatgagtatgcatgtataaaactcgattgcggccgcaaataaattagtctcagttcggttcgttttgtttggaaacagttctctcgatctccgaacagacacgtcagtgtcagtggcagcaggcaaaatgtagtatttgcaattccacactcagttttccctatagtataacctactccgatctccgcagcgcaactcagactaaggctaatccgaaaccatgtccgacgacttcgatggctgcgagtgcgtctggtcgcaggagtatgcgatgcaacgcctcatcaacttcgtaagtttctgtgcgcgcagctcccagctcatttgatcaagtgtacttccttatagatacgacaaaaccagaatgcctgcggggacaacgagtgttacgatggtcagtatcaatgtctcacgtctttttttaagtatgaaaacatttagatttataatacattttgcacagcatgaaatcagtaacagtcttttactcaagtgaagattgtaacattcatttttcgcatttgcatttttaaaacaattcagtatagactagggtcatacgcgcttagtgataagttgccaaaaagtatgcagtgcttctacttgcggactatagtataaaccataactaatccatccgtcctcagtcaccggacgcactccgcaccaggcgcagatcgccggacgcggcgatgacagcggcttctccgtcgccatgatcttcctgatcgtggccatgttcatgtacatagtgaacccgagtacctggggcaacttcaccagcaacaagcgagctggcggccgacgcgacaataaccaggacggctctccgccgcagcctcctccgccggccatcaactaggcgactccgaggacccctgcttctacgaaacctgagcatccacaacacaattttcagaccgcaattccttgttttgttaattctcccactattgggacagaaaccacggatagaaccaaatcaatcgacttggtggcatccattcgcacgtttacacagaacacagattaggcaaattatacacctcttacattgtacaaaacacaaaaccgcgcactctgaaacacaccggcttatcaactaacatatttggacactttttaaaagactttggaaaactaaccgctttccttgtgtatttcctttgtacaagaggctttaaaatctttaaaatgtacatatggtgggcgggaattgatgtggtttgtattgccgtctccctggtctcgtcagttctcgttctgcagtttcaccatcttttcgcgtacgttctttagcagatccttcatttgttcgtactttcccgtggagtcgggcaggttttcaaagttgatcacatcgctgacgcccaccttaaagttgctgcccacaggcagtctgtcgtaaacggagaatttcagcaaaggcgtgccctcataagacgccttaaagggagtcgagggtgctgatcgggactgctcattatttccggactcggcagcagatggaccaacctccgtctcagacgtgtcatccaggtcggttggtgatttcgattcattcgctgtcgtgttatgcgacgcattaacatccagctcttggaggagctcctcctgctgggccttcaaatcttccaggcttggagatggcgagcgcgctgtcagttcgccatcttcgcactcttcgggcggaggtggttgcggcgggggcactgatggtggcagtggagggtcctctgtttcctcttctagttccatgtcgtagtcatcgaagctggtcagcaactcgctgggagcgggaacacggtcgtgtggagcaggcaaatccactagcttcttgcgcttgtaaccgttgatcacgt

SEQ ID NO: 31769 - DNA, 333 bp, DROSOPHILA
atgtccgacgacttcgatggctgcgagtgcgtctggtcgcaggagtatgcgatgcaacgcctcatcaacttcatacgacaaaaccagaatgcctgcggggacaacgagtgttacgatgtcaccggacgcactccgcaccaggcgcagatcgccggacgcggcgatgacagcggcttctccgtcgccatgatcttcctgatcgtggccatgttcatgtacatagtgaacccgagtacctggggcaacttcaccagcaacaagcgagctggcggccgacgcgacaataaccaggacggctctccgccgcagcctcctccgccggccatcaactag

SEQ ID NO: 31770 - protein, 110 aa, DROSOPHILA
MSDDFDGCECVWSQEYAMQRLINFIRQNQNACGDNECYDVTGRTPHQAQIAGRGDDSGFSVAMIFLIVAMFMYIVNPSTWGNFTSNKRAGGRRDNNQDGSPPQPPPPAIN

SEQ ID NO: 31771 - DNA, 18888 bp, DROSOPHILA
agttcgcggtgcagtagttgctgctgtaacgtcaatgtggagtgtcaattatgtggaaatatatttacaaagatgccccctgtttgtgtgtgtgtgtgtgcgtgcgtgtgtgtgagtgattctcctggcactgaatgtcactaaaagagggtgggagtggaagtggaagtggggctgccctctttccagtgcgtgtagatcagttaccgccagcagcaacaacaacaacaacaacaacgagaacagcagcaataacaaacaaacaaacaaacaagcaagcgacaattcacattcatttccattcattgctgcgattatcgccagttttgctttgctctttcaccacgcacgaatacgattacgaataacgaatacgaacgtagaaaaatgtgcgggggctgcggaggccgaagcgaatgaagaggaagcggcaacagtcgataagttcgctctgggcacgcccccttatgacgccccctgtgacgcgttatcagcggacacccaagaaacacaacaaacacaaagacctgaccaaaatccacacaaaatggcgataaactcgagtgccagagaatcgccgcgggcctaaaaagttcgttccccaaaatacaaaaagaggaggtaaacaaactcgtttctgccccacaacaacaccacccatgccccccgagagatcccgcaccacaaccagcgataagcatccgaagacgaagatttgggtggcccagtccacagaaagccccgcaccaaccccgaaacaagcgcctaaggtaagctccactacgattcttcgctgcaaaataccacatcgcattccagcactgggagaaaaggggggtttttgttcgaccaaagtgtgaaatatcttaaacgtggaacaaatgtcaaagtattctcgtggttaggaaatatgttgtttctttacccatcttcgattcgcaatgcaatccaaatatctgacagtcttcacggggattttcgtcgagaataagtgtatgtgatgatcgagatttgcgagtatatccgtttgttggttgtttgcattcacatttagcggtgtcacaccctttttacaagttcagcttttgttcggatcgcgggtctggcccacttggaggttaataacattggggcggtcaagtacagtgggaccgaatggccgccaattcgaaagtccgcaaatagtcgacggccctgtccctggccctgcattatggctccgactaagctcggatcttaattcgtgtaagaagaaatggttacaaggtcagtagttcgagtgagtgacgaattatagtaacttatctcaatttcgggtgtgcttagttcaatttaagccaggcgagtggatatggattatgtgcgtatatatcagtcaagattctcttgggacagtttccggttccggtatttaagtctgtaatgggtgctccattacggtcacttgtgtgtgtgtgtgtgcgtgcacagtgctgctgtgttgcctgtgccacggacacaattcataattcacatctcaattgatcagctcttgcgtgtgggaaacttaacggtcagatcatcaaacttgtcttggatattgtgattatgtgattatgactatttgttctacattcttccagcagattttgatttaattgtattgcatactattcggagtacccccttgatcaattatccatatttgcggtgctctggctacgttccactaaggccctagtccaaatcccgctagacggcttatattatagcctcaccttgtcgggaaccaccttcattatataaacgagaacatccacttctgttatataagaccataaactgtcgcggaaccctaacccattgaacattattacgtccatcgatcggtttttccgtctgttcacttccagttggctggcagggctgagtcatccagaacaaatacgtgtaaagtaccccgggatcccctgacgaccccagcacctcgtaatatcgattggaattatgctaattgggcgacgatatcccacccggtacggcaatgaccaaaattggccattaattgtattcgcttctgttaaataacaacaattgtgcgactgggaatgggaatgtccggactgcggacggcgggtgaaagggaatgctcgcatgctgaattacgcctaattacgtttatcaacaacaagtgcagtcacagttgccagacagttagcgtagcgcccatctacgcaatttcgcaaggtgtcttattatcaccaatttgttaaacacccctcgcggggcattctgttctcttggtccgaaagtgagaaattaccaatttcgagtggagatcaggggaagattgctaaggagcaaacgtaaatacctacaatattgctacgatctatttactttaaataacatttgacgcccactttatactgactaaatatttgttaagttattcggatcgaaccggtgcatctatacatttgacacctccgtctttaaattggggctttatttatttagagtaaatattttcaaagtgtctgataaattaaataaatatttttcgaatatttacatatatgataaatctctggcctatttatttggtttttaattttttctttaattgtatttatatattgcattgatacagatcacaaggccagttttaagtgaaaaaattagtgaaatatgaaagaatgttcacttttgctagatatcatgcaattatacaatccaaacaattttccatctggtgaaatcgcgcaagttctctcaactaacccagtgcccttagaaacaagtgattaaaaatcacaggaccaagcgatgttcgcatagttacagctctggcttatccgtaaaaacgcctcgtcatcactttacttagacttttggtcgacgttttcccattcccgcgaaaaacaatggaaattgctctgcaattaccgctactgataattacattgattagcaattagatatgacatatacatatgtatatgcaaagggaatgccccacagaccaagaacagttaatctcttcctccggcaacaagttctcttatttttaaaacatgatgtgccacaattataatatgaatatagccatttatgtatgcgatctcatattattattatgatgtaaatgtaaatcagctgttcaaatcatcacaacaaatctttaagagaagagcaccagtttcgagaaaaaaaggctgcttaaaatgttctcttttcacattttatgctttaaaacggaaaaagagaaaattcttcttcttttgctcttttttttttcaaaatcgaaaaataaaccgtttcgctcagagaattttcacccgattcgctcgctcggatcgctaattcacagatacattcacaggcacaactacagacgcagcgcacacaagtacggcgctgccagcaatcacttaaaatacaatgttaccgccgagttgaatattagtccttaaacgcgaagcaacaagtaagcatcgcatcgcatcgcatcgcatctgcactgcagcaagttgagatacagatactccggtttcgcgttcagttttctgttgttttacatcgaatacgaaaacgaaaggcgaaaagtgtgtgctcgaaaaacgaagccgacaagtgcccaaacagccttacccagtgaaagagccgggttttccgcgtggaaaacggtcgcacaaacgcaacctgcaacctgtgacctgtaacctgtaacctgtaacctgtagcccgtgacccctgcaacccaaacccaaccaatccgtgccggtcggtgcccagcactgaaaatcgaacgcaacgcaaagttccccgccgaaaaacaacaaacggaattacgaaaatgtaataaacgttaaacgtttaattataaacaaaaaatacggctcgaacttggagcagctttcaagattggcagcaattaacattaaagcgaaaacaaaataaaaatcacaaatggcacaaattcgaatccgaatccgaatgcgaatgcgagtccgagtccgagtcccgatcccatgtggaaaagtactgggagacattaaataacaattatgagatggctctgcttttgcccaatatcctactagccctggccaaaaccaaataccaattgcttcgcttatctgtaatctcagcccgcttggccagttgaccgaattgccagaaggctaaggtgttctgtaccaactacctgctgcttgtggccaacatctcgtggcccttttcgcacgatgttgccaccttgcagcagccatctccactccatctccacctccatttccattggtcagcgcttctccttctcgatctcccctcgttctgtgtttctcgcattcgtattcatgcttcccatgttgtcaagccaccagaacaactttcgttgattcccagccgatattgatccggcgatgatgtcataggtccctagggaatgcgactggcgttcggaatcggagtcggcattcgaagccaaagccaaaataccaaacagcaaacaccaaaaccctgggcgtatttctccgaattctcgcgtttaatcgccggcgtctatcgctgccccttcactttagtagtttaaaagtgcgtgtgcaacaggaaatacagcacattttatgctgaggaccgagcggcacacacattttccattgcatttccagcgggcgctgtgtttttattgtatctgctgtatttattttttgcgtgcaaacacttccgacattttaaatgcagcccagccagcgaaccggctaaataaatcaacatcagcagtagcaactgcaactgccctgctgcttttgctgctgctgttgctgctgttgctgttgccgctgctgctgttgctgttgctgctgctgttgctgatgtagcggcaacccgttcatctccgatgcatatgtatgtgtaaatgattttaatcagcgacaacagcagcagcattaataacaataaatgacaatcagcgatcatgccagtttgcatatggacttgtaaggaacgcgaacaacaaatttagacgtcagtccgcgacatcgacttcgactttgatcgttgattgctgtcaatctgttgcttaagccgatcggttatccaaattgcataagaagtggtgattaaaatcacatcggatgccgtcagcgctggaaaatcagatataaacgtattcctctcgatattttagatccaatcagatcccaatcaatcgcaacatctgcggccaagcaacttacaaactaggaacccaagctgtgctaacccaagtacttaagcgccagcaacagtacttaagcaaacattcgtttcgacattatacaataattagaaacccaaacaaacagccgacttctttctcttcgggaaaagcagaagccgaaacagatcaactaccagcagaaaggctccagcttcacatccagctccagctatgaagaagctgtcactaaatgtgagtatcaatctggtcgcgcctcaagaattgacatcaccactcgcatatatgtatgtgtgtacatatatgtgtgtatagtacttgaggcaaacaacgtgttgtcccaaccaaacaaagggcctcctgcccgggggggagtggctgggaggcgggagaagtgcacttttcaagttcagcaacggaacagaattccgaggggaacgctggcggtgggaccgtgtcatgttaatgaacttgaaaagaccaagatcatgagccagccgacggaggataagcagcatgacggagttgctttcctcacttccaagcgatgacgatcggtgttgaaatgaagtgcgcaatcggaggcaaaggcattgaggagaaacaccagcttccaagttgccaattgatggcagggagaatcgaatgcagatattcgggtcaattgacaacgcagagaatcaatagtacgatctcagaggatcatacaagactacctgggttttcagccacgatctaatctaatcataatccgaagtccggaaattgcctcatttgcttccgtctcatgacttagaaaccttgacgtctagtatatgcaactggacagattatacacagatgatagatctcacttacgttaatccctcactctttaaaattgaactttatttaaaatgcaatttacctccccaaccattcattggtcatcggtcaatggattgaccttcgcctttgcggattgccagagactgaagtgggtctaattgaattctgcaataaatcactgccacgcgccacctcagtcgcatcccgtacacaccactcaccatccgccatattccatattccatatagcacgtaccagatcggaatcggaggagatcctccgccgcaactctggctaattgaaaagcaattgtggcgcactcaactagcagagtgtgggtctccccggggttaatgtgtggcagaagatgcgaacgccacgggcagcgtccagatccagatacaaatgtatttcgcagatacgcgactttgatgttggcaactcaagagctccccaatcactggccatatatcatacagagtacaatatgtatttgcctccagcatgcttgccagtatgaaaaattgtacgtttgtgcggcgtaacatctgccaactgttcccgacttgtcgtttggcttattttccgcagttcaatgccccaaaaaaccctggtgctgccctttgattgcttatttatctgggctttggtgggtgagtagaagtagtatgcaatagtggctagtgtggcaacatcaagtcaaatccgtaactaatacaaaaatagctacagactagcttgccagagaaaagggaataccattgaaagagggcgcgctaaacttaattagtcagccccgtgcaagacgaggtgataacaaaaagcacttactctatatccacaacacctgcgcatccatctggcattgtcttatctcgtagatctttatcacaatgactcaacaatttccaaggaattcggagtacgaaagcccctataaatacaaattgtggtcgggaattactttttgatcatggccagcaattcacattgaaattggctgatgcaaccgcaagttttatggcttgtctgcaaataaaactaactttgccttttatggccgtgccccgctaactcccaattggtcgtaaaatgcacatgactctacatataattatcaatttatgctgaacgaatcaattggattgttattaataagcgattgttaaattattaatgggttcctatgccagcaggcaggcaacgaagtactgtaataagccatgaaactaacaacaaattgataaaacgccattaaaacttggcgatcaacaatgacaataataacaacaaaagcatcgctgcgaaataataaaaacaatgaaaacgggggcccgtcgaagctgaaaagttggagacccacgacgggttaccaaatgcgaatgcctgcgagtacgaacacgaatacgagtatgagtatgagtatgagcatgagtatgagtatgagtatgggtatgggtatgggtatgggtatgagtatgagtatgagtgcgaatacgagtacgagtatatgtctgcgatacaaatgttaatgattgattttgtgtcatgtaatcgagtcggggacctgggccgcaaactcgtttcagccatttagccaatttaattgacgtcaactggcccgatccgatctcctcgcgcacatttcttccgtccttggccgtacgacaattgcagttgcaatcgcagcaatagttgctgcagtggctcggagttgtaggtgaccttattagaccacgagaattggccaatggaaaaaccaagccgcacggcaccagcatgctgcccaaatggaatgtgaaaaaccttccaaaacacaaatcacgcgatttggacacacggcgagaaataaaagtagcctgttgcgcaagcagatgttatatcagcacgatcacctcaagtcagtggactcttttggcttaatattttggtatatgtaatatggcttaatcttattagccattcagtcgctacataagagctgatgcacttcttttctcgctgtgtgcatcaatccgtttggggcatttctcgaattcttggaatgcacgagcgattgtgttagctatatctgtatctgtaagtgtatctctatatgtatctgcacttattggttatggccagcttgggctgctatctgctgctccttccacggctttattcacacccgatcgatccatcgttcaatggccgttcattgtaattggttctttgatcgcgatagcctcttctttccgttctgcctgccgcagtttgacattcgcggcatggcaatgtgcacactcgtatttggcaaattctttaaacaaaatctcgaatataggtcgtcattttggaatatttcgaatactttggatgtgtttttgttctagtaattgctgccacgtttcggaaatatccaaatgttgatatcctcgaaatgtgtagttcacgggggattataaaattaggaggcgttatttcctataaatatatatgtatgtggttcaataaaactgtaattcaaagatgttaatccaatatgactgaaaacctgaaaggataatactactgattctttttaagtttcacccccagtcattcaatttagttaacattattcagacgggcaagcactttcacttctatattctatttcgcactcaagcaccttgatcgtgactgcatgatgaggcgtttacttttaatcagcttaagtgtcattcatgagtgaggattccgcgaaattcgcgaccgaaataaaccacacctcgccatcatcgccggtcggcgaggagatgcgatcccctcgggcgactccctccttttgggatcgggatacctgagactcggaggcggaggaggagctgcgtccggctgcggggcgtaatggccctatcgagagctcaacacccgctgggttacgcttcattaatccgattcacgcagccataacactcagatcgagtccgatttggaggggcaaaacttaattatgtgatttataagcctctcgattttcgattttcgcatttcgattttatttaaaacaaagcgctcggcggcgcagcagcagcagcagcagaaaaaaagtaaaaaaaaaaaaaaccaccgaaaattggcacaatcagcgaaaaggcgatcggtttcttttttctctcactctccgaatattttgcaaataatttcctcaatggacttgtttatttatacacaaatgcaaagcgtataagtaaacacttgccagagagaagcgtgtgacacgcttctgtgcgccgctgccccagcatctgcctcgcattcggcttcaagatacaaaatacaagatacaagatacaatatacaagatacacgactcgaattccgactcaaactttgactcaaagctggctgcaaagagcctcgctgcaaaacaacaacacatacatatgcatacgaaagccgcactgagtcgagtatgataatttggcatgcatttggaaaacgagctgaaaccagttcgccatgctaaattgttttgctttcaattaaactaataaaaagccaattgtcgtgtgtgagtgctgcgcctcgcgtatctgagtgtatgagtatctgactgtcgtagtatctgtgcgagtttgtcagtctgtttgtgccaaatggtcgcccaactggctggcaaaatcgcgcgacaacgtcagcaccacatacaacacacagcatatgcgatatactcacattgagatacaatgcacacgatgcacttctcgatcgcatgtgctgggtattgctattgctattacgttggatcggcagaatggaaatggtttcagagcttcagagctggcagattaattggcggagcaatgcaacgcggcgtatgagtgatgcggaatttgaaattccattggtattaagggtatttcagaaaatagaaatatttgtgaaattcccattccctgggaacaacttattaagtagtgcatgagtctggcacaagaactaggaattttaatctttttaataaaaaaaaacttgcgatataattacactatgatatagaaatagtcatatacatacatggaagctatgaacaattattggggggggggggtgtaatcaatttaaaaatagaagaaactaacgcctaactaactaatatatatttctatatacttttatagggttattctctattttatagcactgaaattagcttaatacacatctctcccgtaaacaaaatgcagctgcggctgtcactcggaatataaacaggtgtaagtttgtgattttacagaaattgcaattaataaaataccagtagttatagcttatgtgtcaatactagttagctaaactggctaattaggcaatagcgattacaactccccaggaaacccccaaatgtatgcaacgaattcctcaagatgccttaacaatcgagattataaggcgccataaaaacaacaaaacaactcggcgggccaatttattcaaagaacttgcggaaattacttcacttatgacaattaactcggccgcttagtcacttgtggctgaactctttttagccagatagaatcggctgagaaaattccactgcaaggtggaaaatttagttgcagccactcgtttttatggctgattaattcagggggggggggggtggtggcgtggaaaggcgcaacctgggtgaggcggggccaaactagtttagtaatggcgattagatattccatcggcgtgccaggacaagtgccgctctccactgattttttcttaacggcttttgctgtcttggccgcgtgttaagcatgcacatcacgtatacgcctgggtgttccactcgcgctctcaacgctgcgatctctcggatacagatactcgagcgctagccagatacagataccttttcgccagactcgctgtcgtcggctgtgcccggctgtgtgcgtgagtatctgtgtgggccgcctgataagccaagcggtagtagccgaagtagtcagccccaacagccaacagatcgcgcgcggtcttcagttttgttttggagctgccaacaaaagttgattgctcgcgcgtcgctcccgtttcgtgttccaccctttatttcgctttggctccacggttggagtatctcgtgctgtttgacgactcgcttgtgtcatcgctgtccaaacaccgcgattgtttgccccagtcttaagaaaaacgcgcggcaagcgggccaagtgcgccaagtgcggccaattgccttttggcagacgccgagatctgttgcgaaacggatcggccattcgccattaacctcaataatatcaattggatatccacacacttattcagatcacttggctccgatctctgagccatgccctcctcatcccgcgccggtcggcccgcggacggaagccatagaatcgctgcaatggcagcattcactgtgagtggggagaacgtaaagttgcgcgaaggggaaatcgttttggaaaagaagggattttgggggtgcaacgcaaagttttttaaacttatttcctcaaatttagatagttgaataacatcaataaactaataatctggtaatatttctggtaaatgcataatcatggaaaggcaagatacgcgtattgtttttctttttctatctaagctaagtgaaatagcagtcatgtgatgcagcgaagatttatttggatgacgtgcgatttgtgtctgcggaagatttaggaagcgttttcttcagtgcacactggcttcaaccggccaccaagacgcggtctcggttttccactgcgcctttcctgtttcgcagattcggtgcagatttcatgaatacatgaatattaatcgaatacaaacatcatgcaaattgggcccgggactgggactcctgcatgtccatcgaattagcagcagcagcgcttggagatccgcgcagacacagcaccgatgtgccagccagttcagcatgcgtacatatacgagtgctcagatgtagtggctggtaccaagcagtctcgtcatgagtgtttagtttatacacgctcctcggcgttcttctgccgccagtggtgttgtttttgcgtgtccaagcactttttagttgcgccgtaaaaaatagcgaggggcctgtgtttcatgtttgggctctcggctccgccatgcttgcgtagccaagcgttaagactcacagtggaggcaccagtggcactagtgcagatggaggtggtggtgccacacatcccagtcgggcatatctggcggggaatgcacagctttgtaggcaactttataatccacataatgcatggggatttcgacgataacacttccaacataccgcggcgattttacggggaactgataagagcgccttttctattaatagctcgtttcccattgtggatggaaatccgcccaaaggggtcgaccttgaaatgcggcttagcacgcatacacgtacctcataatatcacataataaactcaagaatcgcagtgtgccctttcgctataaaccatatagaccatatgccgcgccatccgaattccgcagcggccacaataattataaactattgcgcaaaaagaaggcatcgtccgtctgtccgtcataattggcataattatttttggctcatgacttcattcaatgtcgcctggcagcagcgcgacagtaaaacatcggcgaaaacagcaatcaaatctcagttgaatggtgtacaatcaagcggcaatcaacaacagcattagcgagatgccaattgggaatcgaggggcgtgcgtgcgccccgctccaatgaatcaggggtgtatatagcgtatatagcatatggagcacacggacacatagatagtcaaataatgggatggcttgtacgagtatgtgcgacgcgcttgcgactcgaattgaaattgatgcaaagcgccggccgacaaataaaatcaattggcagctaatcaaagtgaaatgcaaacaaattgccagcacatgtcgccggatcggaggagcagctatatgagcagcacttcagatcggagatcgatcaaatatgacgccgttcattggctccttcctgcgacgatgacgccattcgatcgatcggcccagtcgccccggatcatccattcaaccgctcctccaactttccctcgccttcttctgcgatactgaagccccttttcgcggtccatgttacattatcttcaacgcggttcgcatatcaattatggcactcacgccggcaaagagcgttaaaaatagccgcctgcagcgacgatgatgccataaatcgtgcaactcgaagccaattatcaccagatgctcagcccacagccagcagccaaatccaaatccgaatccgaatccgaatccatcggggaaatcgagccgagctgagtcgccgtacgcaagctgttgcactttgcactgaaacgtcgtcgggatctctgactaaacgagtgctacatgtgcattgagtgcaaagggttccccacccgaccacaacttgcactctttgtgcccaccactcgcaggtagggatagtagggttcatttgtctggagcttattctaccttccagcaagttgaagtcataatgttacaatagttggcgatagtacagcgagcaattgactatgacgacagatggatgtattactcttgatttatatatactttcgacactaagtactaaacaatgacgaccgatggcctgggatgagttatttatattcactacaaaaatatgtgattgcttaaaaacatttgttttgtcacacgagaccgcagtaattaagtatgacgacacatgagcgagcccttgatatcatcaaccaaaaatatatcaaataaagaccccttggtggagcatacttttaagcgagaagcctcacttatcgcgaatagtattcatagtattcatataaatatatgaatatttcggcgaccgactgatgaactttctcagaattccgattccaattggcagtccccccaaatgccccattccccttcccatacccatttccatttcggtgttttcccatctcgcggccataaatctgcgaaaaaatgtgctcaacttaattgaagacatcagcacggcaataaaaaatcaatttgcgcagatcctcagagtcgttcgctaaaacaatacgagtatattcgttagcgattatatgtgtttaaatcattatcggcacaaattcgctttcatgttgctgatactctcgaaattgctctcgaaatagccgacgtcgtcgtgtctgcctggttttcattcagcatttcaatttttcacccggggtcgaaggaatttcacacatgttcacacaaacggccaattggcacagcgcgcagtggaaaaatttgcgaaaagcgcgctgttaatcaaattattcaatagttcggaatgccacaaatgcgagtgcatagatatatatatatatatattcatatatatatcgctgtcatcgctgtaattcccggcgggcgcgcaaattgataaaatatgcaaagtaaacaaatgcccatgttttgggggcccgtccgcgtctgcgtccgttcgcaaattggctctcctttgagccgccaaagacgagggcggggcggggcggacttacatcataaattaagcccgccgacagatggcaaataatgcaataaacattgaaatcgccggtgctatttatagagcgctcctgcgataagatcgtctgcggcaccgactgcaactgttgccactattgcaattgcacctttgggtggagaatggcatgggcatggacatggggatggggatgggggccctatttttagccagtcggtagacggctgtcggacgaggtctatttatagggtctccgccgtcctcctgcccatccgcgatgcggatcgagcagcagatcgatgccacctgggcgagagctgcccttgcccctgtcctttggcggcggcgtggagctgggccgacatcgtgctgggttggcccacatctgcttggccagagaggtggtccgggcagttaattaatctgatcgcacctataaataggcatctattcttaaccgtgtttccggtttcccacacttttgcagatgtgttcccgcaacataaagatctcggtggtgctgtttcttgtcctgataccaatcttcgccgccttgccacacaaccacaatctgtcgaagcgcagcaacttcttcgacctggagtgcaagggcatcttcaacaagaccatgttcttccgactggaccgcatctgcgaggactgctaccagttgttccgcgagacgagtatacaccgattatgcaagtaagtttccctagggtcccacagccccagccatacgtacacatacatacatacaaatatctaacaaaaccacaaagcagcatcagtgttccttacagcgttcaaggcaaggccgtccaagaaacactaattatgatcttaagtgctggcagaccctgacacaaatacaattgtcggggtatcggaaaatgatcgcgggaccttcggttgtttctgaactttatgggcccgctttccccgctactttctcctcgactttctcgcacagagaccgctgcctatttggtttcttccatttggtctatatctctctctctctctttttgtttcaccctatagtcacttaaatattgtagtaataagtttatcaccttttcgtttgacttccctctgtgcgagtcctacatctgtgtttcttgtctattcgatgcagggccaattgtttcgtccacgagaccttcggggattgcctaaaggtgctgctgatcgacgatgaagagatatcgcagctgcagcactatctgaaagtgatcaacggatcaccctatccgtttcacaagcccatctaccactagactcctaacttcgaccactttcgtttccacttccgtttccgctttcgtttccgcaacgacttcattttcctgatttcttactgccttcagttacctttaccgttgtgtttcattttgattttcgttttcaattttaggaaagactgctttgattcaaaatggtttggcgaatgcctgaaagtgctgttaatacccgaagaggaaatatccaacctacagcactttctgagagtagtgaacggctcgcccatatccttcaacatggggccgcaaacataactctaagtccccgccccacacacccacagccccaacacaccatacaccatacagcacacaacaaacaacacacaccacacacagctgagaatcggtgcgaatatcgtgggttggaacgagcatccgcatccagatatagatccagatccagatcgagaaacagtcccactacgaccacacatgcagagccagaacacagaaatctaaaatattaaaacgcccaaatttaattcgtacttatttattactgtatgccttacagtttttactatatgtgtttttttaaaaacgaattatttttattaatttattgagaacgttatgcgtttgttgtaagtaacataattggggagtgggagatgggcgatgatgatgatcagatgatgatgatgatgatgtgcaggaggaggatcgcagatctcgcactccccacatatacatagaagccgaagtatttatttttaagtattcttagcttgttttattattattgcgttatgcggtttgtatataaaataaacaaaacgaaatccattgtttttaatctatgtaatgtaaaatgataacttttatttttgtatctgtattctactgtaaaatcagcatttagagtttacattttacacgattttccgcaagggcaaaactacaatgataaagataaacccatacgaacacacacatacacacatacacacatacacacacactcacacacacacatatatacaccgcaatcgagaccgaaagtattttgcaaatgtattacacttacaattttgtgctattttgtaaagatgaaaccctgaattagtgtaaatctgttggcgcaaaacggagatatgtatttacctatatagtatatagtatatgcatacctatctaaagctaaagccttacatatatccgaatacgagtaccctacacacatgctaaatattagagagaaacgcaagatcgcaatttgtgcaagacacaaacaaaaacctggtaaaaacacgcgaagaacggaacgactgcattacaaatgtggcaataaataatacataattaataaaaccctgtaaattaataaaggataatcaatcattcgctggctatttgagagcatcaaaattgtgataaatgagaattagaatgcgaatgcgcgacgcaggacaccgccagagaaagagaccgccatacagaaggcgacagagacagacagactgcagctggcgatttgcgcgcgtttctggcgcgactaaaaacgcctgcttaccgtttttgttttggtacgttataattttcttttgtttttaattaattatttgatttttgaccttgtgcattcttggcttttaactagcactcaagctaaaaatttgaccaactatgctttactttttgttaaattcctcaataatcctcgaactgttgagctcgtattttttgagcaaacaaacagaacaagattttgagaacaataatttttgtgatatattcaaccatacctgaatatggcttttgaactttggctcttttttcttctgagcaagctatacaccaaattaaaaaaaatcaggtttcctaattcctcctcctccttttgtttttgaacacaggcaagaatgcttcggatcgcccttcttcaacgcctgcatagaggctcttcagctgcacgaggagatggacaagtataacgaatggcgcgataccctgggtcgcaagtaaagtgcgattctctgggattttctggcaccgtcactggcacgagcagctacttaattctatgaactattaactaaaactattattattgataactgtggcagaacacggcacgaaactatggcaaccaggaaacgatcgacccgaggaatgtgtaccacttgaagaaacaactaagctaacatctagctacaagagaaagcagagcaaaaatgttgaaaaaaaaattatgaagacaattactaaactattacacgctacttatccgcacttatatcggaaagtctaaattggtctatatgttatttctatcatctgtcatgaaacagtctcgtggagcttttagttgtagtgaattacgtaaattatgcttatttcttttagttcttcgcgcagaaggaaagcaaaaagttatgccaagaatcaaatatgagaagaaacaaacaaaaaaaaaacaagcaaacaaaaaaacgaacgaacaaacgaacaagaatcaaaatgtctgatgtatataactatttttgtcttcttttaaagatttctatacatatttataacgcctaactgatttgtacatttcttttatttcgtaagcttaagttaatttgttacggcaataaattttacgttccacaccttcccacacatgctctcctgcaatagaacggaaatcacatctgagcaacaccacacggcataattcgattcgattctatgtagtattgcaatgccttacaattacataacttttaattaatttaaacttgtttggatctagtcgtaaaatataaataaagattgtatatttcaagaggaatcgacagcgaatttgattgcggtgcaaaactttattcaacgtacgataatatttcagtattaataattcacaagtgcaagcattttcgattcgattggactacagatagatcatggatcttgtgatggaatcagcccaggagaacatctcacttgagatgaatgaaatgccaagtgtcgactgcaa

SEQ ID NO: 31772 - DNA, 1293 bp, DROSOPHILA
atgatcgagatttgcgagtatatcccccgtgacccctgcaacccaaacccaaccaatccgtgccgccgacttctttctcttcgggaaaagcagaagccgaaacagatcaactaccagcagaaaggctccagcttcacatccagctccagctatgaagaagctgtcactaaatctgaaaagttggagacccacgacgggttaccaaatgcgaatgcctgcgagtacgaacacgaatacgagtatgagtatgagtatgagcatgagtatgagtatgagtatgggtatgggtatgggtatgggtatgagtatgagtatgagtgcgaatacgagtacgaaatggaaatggtttcagagcttcagagctggcagattaattggcggagcaatgcaacgcggcgtatgagtgatgcggaatttgaaattccattgcagcagcagcgcttggagatccgcgcagacacagcaccgatgtgccagccagttcagcatgcgtacatatacgagtgctcagatgtagtggctggtaccaagcagtctccgaggggcctgtgtttcatgtttgggctctcggctccgccatgcttgcgtagccaagcgttaagactcacagtggaggcaccagtggcactagtgcagatggaggtggtggtgccacacatcccagtcgggcatatctggcggggaatgcacagctttggtctccgccgtcctcctgcccatccgcgatgcggatcgagcagcagatcgatgccacctgggcgagagctgcccttgcccctgtcctttggcggcggcgtggagctgggccgacatcgtgctgggttggcccacatctgcttggccagagagatgtgttcccgcaacataaagatctcggtggtgctgtttcttgtcctgataccaatcttcgccgccttgccacacaaccacaatctgtcgaagcgcagcaacttcttcgacctggagtgcaagggcatcttcaacaagaccatgttcttccgactggaccgcatctgcgaggactgctaccagttgttccgcgagacgagtatacaccgattatgcaaggccaattgtttcgtccacgagaccttcggggattgcctaaaggtgctgctgatcgacgatgaagagatatcgcagctgcagcactatctgaaagtgatcaacggatcaccctatccgcaagaatgcttcggatcgcccttcttcaacgcctgcatagaggctcttcagctgcacgaggagatggacaagtataacgaatggcgcgataccctgggtcgcaagtaa

SEQ ID NO: 31773 - protein, 430 aa, DROSOPHILA
MIEICEYIPRDPCNPNPTNPCRRLLSLREKQKPKQINYQQKGSSFTSSSSYEEAVTKSEKLETHDGLPNANACEYEHEYEYEYEYEHEYEYEYGYGYGYGYEYEYECEYEYEMEMVSELQSWQINWRSNATRRMSDAEFEIPLQQQRLEIRADTAPMCQPVQHAYIYECSDVVAGTKQSPRGLCFMFGLSAPPCLRSQALRLTVEAPVALVQMEVVVPHIPVGHIWRGMHSFGLRRPPAHPRCGSSSRSMPPGRELPLPLSFGGGVELGRHRAGLAHICLAREMCSRNIKISVVLFLVLIPIFAALPHNHNLSKRSNFFDLECKGIFNKTMFFRLDRICEDCYQLFRETSIHRLCKANCFVHETFGDCLKVLLIDDEEISQLQHYLKVINGSPYPQECFGSPFFNACIEALQLHEEMDKYNEWRDTLGRK

SEQ ID NO: 31774 - DNA, 2843 bp, DROSOPHILA
cccaggaggagattctaaattcaacgtttccaaaatccaaaacactcaaagtgttaaaaaatcagatggttcccaggaggagattcggtcgcgcaggtgcgctgcggtagtcaacgattggtagagttggagccacttagttttaggatgccggagcagtcagaccagtctggtccagcggctgtttcttagattaagcctagcctaagttgcaaatgatgtgcagagattaccgggcaatggccggggtccatccccattgcccgctaatgtcgcagagatcttggtccacatccacattcggaaatggacacccatcgagctctgttccgcacagtcggtgttggactcgccccccctcctaagcgtgtttctacatccctgactaaccccattcccagaacaatctgtcgaactaacaacgaatgcagcagccgacgctcaggtgatatttgtactcgtatctacttaatgccttactatgaatgcactacgcgtaatttatttactcttcggatgaccaactgcccttctagtagaatttcctaaacactttcttgtcatcgatttacgtacttaattcccatgcggcaggagttctagcccttattataattcagccgtccggatcagccacctattatacatggtatatatataacatatatgaaggcagaagtgaacagttctcaaactaagctcagcatttgcaccgcttcaatcgagcattccgacgtccactgccaggatgcaaccagaatgctcctctggagccgtacaagccacgcgattcaattcatactgaagctcaatttagtgtagctctaagttaatattaatcaatgaacaataaactcaaactgaccctaatatctgaaagtgagtgacacttcctgtcgtggattacaacaccaagcggcacaatttcagtgtgatatgtcagtggagatatgatcgtagatacgtgagattcggattcaactactccgagttacttccaatggcgcctgccgtcctgtttcttgtgtttacctacctgatgggtgtgtcgaggggctccttgaactgccccactgggaagttgaacccgctgcagttccacctggttcgccagtgccaacgagctgcagctgatgaagctctggccctggaaaacacatcctctctgaaggaatgtgctgatctggcgcatgatatgcgtgggctggccttgaactacgctccaggaggaccgaaaaggaggctaaatgcatttgatcagaggtcctttggcaagcagggcgacaaggagcagcgcattcgaagtcgtttgagtgtcttcgaacagccaggggagttcttcaactgccacgtcctgaagtgtcctcagaataacacattttcagggatggtcaatgacagtcgcttcgattactacagcttatatggaaggccaacaggttaaatgaagtatctagcgtatctgtttggttgaataattttgtggttcttgctagtcgtaaggaactacagctgcataccggaggttgggctgttcgtggtgtatactcagcctagtgcctacttgaatgcctcactgacctgttcaaactcctcggagttcactggtagtctggcccacatcgcatccgaacacagaaccagtttattggcccaatggctagtggaattcaacaggaaatcacagtctctggcagaaggtaatgtctatctggcctatgtgggtttggcctacaacagctcaacgtcattgagcccactggacttcaggaactcccaaggggagagcttgcagtgctttctttacagagcctgggatggtggtcatcctcgagttgggtaggctgacagtttattaggttagccgccaatgctatcttctctaaatctaaccgaatttgcagtggtgatctgggcaacgccagctgcgtggccttgacgccgcagggaacctggcaaaccctgaactgcgaccgggagctgccctttatctgcgaaatccacacggcccggtcaactttcggctgggagcagtccagttccgagctggacatcggcccaaatgcagtcttcgagtgcggaagagaccgagtctgagtctatggcagcatggatattcgcagccgttttattcacttaagcagttttcaaaacacaaaagccaaatagatatagtttagtggtgattgcccgcctctcgcacgccttgtggaaagtgtagaatctgttgcagatgcaggaccaccgggcagcgccgcttagtggtacttgtagttcctgtggtgcttcaacttggtgtagttaatcagatagaagaacgtcatgctggcgacggtcagctggaagaagggagcgatcccggcgcgctttgggaacacgtacttgtgctgccagcgccaccaggcacggctcacagctccggccacagcgttgggggtcttgttgcggcgtcccagccaggcgccgatctcgcccagcttgacctggccgaagggcacatcggctgcggatcggagagagcggagaggtcggaaagttgtttaaattatgtaaaacgctgcacatttttgggcagtgcaaatgtgctctgtgcctgccgcaaaaattacgtaacctgctcacctttgccgtagaagcgagcggggtcgtagggcccgtgcaccttggggttgtactcagctggatagtcaccgaatgccatcgcgctggtttggttgagatatattcttaaatcggattcttatgaaacataaaattacgcctgctacttacttccttcgatactgacagtatgaccaaagcggcgagagctgggattttcatcgaccaatataccgaaatat

SEQ ID NO: 31775 - DNA, 786 bp, DROSOPHILA
atggcgcctgccgtcctgtttcttgtgtttacctacctgatgggtgtgtcgaggggctccttgaactgccccactgggaagttgaacccgctgcagttccacctggttcgccagtgccaacgagctgcagctgatgaagctctggccctggaaaacacatcctctctgaaggaatgtgctgatctggcgcatgatatgcgtgggctggccttgaactacgctccaggaggaccgaaaaggaggctaaatgcatttgatcagaggtcctttggcaagcagggcgacaaggagcagcgcattcgaagtcgtttgagtgtcttcgaacagccaggggagttcttcaactgccacgtcctgaagtgtcctcagaataacacattttcagggatggtcaatgacagtcgcttcgattactacagcttatatggaaggccaacagtcgtaaggaactacagctgcataccggaggttgggctgttcgtggtgtatactcagcctagtgcctacttgaatgcctcactgacctgttcaaactcctcggagttcactggtagtctggcccacatcgcatccgaacacagaaccagtttattggcccaatggctagtggaattcaacaggaaatcacagtctctggcagaaggtaatgtctatctggcctatgtgggtttggcctacaacagctcaacgtcattgagcccactggacttcaggaactcccaaggggagagcttgcagtgctttctttacagagcctgggatggtggtcatcctcgagttgggtag

SEQ ID NO: 31776 - protein, 261 aa, DROSOPHILA
MAPAVLFLVFTYLMGVSRGSLNCPTGKLNPLQFHLVRQCQRAAADEALALENTSSLKECADLAHDMRGLALNYAPGGPKRRLNAFDQRSFGKQGDKEQRIRSRLSVFEQPGEFFNCHVLKCPQNNTFSGMVNDSRFDYYSLYGRPTVVRNYSCIPEVGLFVVYTQPSAYLNASLTCSNSSEFTGSLAHIASEHRTSLLAQWLVEFNRKSQSLAEGNVYLAYVGLAYNSSTSLSPLDFRNSQGESLQCFLYRAWDGGHPRVG

SEQ ID NO: 31777 - DNA, 3525 bp, DROSOPHILA
gtgctggccgccttcttccagtactaccacttcgatggtaaccgcagctgtgcggagaagaactgcgaggtctttgaggagttttgcaatgatgccgtcatcgaggatgtgagtaggcgtgcggtgtaactaaacctctatattcggcgtgctctaccttaaacaggaccatgcaaaaagcctggtatgtaatttgctggggcgcaagaccccggagaaccagttgacctggtgccatgacgacgaggccaacttgctgcaggacgtagacctggtggtcctagcgtgagtatttgtgcaatcattgtccgtgtatttcaaaacccatttacactactaaagtgcttcgccggaggagtacaagcactatacaactctccttcgctcggagtacgccaatctcgacgatgccacctacaaggccatgcgcatcaaggtgctggagaccctgctgatgattccctccatctacgccactggagactaccacgacaagtacgaagagctagcccgcgccaacatacgcaacgagatcagcgagctgaagaagcagtaaatcagagttggaggaccaggatgtaacggggctgctttgtttactgctgttgagttgtgtacttactggccgttttacctcggttgactgcaaggcactcgtgtattggttgagcaaccttctctgccgaacatctacttaattttactcctaagtgaagtgtaatcaaaatcattttcctagttagtgtgtacgcctagatatatacgtaagccctgtaaactccagctcagaataaaattgatgtaaatgatgtaacagaaatgcagtttcactcaaagcacttaaagaatcaatgtatttgaaatcgcagtaagtaggaaaagtaaccgtagaaaaacttttccaaaactatgatcaagtcacaaatcaattaattacattccatttttccatttatagatcgcagcacaagaaacaggggcctccagctcaaacaccaaaatgcccaaacaagccgttaagcacaagggcttcaagaagatccgaggccctaagccaaaggtaagcaatcgaaatataaatatatttgtattatagtatgcgatactccacagaacggccagaaaagactgaagcgcaatgcgactcagaagaaggcacttaatcgagaaatggtatccaagttcctaaactccattaaaaaaaagtatgcactgcagaaaaatcatcacattaagcgcaggttggacttccgcagaagggaatcgccagaaaagaaaaacgccctgcccaagccgaagttctacaacccgaataaggtaatgcttttataggtaatatgtttcaacaatataacattctggtcaaccgaacatcagaatgacaacaaaaaagaagaaggagaaatcgtcacagagttggacagcagcgatgatgacgactgcgttttgctggatactccaaacgaatccattagcattctagatgacgaggatgacgagcccagcaccagtgaccagctactaaaacagatagttatggattgcaatggcgaggccgctttgcgtataacgcccaaaacggaaaacgcagttttgtactccactatcggaaaacagaattcttcagattccatcatcaacttggacgataccttcgaagcagtcccaagtctagttgttgacagcaacgactctgttatatatattgaagacactaccggagaagatttcatcccgataccatcgtactcgccgccgtttcgggaaggagagaagcagagaagggctaggcctgcgaaaacgcccaataagaagactgctcgaatgaatgacagcttcttcaccactgaagaaaagaagaagctcggagactataacaccaacacatttaatcccacggaggaagcaggagaggcgagtaataagccgaaaacgaataagaggtttgttatcatcgatggtagcaatgtcgcctttgcgtaagttctctgcttaaagctaactctagacggactatttatttcattttcatttgacagtcatggcaactcaaacgtgttttcatcagagggaataaagtattgcttgcagtattttgagaaaatgggtcacgaagttaaggctgtggttccaatgttccggaaaaacaacttcaagtcttcgaatcccgagcttctcgataagctgcacaaggaagggaagattgtgtttacgccgtgcaaaaacattcccggtcaaattacgtctagctacgatgatcggtgagctccttagaaaaaacttctatttagaaatggaaatgcataattttttttttcagtttcattttgcagctggcatacgaaaagaatgccgccgtggtttccaacgacaactacagagacctgattaatgaaaatcctgcatttaaattgatcgttgagaatcgagttcttggttactcctggtgcgacaacatattcattttacccaaggatccttacggccgctggggacctaccctcgacgaaattttgaggtgctaatgcacctagccatatatttgttttcaaattattctttagtttcgtgttatatcttaagttagtagttttcatttagtttggttgcgaattattcaactttcttttcctttacaattagcgttaagttggtcaatactgaagagttaatacgcagcgtttactcattttattagcatatagcatatagttttcgaccagaagggttttcatatgcctactattttaaaaatcttgcaaaattacgaagttcattatttacatataattttcgaccagaaaaattttttaatatgcactatacgtttatttatttatttactccaatggggtttataagttatgcaaaattaaagagttgccgaggagcaagatttatttacaaaggcaaagctgtacagtgtcttgtttagtgtataaataataatagatttactatttctcagaagtccaatgctttgttacaccactggtggttggccgttgaccaaaaatacggtggtggtggtggaagtggtggttgtggccacgttcgcctcgtaaaccggcggtggttcgttaattccaaccgccaaattgggattgctcgcttccaagctggtggctatggtcagtgtgctgtcctgctttcgctcgctaaaagcggcctcgtcgtagctgggcggcaaatccaaggtcttgggcaggacactaacttcgttctggctgtttgagcacacgtttccgactcctccggagccgccgttgcaattgttcgtcacattgatctccatttggcgacgggctgcgaaaaaagagatttaaatcgtagtggacaaggaaacctcagagaatctctttaaaaacggaagttagcaactatatcttttaaatatacgtctaaatcgctgcgttctgttaaccgatacctgctaatattggtattcctttatatatagcgtaacatgttctgttaaccgttaaatgttacccgcttttaaagcagaaaaagcaaccagccttc

SEQ ID NO: 31778 - DNA, 1232 bp, DROSOPHILA
atgcccaaacaagccgttaagcacaagggcttcaagaagatccgaggccctaagccaaagaacggccagaaaagactgaagcgcaatgcgactcagaagaaggcacttaatcgagaaatggtatccaagttcctaaactccattaaaaaaaagtatgcactgcagaaaaatcatcacattaagcgcaggttggacttccgcagaagggaatcgccagaaaagaaaaacgccctgcccaagccgaagttctacaacccgaataagaatgacaacaaaaaagaagaaggagaaatcgtcacagagttggacagcagcgatgatgacgactgcgttttgctggatactccaaacgaatccattagcattctagatgacgaggatgacgagcccagcaccagtgaccagctactaaaacagatagttatggattgcaatggcgaggccgctttgcgtataacgcccaaaacggaaaacgcagttttgtactccactatcggaaaacagaattcttcagattccatcatcaacttggacgataccttcgaagcagtcccaagtctagttgttgacagcaacgactctgttatatatattgaagacactaccggagaagatttcatcccgataccatcgtactcgccgccgtttcgggaaggagagaagcagagaagggctaggcctgcgaaaacgcccaataagaagactgctcgaatgaatgacagcttcttcaccactgaagaaaagaagaagctcggagactataacaccaacacatttaatcccacggaggaagcaggagaggcgagtaataagccgaaaacgaataagaggtttgttatcatcgatggtagcaatgtcgcctttgcaaaatgggtcacgaagttaaggctgtggttccaatgttccggaaaaacaacttcaagtcttcgaatcccgagcttctcgataagctgcacaaggaagggaagattgtgtttacgccgtgcaaaaacattcccggtcaaattacgtctagctacgatgatcgtttcattttgcagctggcatacgaaaagaatgccgccgtggtttccaacgacaactacagagacctgattaatgaaaatcctgcatttaaattgatcgttgagaatcgagttcttggttactcctggtgcgacaacatattcattttacccaaggatccttacggccgctggggacctaccctcgacgaaattttgaggtgctaa

SEQ ID NO: 31779 - protein, 364 aa, DROSOPHILA
MPKQAVKHKGFKKIRGPKPKNGQKRLKRNATQKKALNREMVSKFLNSIKKKYALQKNHHIKRRLDFRRRESPEKKNALPKPKFYNPNKNDNKKEEGEIVTELDSSDDDDCVLLDTPNESISILDDEDDEPSTSDQLLKQIVMDCNGEAALRITPKTENAVLYSTIGKQNSSDSIINLDDTFEAVPSLVVDSNDSVIYIEDTTGEDFIPIPSYSPPFREGEKQRRARPAKTPNKKTARMNDSFFTTEEKKKLGDYNTNTFNPTEEAGEASNKPKTNKRFVIIDGSNVAFAKWVTKLRLWFQCSGKTTSSLRIPSFSISCTRKGRLCLRRAKTFPVKLRLATMIVSFCSWHTKRMPPWFPTTTTET

SEQ ID NO: 31780 - DNA, 4263 bp, DROSOPHILA
gctattatctccctattattgtagccatttctctccttgttagaaagatattagtgaaagccgttcaatgataacaggaggagtattatggatcgaggtggcagagttcaatgcattgggtcacgccgagtaaaaggctttcagaacggcttagagtggagttattcacgttactaacggtacggtggataataaaagaagttcgataatggttgtgcggcagctcatgggtgaagtggtacttagctagtacaaagcaaatttcatcgaattccaaagttgagtgcattcttttaggcgcaactttcaaagatgcagtaagcaattgagtgttgcatacttactggcgcccaaattattgttgaaataccaaaatacctaccagaatggagttttgtgtgttacctcgtgtataacattgccaacatttaagacccacatcaacaaagtcagcagttagttcggattaaacataatgagtcagacttaacgccccagtttgtgctaatgcaccgcattcgattaattaacgaattgcacggcaaacgaacttacgcacctcgttcgggatcccaattaattgattgatgttgaatcggagccctttctctctttccctcctcgctaaacactttcacacacttaacacaggcaaatatggcgtgattatgggtttgactttgcgaaccatgcttttaattgaacgttatttaaattcgattgcaattagtttgatatgttgattcgattcgtttcgattcgattcgtttgtttgaacgtttcgttaccgaaactcggaattgagttgaaatcggttcgtaattgagcgaattggaatacggggatacggctcacgtttattgaccgtttgcgattttgcgactatttttcggtgtttacattgcatgcaatcaagccgacaattatcacccaattaattattcattttcacataattagtatgaataaggaatgtcctgactcggcttccaccgtaattctaccacacagctcgaccagcgtcgtccgatgactgaacggtgaaaaggttttaggtcccaataatcggcaaagaaaacttagaaatttttacctgttttgccatttacattaagcgagcagcgagtgaaaatgcaaaagaggcgcatggtgaatatagacagttggttgcccattttctttgcccgggggaaaagcacgtgctgctgaggcgggaaaactacagccggattcccccaactccggaaaaaataattttttataccgggtgtaagaaagtcattcttcagcattagcttgatttagtcagatagcttatgatgaggcaagcgcacatatgtaatatgcatatttgcagatatcaagtgaacagtgttatagaatatttgcgggcctggaaagatgctcagagatttaagccccctctagatgccaggttatgctgcacagcctggctaaaagctctttagttttcgtggaaatgacaaatatatctcataagaactaacgaccaatttcgcagttttgtttgtgttggcggcaggcgccttgagctttgcattaagtagactttgctttaaacttgcatcaacgccaagccagacaaagttttgccatcgctgaaagccgaaagcggagcgggctaaagttaagcaccacgatgacgggaattcgaggagggtcgtcatttctcctgcattttccccaacatattgtcagtgctcgcagcgggaggcgcccgtgacaacgacaacgaaaacgaaaacgacaacgacattgcctgggcgcatccgcggcagaagtgcatttcatggctaaaattcaatttgcctatgatttatgcattttgcgtcagattcgcacgccagtccggagaggatttcaaacttaaagtcagccacgatggccccagctcggctcctaaccggaaacatccgcaaaggtgcatctagtttggtggttacgatatcaccacgccaacttcctgtccctcgggttctttgtgtgcatttgtcgtcctttgttcggtgtatcaatgtcacatttggtcacaaatgactcgagcagaaaggcaactgcggttccttttggtgcgaccgccaaatgtattaccatcaaaggtaactaggcaagggaaaacctttaatagaggtgtatctatgaccatgtagtaatacatttaattttcgttgatatctgaactcaatgtgatgccgcacattcttctgcaattttcttcgctttattttgtatatcaatttacgagaatcagtagcaagggagtaagaaaaacacgacttaaggatactctgaccccgcagtcggaaagggattggatggtgagaagaatccagtccttgtagtacagaaagctgaggaacttcatggccttgccgcccgcgcatcccatgtgtccgccaatgagcccgaacagagcccccttgcacagcaggggtccgcccatgtccccggcgcagttcatgctttctcccacgggttccgtgcacacattgtggtccgcggtgaaggtgtcgtagtgcttctgacagagcgagggcggcctcaaaatcacgtccaggtagaccagttcattcgaatatgggccgtgctggggagagtggcattactccatggcgctgaaacagacatgggttggctcacctggtatatctgcccccagccaagtgtgatacatgtatcgccataggtcacgttagccgtcttgcgcataagcagcgggaggacatcgtggttggagctctggacgcgctcggagagccgtaggatggccagatcgttcttcttgtagcgctcgtactccggatggaccaccaggcgatccacgcttcggaagtctgattcgtcgtagaccgccagtcgtgttatgtgtccgaaaaccacgcgtatgccccgcggattcatcgaggccttgtaccggctgtggaggattgcttgattactcgaaacccagtatcatcggctgacaatcctgcaacttactccgtcaggcagtgggcggcggtcaggaccgcgcgactgctcacaaggacgccgctgcagaagtgattgtctcccctatgcctcacgtagttcttggtgcggatggagaccacgtggcgggacaggcggttgctcttcggcttgtagccgccggatatcagcatctcaaaggtttcatcgcttatgtcgccgatcacgccaagatcagcatcggatagcgatgtactcaagataagtcctaaaaacaccgtcagaatttgcatagcttttcgatttttaacattagaacaaaactattgaagtttagggaaatgtatatatgtattgtagagtgccagattcgtttcccagccaaattttgagaataagtctatttttctaaaatacttctatgctcctatcaaactgctgattaaggctgattaattgtgtggttcccaagtattcttcggcaatcatattcaaatgaattatactataatcgattaacgtgttaacatgggcactgagttatcacaaatcaaatttggatgttatgatattaaaaagatatatctacaatatataaaagattggaaatgagcattaaccaggtgtacactattatttggtcactgactagacgtcagttttggtagccaagattggtagacctcacacccgaaatttcgcagtctaggctcttttatccttgagcgactctattatccttagagctatagctggatactatcctgagcttatgttatactaccattctgtcctacgcatactataatgcacattcgccggacgtcaagggccattttggagcagccaaccgcaacagcaataacaggaccgtaaaataaacacttgccttttttccatgtgctccagaatttgtggcgaggcaaatatttagcagctgacactcgatgtgagtggcagctgaggatgccgggcagatgggtataatgcaattttcagcccccaacaaattaaattcaaattgcggagcgatgcaaatttaatgaaacgccagcggcaaacggcaacgcaaaggcaacatcgtcgacgatggccaaaaccagaggcggaaaaccgagaccagaaaccaaaaccgaaccgaacaacatgggacaggcgcaataaccaaaattaaagccgcactaatgagcagagacaatcccaaaagagtagcgcaaatgtgccaactaccgggtggccaaaaagtgggcgggatgaccgctttgggcgtggcagccgccagaattgtggcca

SEQ ID NO: 31781 - DNA, 867 bp, DROSOPHILA
atgcaaattctgacggtgtttttaggacttatcttgagtacatcgctatccgatgctgatcttggcgtgatcggcgacataagcgatgaaacctttgagatgctgatatccggcggctacaagccgaagagcaaccgcctgtcccgccacgtggtctccatccgcaccaagaactacgtgaggcataggggagacaatcacttctgcagcggcgtccttgtgagcagtcgcgcggtcctgaccgccgcccactgcctgacggaccggtacaaggcctcgatgaatccgcggggcatacgcgtggttttcggacacataacacgactggcggtctacgacgaatcagacttccgaagcgtggatcgcctggtggtccatccggagtacgagcgctacaagaagaacgatctggccatcctacggctctccgagcgcgtccagagctccaaccacgatgtcctcccgctgcttatgcgcaagacggctaacgtgacctatggcgatacatgtatcacacttggctgggggcagatataccagcacggcccatattcgaatgaactggtctacctggacgtgattttgaggccgccctcgctctgtcagaagcactacgacaccttcaccgcggaccacaatgtgtgcacggaacccgtgggagaaagcatgaactgcgccggggacatgggcggacccctgctgtgcaagggggctctgttcgggctcattggcggacacatgggatgcgcgggcggcaaggccatgaagttcctcagctttctgtactacaaggactggattcttctcaccatccaatccctttccgactgcgggtcatcggacgacgctggtcgagctgtgtggtag

SEQ ID NO: 31782 - protein, 288 aa, DROSOPHILA
MQILTVFLGLILSTSLSDADLGVIGDISDETFEMLISGGYKPKSNRLSRHVVSIRTKNYVRHRGDNHFCSGVLVSSRAVLTAAHCLTDRYKASMNPRGIRVVFGHITRLAVYDESDFRSVDRLVVHPEYERYKKNDLAILRLSERVQSSNHDVLPLLMRKTANVTYGDTCITLGWGQIYQHGPYSNELVYLDVILRPPSLCQKHYDTFTADHNVCTEPVGESMNCAGDMGGPLLCKGALFGLIGGHMGCAGGKAMKFLSFLYYKDWILLTIQSLSDCGSSDDAGRAVW

SEQ ID NO: 31783 - DNA, 2843 bp, DROSOPHILA
cactgagttatcacaaatcaaatttggatgttatgatattaaaaagatatatctacaatatataaaagattggaaatgagcattaaccaggtgtacactattatttggtcactgactagacgtcagttttggtagccaagattggtagacctcacacccgaaatttcgcagtctaggctcttttatccttgagcgactctattatccttagagctatagctggatactatcctgagcttatgttatactaccattctgtcctacgcatactataatgcacattcgccggacgtcaagggccattttggagcagccaaccgcaacagcaataacaggaccgtaaaataaacacttgccttttttccatgtgctccagaatttgtggcgaggcaaatatttagcagctgacactcgatgtgagtggcagctgaggatgccgggcagatgggtataatgcaattttcagcccccaacaaattaaattcaaattgcggagcgatgcaaatttaatgaaacgccagcggcaaacggcaacgcaaaggcaacatcgtcgacgatggccaaaaccagaggcggaaaaccgagaccagaaaccaaaaccgaaccgaacaacatgggacaggcgcaataaccaaaattaaagccgcactaatgagcagagacaatcccaaaagagtagcgcaaatgtgccaactaccgggtggccaaaaagtgggcgggatgaccgctttgggcgtggcagccgccagaattgtggccactggacgtggacgtggatgtggatgtggatgtggatgtatgcgaatgtgactgtgctggcatgcggatgcagatgcagttggcagtgtgttggccaagtgattttgggcaaagttaaagtggttttcacacagttgcgacaaaatgtgcatgaagtcacgttcccactcgtactgcaaaatgagctagtccctcgagtccgtgcccaagacgcatcccggagcttggctttaatcatgagctagttactgccggatttcgccggtgacggccttcgatgggtgatctcggtcaccggcatgaagccggagtcccccaagcagcgcaaggtaacgtagccagacggccacacagtcagccaggtgatggagccgtggttcaggttgaggcgcgtccaggcggccggaggaagctgcagggcccgcagaatcaggtaacggatcacattcgagtggcccacgatgagcaggtacgagtcgtgctcctgctccggactggccctgaagaagtagcgcctaaaggcggcctcgatccgcggaccatccctctgataggccaggtccaggctgcgggcactcctcttggaggggggatctcctgggtacggagtgccctccggcagcaaagtgcagcgcttcatcttcaggggatcgaggttcagctgcttcaggatgatcatggccgtctcctcggcacgcggcattgtagaggccaccacgtggtcccaggacaagcccatttcccgcaacctttgccccgtccgttccgcctgccgacggcccagttccgtgaggtggcttccattcggggtcctcgtgtactcgccatgtctcaccaggataatgtgtcgcagggcggaggactcctcgccatttgccaccttttgcagctgcggcttgtccaagtcccaatggtgccgccaggcgccactggccaaaggttcaatcgcccgccccttacccccttgtgctccacctgataacatggagggttccaggccatcgaacagccggatggcaaagtaggtgaccagggatccgcagctcatggcgcccaccgagcgccaaagggcggtgtatttcatggcagacgtgggattcagatttatcaaagtatatattcaaatcgtaccaaaatcgggctactacgatctaagcccaaactaaagttaaaagtcgttgcgaggtccattgttcaagaggtaaaaggaattgtacattgtgtttatacataaatatataaaggtgtattgtgtcctaaaattattctgaacgttaagtcccgttcatcactcaattaaaaccttttaaagagtataaattattggcttaattccattgcaatggcaatcaacttgactcctcagtgggttttgtcgcacttttaaaagtttattcagattcagattcgagttccccgttcttgattagcattcaaggcacgaggaaggagcttgaaagagttaagaaagtggactcctgaaaggttttggtcaacttttgtgtcaaagttgttttaccctcggcaggatactcgagaccaactttcgagcggcaaactttacgccctccacaatcgggcggccagagcccaagtgagttggcaaggtgatgctctggaaaacgcattcgaatgggaaatctcctgcaaatgagctccactttaagactgggcgctcggcgtttaatttctgccactcagacggaaaagggaaactgcctatcattggctaaaccactttgtccaagttcttgcctcatttaattccagagcccagtgccggggactgcgtcatggccacgaggaatgtgggcaccaacggcatatccacaagtggctgaccatgacgggctcagtctgttggccgtcggatttggcctaatgaagttgactgaaacttttgacgtgcctccgccatcgagggacgttctgaagttgagaagttgagtcgtgggcttgggttcaaccccatcgattggtgaccgcacggattgaaattaaacgagtttcacgaacagataagcctaatgccggattatatgtcctgaaaagaaagttctgtagtaggaggtgcttcatgtggc

SEQ ID NO: 31784 - DNA, 843 bp, DROSOPHILA
atgaaatacaccgccctttggcgctcggtgggcgccatgagctgcggatccctggtcacctactttgccatccggctgttcgatggcctggaaccctccatgttatcaggtggagcacaagggggtaaggggcgggcgattgaacctttggccagtggcgcctggcggcaccattgggacttggacaagccgcagctgcaaaaggtggcaaatggcgaggagtcctccgccctgcgacacattatcctggtgagacatggcgagtacacgaggaccccgaatggaagccacctcacggaactgggccgtcggcaggcggaacggacggggcaaaggttgcgggaaatgggcttgtcctgggaccacgtggtggcctctacaatgccgcgtgccgaggagacggccatgatcatcctgaagcagctgaacctcgatcccctgaagatgaagcgctgcactttgctgccggagggcactccgtacccaggagatcccccctccaagaggagtgcccgcagcctggacctggcctatcagagggatggtccgcggatcgaggccgcctttaggcgctacttcttcagggccagtccggagcaggagcacgactcgtacctgctcatcgtgggccactcgaatgtgatccgttacctgattctgcgggccctgcagcttcctccggccgcctggacgcgcctcaacctgaaccacggctccatcacctggctgactgtgtggccgtctggctacgttaccttgcgctgcttgggggactccggcttcatgccggtgaccgagatcacccatcgaaggccgtcaccggcgaaatccggcagtaactag

SEQ ID NO: 31785 - protein, 280 aa, DROSOPHILA
MKYTALWRSVGAMSCGSLVTYFAIRLFDGLEPSMLSGGAQGGKGRAIEPLASGAWRHHWDLDKPQLQKVANGEESSALRHIILVRHGEYTRTPNGSHLTELGRRQAERTGQRLREMGLSWDHVVASTMPRAEETAMIILKQLNLDPLKMKRCTLLPEGTPYPGDPPSKRSARSLDLAYQRDGPRIEAAFRRYFFRASPEQEHDSYLLIVGHSNVIRYLILRALQLPPAAWTRLNLNHGSITWLTVWPSGYVTLRCLGDSGFMPVTEITHRRPSPAKSGSN

SEQ ID NO: 31786 - DNA, 2312 bp, DROSOPHILA
aattggatggagcgccatttgctttacccgggtttttgcctaatttgattaacactaattggggttcatctaattgcggatggccagcatatcatgtgctgctgtggaacaggtccggtcttcaaatacgatttatggcgccaattaattgcgggagttatatgaaaatagcgcaaatagaagctttctctctgtaaatgtttagcgggatacaaaatgtttagtgcgatacaaagtacgcgagctaaattgaccaattaacaatattttggcgttatttcgaaatcaatatcggtgtgctaattcttgcataaagatttgcgatttgtattattctgtgcgatgaaccggaacccaaacaagacctcctgaatgccattcgcgtagcttttcccagctgggctgatgaaccagctagggaaaactgatggaaaactaatcgagaaacaaagggattaactagatctagtcttatttggcaagaaatcatgttactggctaccaaatccctgtaataactaccattgcgtcgaactgaaaattgttattattacaatattttcccacagaacagttgatttttccatgggattgatggagtaagaagtctcctgtaggaggtggtactggaacaaagagcattataatctcgatccttacttaaccatatagtaacagggcgatacataattaataaaatttctgatgatatttaccaaggggtgaagtcactttcgggccatctaaacattcgcagatatcagagaaaagtttgattacaaatcgctttcagattggaacttttcacattccctccacaaaggtgaaatatacattcgtagcgaactgtggcttgaagtcgaagatccaatcaagtagaagtaagtagtctccagacggaagtggaacgggaacatcaatgtgatggaagtcgcttagcatctgcaagccctgaaatatccaaatgcaacccgacgaaattgggctaaaatacgtcaaactacgatctcacctcatagggacaggtgtggttgaccgtggatacgttcttgatcatgttccaaacgattttagcgaacggctggttgcgccttcgcataaactcacaggcgtcgaaggtgtagtcgaacaaaaagggcttatacccattggccttcttcatcatcttcatgtgaaggtatatgtttttcgctggttctatgaatgtggcatttatgttcaggctggtcttggttcgggaataggccttcaggcgacagtagtgaacaaccacccacgatttgttgtacgacttgcacacagcattcgtcattttagcaaggggtgcctcctgggggaagctttcaagtatttataaaatatataatatgttattggatctcttacaccgcagaccagaaagccaagtattaccgaaacaacaaaagcggcccgcctacgattcatggctgtttaccactccgttgaaaactgacggtgtactggtaaataagcttcattaaatacaaattttagttgaaaccctattagcagatgtggtaaaaacgatgtatcatggagccattcgactggaaaattacgtaatggttatgtatgtacatcgaagatcattataccagttgcatatatacttctgttggacgcgtgtgaacttctgagtcctagaaaataaatctatactttccattttacaggatctacttccctttcaaaaaccaatgttctcgggaactgagttgtgaagtcagttagtatctgagtaaaagggtctcgatgcaatttttgttagttattcaaattctagtgtcgttacaattttcgtatttttgtgaatagcaaccgaatatcagttccgtaagacggggaactccttactgccccttctgtgcttcgagctcgtcggcagtaagtcctctataaatgtgaaatatacattcgtggcgaactgcgttttgccatcgaacaaccagtcgaccattagtagatagtccccagatggcagtggcacaggaatgtcgactttgtgaaagtcgctcagcatctgcaagccctgaaagatggaatgggttatgtccctaaatagcagtttgaggagacctcacctcatagggacaggtgtggttgatggtggacacgttccggatcatgtaccagatgatcttggccactggctggttgcgccttcgcatgaactcgcaggcgtcgaaggtgtagtcgaacaaaaaaggcttatacccattggcctttttcatcgtcttaaagtgaactgatatatttctggccggctccacgaacgtgacatttatattcaa

SEQ ID NO: 31787 - DNA, 312 bp, DROSOPHILA
atgacgaatgctgtgtgcaagtcgtacaacaaatcgtgggtggttgttcactactgtcgcctgaaggcctattcccgaaccaagaccagcctgaacataaatgccacattcatagaaccagcgaaaaacatataccttcacatgaagatgatgaagaaggccaatgggtataagccctttttgttcgactacaccttcgacgcctgtgagtttatgcgaaggcgcaaccagccgttcgctaaaatcgtttggaacatgatcaagaacgtatccacggtcaaccacacctgtccctatgaggtgagatcgtag

SEQ ID NO: 31788 - protein, 103 aa, DROSOPHILA
MTNAVCKSYNKSWVVVHYCRLKAYSRTKTSLNINATFIEPAKNIYLHMKMMKKANGYKPFLFDYTFDACEFMRRRNQPFAKIVWNMIKNVSTVNHTCPYEVRS

SEQ ID NO: 31789 - DNA, 2693 bp, DROSOPHILA
ctgtggcttgaagtcgaagatccaatcaagtagaagtaagtagtctccagacggaagtggaacgggaacatcaatgtgatggaagtcgcttagcatctgcaagccctgaaatatccaaatgcaacccgacgaaattgggctaaaatacgtcaaactacgatctcacctcatagggacaggtgtggttgaccgtggatacgttcttgatcatgttccaaacgattttagcgaacggctggttgcgccttcgcataaactcacaggcgtcgaaggtgtagtcgaacaaaaagggcttatacccattggccttcttcatcatcttcatgtgaaggtatatgtttttcgctggttctatgaatgtggcatttatgttcaggctggtcttggttcgggaataggccttcaggcgacagtagtgaacaaccacccacgatttgttgtacgacttgcacacagcattcgtcattttagcaaggggtgcctcctgggggaagctttcaagtatttataaaatatataatatgttattggatctcttacaccgcagaccagaaagccaagtattaccgaaacaacaaaagcggcccgcctacgattcatggctgtttaccactccgttgaaaactgacggtgtactggtaaataagcttcattaaatacaaattttagttgaaaccctattagcagatgtggtaaaaacgatgtatcatggagccattcgactggaaaattacgtaatggttatgtatgtacatcgaagatcattataccagttgcatatatacttctgttggacgcgtgtgaacttctgagtcctagaaaataaatctatactttccattttacaggatctacttccctttcaaaaaccaatgttctcgggaactgagttgtgaagtcagttagtatctgagtaaaagggtctcgatgcaatttttgttagttattcaaattctagtgtcgttacaattttcgtatttttgtgaatagcaaccgaatatcagttccgtaagacggggaactccttactgccccttctgtgcttcgagctcgtcggcagtaagtcctctataaatgtgaaatatacattcgtggcgaactgcgttttgccatcgaacaaccagtcgaccattagtagatagtccccagatggcagtggcacaggaatgtcgactttgtgaaagtcgctcagcatctgcaagccctgaaagatggaatgggttatgtccctaaatagcagtttgaggagacctcacctcatagggacaggtgtggttgatggtggacacgttccggatcatgtaccagatgatcttggccactggctggttgcgccttcgcatgaactcgcaggcgtcgaaggtgtagtcgaacaaaaaaggcttatacccattggcctttttcatcgtcttaaagtgaactgatatatttctggccggctccacgaacgtgacatttatattcaagctggtcttggctcgagaataggccttcaggcggcagtagtgaacaaccacccacgatttgttatacgatttgcacactgcatttgtcattttgagatagggcgcctcctgatggaatgtgtagctttaattgaaatgtaattaggtcctacaatccgatttcttactccgcagcttagataggccactaatagcgaaacggcgaaaatgaaaaccttgtgatccatggctcttggtcggtcgaccacccgtggataactgacgtaacctggctctttagcttgaatatgtgttctatttttgatcaaattgaattgatggttaagtggagaatgcgtttattacattatcattaaatatcgatttaaaacggttaataaatgtttcaataacaccaaatgcaaccagccaatacacttttagaggctggtactgatcgaaaactcgaaaccacttgacactcgaagtaagttaatattcctctaaataggtgaaatacaaattcgtagcaaactgcggccttaaatcgaatagccggaagtggaacatgaacttcaatgttatgaacgtcgcttaccacctgcaagccctaaaatatcgaaaaatattccgacaaactggataaagtgaccttcaattttcacttgaatcatccatctattctaatttgaacttggccattatttattctttgcgcgtaacccatgcagaaaataacaaaagtacctaggtaaatcgatatggaagcacagtagtccaggtgttgacatatattttgtttataagcgaagctttcctgttttctgaggagatcatacatacaacacccttgccgaatcaacaacattacgaactgatcctatattcatgttgccatagccaaaatgaatgtgtgcaagcccaaggaagtgggtcccgatggactttttgtccggaagcgctttacgcggcatccggtggtgatctcggccaagcggtttgcagccataaagggacgttctcgccaggatgagaagcatgcccaaatggaggccgtcgaggaggaacgcaggtatcggcagtacctgaaggacggcaacgagcttctttgcagcctgttcacagatcccaatgctccgaaggtcaagaaatcagctagggcgcagagcaaggaagccatggcagtggtaaaggatgtggacacaaagttggcggacgagcggctgcgcaagcaaaggatcttgcgag

SEQ ID NO: 31790 - DNA, 582 bp, DROSOPHILA
atggatcacaaggttttcattttcgccgtttcgctattagtggcctatctaagctgcggagaggcgccctatctcaaaatgacaaatgcagtgtgcaaatcgtataacaaatcgtgggtggttgttcactactgccgcctgaaggcctattctcgagccaagaccagcttgaatataaatgtcacgttcgtggagccggccagaaatatatcagttcactttaagacgatgaaaaaggccaatgggtataagccttttttgttcgactacaccttcgacgcctgcgagttcatgcgaaggcgcaaccagccagtggccaagatcatctggtacatgatccggaacgtgtccaccatcaaccacacctgtccctatgagggcttgcagatgctgagcgactttcacaaagtcgacattcctgtgccactgccatctggggactatctactaatggtcgactggttgttcgatggcaaaacgcagttcgccacgaatgtatatttcacatttatagaggacttactgccgacgagctcgaagcacagaaggggcagtaaggagttccccgtcttacggaactga

SEQ ID NO: 31791 - protein, 193 aa, DROSOPHILA
MDHKVFIFAVSLLVAYLSCGEAPYLKMTNAVCKSYNKSWVVVHYCRLKAYSRAKTSLNINVTFVEPARNISVHFKTMKKANGYKPFLFDYTFDACEFMRRRNQPVAKIIWYMIRNVSTINHTCPYEGLQMLSDFHKVDIPVPLPSGDYLLMVDWLFDGKTQFATNVYFTFIEDLLPTSSKHRRGSKEFPVLRN

SEQ ID NO: 31792 - DNA, 2777 bp, DROSOPHILA
cgatggggtctctagaaattactatgaataagtaatggcggatgcggacaacaggtggcaaagaatccacaaggtcccgccagagaaaaggaatccgagtccagccacattgccatctcgattgtaatgtaaaacaaaacgctcgcatcctgcgctttttcattttcccgcgttttccacccaccagacattctcattatacggtccgccagtttaaaactcaataaaagctgcagtatgaatgattacttaatgaaattaagtgtgaaaagtgcgagaaacagggtggtggcgccatggagaaaagcggaaaaggcgctcttctccactcgaaggaaaaaggcgtcgagtggcgtggaaaactgaaaatgaaagcgccagggcggcagtaaataataataaaggcatgacttattggagatgccagcggcaaaggatcgggaacaggaacagtaacaggacgcggctcctcctgcaaattcacgaatccctgcccacgcctcggctcaacgtaattcccattatcggcttagcaggttgtgccgccaagtggatttttattgcgaagtccagcgaacttaaggagcacgcacacagggatgaaatataatctaactcaacgtttggagtgtagatccttaatccttgtgcacttgatgccaattctcgagtagtagaggatcctaattatatttagaccgtgcaacagaactttccaaccattttctcgcagtgtctgacaacactaagcggatgaataggccgcttaaagctgcttcacttccgaactcccaggtgattaccactattaacggcaagtacgctttgcttttcgaatgactgcttgatatggccagcgtggaccgaatggtgtgaagtgtttagggcagagagagtgcacccatgtgttagtggtcgctggccatatcaacgcattggggaaactgtttaattgcaacaacagaccaaaccaacatttgtgtgctttgttcgtgtggagttaaaaattcgggacattccttagccaggagggcgacttgctgaccgaggattcgacctttattggcggggactctgctgattcgggcggcatcagggccttcttgtgcaactggaagccatagatactggaagtgcaagtgctttgtgtagaaaagaacaaggattatattcgaagaattactcaccgggggatgtacttctccacgggcggagagggtatcaagcttggcagctgcataaagaacatatgcgggaagctggtcccgaacatggctccgtccagcattccattgtggggtagcgggatgtagacgttgttacagctagggcaatagatcttaacttgggccttgtcccacacgtcgtgaaggcccactggcaggactttctgcctcttacaaaagactctcggacacgatccgaagtcccccctttcgtactttaatcgcatatcttcaatgccacgcggcgaaacgatgtaccgtgcatggatcatgccatacagcttcttctcttcggcgcagtcccagtcctcgttgtcgaactccggatctaagactacctccagtgtctggctatcgaactccaggcccgtcagattgaacttgtcctggatgtattcattgggcacccggcaggagaattcgtggcccttgattcccaggaaccaatcgatccaactgccatctggtatctcgatgctcctgctaaaagattttggtgtaatttgctatgatttttataggaaaaacctagttacttacggacacgacatgctcactcgaataaaatataatgaaaaagtacagtgcaaaatgacgagacctactatttcataatgacagacagctcagtgacaacaattcaaatgtcagggctgcgacagggcagcagtgttccaaaccctttatcgcccgaggactcgatgcccttcacaaagacctcaaactcgtcaaatcggcaaggctagccagaagcctggctttcttggaagcctaggccgcaaaacacgtctgtaatgaccagaacgtagtcctgatgctccagttgctcaaggggaaacgaagggtgcggtgctccactattgacatcattgatgctgccctgatgaacccttcaggcaggtcatacccttataacagcatacaccttaacccatgaaacccactttcggttgaagcacttgatttcaggaaatgagtgggactcaactttgaacggccaatatgacagcctggggagcccagtgtaggtggagcaggaaatcgcaaatggaactcacggcgaaaaaatcgacagtacttctgcaatgggaaaagacctgctttaatgtaaagatgccttcagaaaacaatgttctttacatcaggatcaaggagcattccttggcatctaggaatttattaacccaatcaagagaaaccatctcgattgacaaacattttctgcatgtgtgcgcgcactttcttatttttcctctacaaattcaattcgcattttcacttaaaactttttaacttggttggcctgaaaggagcgtacgcgtctacgccggagagggatataaagtaaacaaatacgccctggagacaaattaagtgatttgcccgctttacacatttttcctgctgattacttttctccaactccccggccgaaattgaattgcccagaaaaagagagcacgaccggttatcaacttttgattggtcatgaaaatggccaggggccatggcgaacagaatggatcagggtggccggccaaaactagggag

SEQ ID NO: 31793 - DNA, 660 bp, DROSOPHILA
atgtcgtgtcccaggagcatcgagataccagatggcagttggatcgattggttcctgggaatcaagggccacgaattctcctgccgggtgcccaatgaatacatccaggacaagttcaatctgacgggcctggagttcgatagccagacactggaggtagtcttagatccggagttcgacaacgaggactgggactgcgccgaagagaagaagctgtatggcatgatccatgcacggtacatcgtttcgccgcgtggcattgaagatatgcgattaaagtacgaaaggggggacttcggatcgtgtccgagagtcttttgtaagaggcagaaagtcctgccagtgggccttcacgacgtgtgggacaaggcccaagttaagatctattgccctagctgtaacaacgtctacatcccgctaccccacaatggaatgctggacggagccatgttcgggaccagcttcccgcatatgttctttatgcagctgccaagcttgataccctctccgcccgtggagaagtacatcccccgtatctatggcttccagttgcacaagaaggccctgatgccgcccgaatcagcagagtccccgccaataaaggtcgaatcctcggtcagcaagtcgccctcctggctaaggaatgtcccgaatttttaa

SEQ ID NO: 31794 - protein, 219 aa, DROSOPHILA
MSCPRSIEIPDGSWIDWFLGIKGHEFSCRVPNEYIQDKFNLTGLEFDSQTLEVVLDPEFDNEDWDCAEEKKLYGMIHARYIVSPRGIEDMRLKYERGDFGSCPRVFCKRQKVLPVGLHDVWDKAQVKIYCPSCNNVYIPLPHNGMLDGAMFGTSFPHMFFMQLPSLIPSPPVEKYIPRIYGFQLHKKALMPPESAESPPIKVESSVSKSPSWLRNVPNF

SEQ ID NO: 31795 - DNA, 3581 bp, DROSOPHILA
atgttgaaaataataaggctgtgaatactaaaaccgtatctgagaccgaattcttcggctttcgtaccgcttcaaataaaggaattgtgatttcggaaaatacgaaaatcaaagttgcacagttcatgagtgaatttcaagccgccgatgcaagcactgactcgaaccaaccaactgtgatctctgaggaatcgagaaatattgatgccaagttcgtagatgaagcggcggcagaagacagtgccaacaagccaactttttgcaatgtacaaagtctaaaaaatacctcagatattgagcatttcaaacacgacttcttcgtggagcattctgcaaaggaagagcatccgctgtgtagccagccattggtgaggacacccagaaggtcgcaggagatccactcctcactatcgcaacttgccggcaaatcaccactggaccaggccaccaagaagtccgtaatagctcgccggaacctcctgtcactaaaaagaaagcgaaagatcattttgtcaactgaaacttccacttcctgcgccttacccactatggagcgattcgctcccaagccttcctcgacaagtactccgctggccgacagggacttaaatcgctccaaggactgtacaaagaatagacaggatgcggaggacatgtcccctatttgcatgcaacccaaaaagagtcgaagacttggtctgagtcgaagtcgctattagtacacattaagtaagcgttgctttatacccaaaatatttaaaccgctggccgatttgaaatgggtagagatttagttgaattaattaaggtatgccattagtggtctcatcatgacagattgaataattgtataagttatcataataagcgttttttgttaagtgcaccttataaggaaataaacgatccgataagggccacccgctaaccaacttccttaaaggtgcccacttacgagttccgcgaaaaaaacgagaagagacgaaatcagtcccacagttcacaaaacaaatgcgaaaaagtagtagtccaggtcgaatgccttagccggcggctcatcatcgcgcatcaaggtatagattccctgatggatgagctcccggaaagtgtccgccttcattttgatgctgatcccgtgctcctgcaggcgcctcatgaactcactggtcatcgccaagtacggcagactgttggacacgcagtaggattcgagggtaaaacccacggcctggcgaatcatgttgaagcgcggcgtcttcagcaggtactgctgcatcaggatcagctccaggcggtcctcgtacaatatgtatatgtagctctgattgagcccatcccggtacgcctttagcagggtggcgttcaagctcaagctgttcctgcggagccgttcgggcaggaaggttttcgccttcatctgacttctgtagtactcgtcgtgcagactggggtagggagccctggccagatcctccagagtgttgtactcctcgtcgtacagcccggatgtgaggatgctggagagcgtggccaagtagacgttggtcagtataaagcctccgatcgttagaatgccatggatggccacgtccctccagccagcaactctgattttctggtggcagttgtataggatgtggctgaggctgtacagcaagcactttccaatctcgactcgtgctcctcgcgcagccagatgcagcattacggttccgtacaagacagtcgaaatcacgaccgcccaaagggtccagccgaagggcttggagtagtacagataactggaaatcggacgggcgtggggagccatgaagtactcgcggataatcgaaagtggtgctgtgtaggccacttccaagctgaaatctttgaagtagcaaacaatgtcgatcttttttgtatgtagcatttcagcaacggccaagtatacatcatattccggcagatcgggtatgggtacactctcgatggtggcgttatagcgataagtcagctccttgaccgctgtgaacaaatatcctgctcgcaccaagccaccctgttcgttggagtactcaaagtcccgaggagctaatgtgcttcgaagtatgcggacaggaaagccttgaaagtttcgaattatccttgcgcgatcgaaatactcggacacatttgataggctgatcggttgaatgctaggatacggtaggtagctgtagaggccctttccgctcatcagaattacatttacgaatccctccttgaagcagtaggtgtagaggtcctgtttcggaaatcctggttcctcattgctcaggaacactatgtgcagctcatggagctcgtccaacaagcgtggcagaagactggcaaccagtggattcagatctgaatccattacacttactatgataagggtactctctgtgaagtttccccgaattctaagatctctagcttccctcgagttggaggagagtaaaattctcggcgagtccaatttgtggagtatctctgaggtggcgcagcactcaaaatcgatgaacacattgagctccgtttggagagccaaattgagatcctggagtacttggacttgcatggattccgagtcagaagccccgaccaagcacagaagaactgacaccagcagaaaagaaatcattttaattaccataaggcagcgggaaaatgcttttataggctgcgtagaatgcccacatgacaaggcaaaaatattttcaggttgcatttaaaaggataatggattaattgccatccaccccatcaaaccaaagctcaagaagacaaatgtcatattactcttccattaacctagtgtatattagcaaataactcaagtcattttagctgtttgagttgcaggatgaagtagattccaaatcaaacagttttgaatttcccgcccactgaatggaaactttcaagcactggcagctccaccgatatatgcctccagttctggtcgctgtccagcactaccatatgtgcactttttattcccattccaattccagttggtaagaaaagtgtaattgttacgttgtggcagtgaaattgtatcataattcttttaccattccaaatcggagcatattagagtgttaagacccgcaaggtaacgacacttaattgccaaacgcccgcagatgagtttgtttacgccccctttgtggcaacaaaaacaaaaggggaaagttgtgtttacgttttctaaagccagataccgttttcggggtggttttggttcaatcggggagtttccaacggaaaggccttgtaattaagtgtgataagggccctcgctctcgctggcaattaaaactagacgtcttgtttcttctgataatcgtgtttttgagtcaaatacctacacaccaagcaatcgggtttacgtgtgtgtatacactaagtggggcggcattggggtggaccctttgcacagttgaatccctctgctcaactggcgttagctgtcaagtgtgtaagttatttgctcccagctgccccaaaattgaagctgtgctctgtgggacccaagtggcagaacaacatagtccagacatataggtaccagtaca

SEQ ID NO: 31796 - DNA, 1581 bp, DROSOPHILA
atgcaagtccaagtactccaggatctcaatttggctctccaaacggagctcaatgtgttcatcgattttgagtgctgcgccacctcagagatactccacaaattggactcgccgagaattttactctcctccaactcgagggaagctagagatcttagaattcggggaaacttcacagagagtacccttatcatagtaagtgtaatggattcagatctgaatccactggttgccagtcttctgccacgcttgttggacgagctccatgagctgcacatagtgttcctgagcaatgaggaaccaggatttccgaaacaggacctctacacctactgcttcaaggagggattcgtaaatgtaattctgatgagcggaaagggcctctacagctacctaccgtatcctagcattcaaccgatcagcctatcaaatgtgtccgagtatttcgatcgcgcaaggataattcgaaactttcaaggctttcctgtccgcatacttcgaagcacattagctcctcgggactttgagtactccaacgaacagggtggcttggtgcgagcaggatatttgttcacagcggtcaaggagctgacttatcgctataacgccaccatcgagagtgtacccatacccgatctgccggaatatgatgtatacttggccgttgctgaaatgctacatacaaaaaagatcgacattgtttgctacttcaaagatttcagcttggaagtggcctacacagcaccactttcgattatccgcgagtacttcatggctccccacgcccgtccgatttccagttatctgtactactccaagcccttcggctggaccctttgggcggtcgtgatttcgactgtcttgtacggaaccgtaatgctgcatctggctgcgcgaggagcacgagtcgagattggaaagtgcttgctgtacagcctcagccacatcctatacaactgccaccagaaaatcagagttgctggctggagggacgtggccatccatggcattctaacgatcggaggctttatactgaccaacgtctacttggccacgctctccagcatcctcacatccgggctgtacgacgaggagtacaacactctggaggatctggccagggctccctaccccagtctgcacgacgagtactacagaagtcagatgaaggcgaaaaccttcctgcccgaacggctccgcaggaacagcttgagcttgaacgccaccctgctaaaggcgtaccgggatgggctcaatcagagctacatatacatattgtacgaggaccgcctggagctgatcctgatgcagcagtacctgctgaagacgccgcgcttcaacatgattcgccaggccgtgggttttaccctcgaatcctactgcgtgtccaacagtctgccgtacttggcgatgaccagtgagttcatgaggcgcctgcaggagcacgggatcagcatcaaaatgaaggcggacactttccgggagctcatccatcagggaatctataccttgatgcgcgatgatgagccgccggctaaggcattcgacctggactactactttttcgcatttgttttgtga

SEQ ID NO: 31797 - protein, 526 aa, DROSOPHILA
MQVQVLQDLNLALQTELNVFIDFECCATSEILHKLDSPRILLSSNSREARDLRIRGNFTESTLIIVSVMDSDLNPLVASLLPRLLDELHELHIVFLSNEEPGFPKQDLYTYCFKEGFVNVILMSGKGLYSYLPYPSIQPISLSNVSEYFDRARIIRNFQGFPVRILRSTLAPRDFEYSNEQGGLVRAGYLFTAVKELTYRYNATIESVPIPDLPEYDVYLAVAEMLHTKKIDIVCYFKDFSLEVAYTAPLSIIREYFMAPHARPISSYLYYSKPFGWTLWAVVISTVLYGTVMLHLAARGARVEIGKCLLYSLSHILYNCHQKIRVAGWRDVAIHGILTIGGFILTNVYLATLSSILTSGLYDEEYNTLEDLARAPYPSLHDEYYRSQMKAKTFLPERLRRNSLSLNATLLKAYRDGLNQSYIYILYEDRLELILMQQYLLKTPRFNMIRQAVGFTLESYCVSNSLPYLAMTSEFMRRLQEHGISIKMKADTFRELIHQGIYTLMRDDEPPAKAFDLDYYFFAFVL

SEQ ID NO: 31798 - DNA, 2544 bp, DROSOPHILA
ttttcgcatgcatggtgacgggacgaccttgggagacggtgatgcagggcctgaccaaagtcaaatattccaaagaagaggtaagttcgtgccggaaattcttctcttcaattactcgtagtatatgctttgattctgcagaagaacacgctgcaaaacaacacgtccctggtgctgccgcacatttccgacgtattggagcaggtggaccgtcagatgctgctcattctgaagacaaatgacttgatccgcggaattgagtccacgctgcgcacgcagaaccggatgaccgccttctgggttatgtccaagtgctgtgttcaatcttcgtacgctgaacagcgagccaagcagtctgattccggatcctcgcgaatcctgtggctgcgggtgcgcgagcgatgggagcttttcaagctcaactgctactacctctacctgggactgattaattttggtttccttgaagctctcaagcaggttatttagactaaacggtgtcccccaattaaaagtacaaaactcttcacgaggaaagggaaattacctcgttgtctctgctgggccagattccgcacattggtctctcgcttgcgtttggcgctcttcggggagagagtgaatcattagcaggagcaggtagtgtcccattccgaatgggcttaccataatcatggccagaggaaaggcgatgacgaagaggaagaccagcacaatgtaaatgacatagctgggataaaataacatgtatggaccatcgtagccgccaccgttgatccaaattgtgacggaagtggtgttaacgtattcccaatccgatgtcgtactttcagtggtgttaagtgttccgttggccaccgtggtggagtcaaaaggggtgctgaccgtcgcgtttatggcaggggccatgttgaactcgggtgttaattcctgattggaactgaaaaatgtctcgaagacagcagttctctgacgaacagacagagccgactaacctgaactactggccaccgaattgataggacatccgggcatgggtcagactcggggctgacagcgaagaacgcacatatttgctttgtaatcattagctgataaggcgacaaaaccagtgtcgagccagggctttgttttttgttcgcattcgcaatttatctaatgaggcgatatgataaatgtgcgcaaatagatatatgttcgaacgcacgcatacgtatatatatatatatatatgtatattaatgtcgcccttgatttatggcggccgggaactcttgctctccctcatctcgagaacgagttcagtggcccaaccacgacaaatatttatgtttgccctcctcaaatgcctgaagaactcaccttgttcctgcttcgggcgcaacgacatcgagtacgagcgacaggcaatcagaagcacctggaagacgacactgggcagtgcgggataaacagacggctctgaggagaatactcactcgcaggagaaagagcaggaagctgaaggcgcacaggaccaggagcacgacgcccagattatccatttcggttaaatgacccgcaagatgacccacagaatgagtttttttggccaaaaacggaatccgcgattcactctaaggccccgggcacatgtcaaagcgataagatatgtaagatatggcgagtgggccgaactctgattacattttaagcagttgatggactttttaccacctttgtctccggccgcaggggatcccttccagactaatgagcgaactgggcccactggcagccgctctccaaatggccaactcccggagtgagcagccccagttatctcggccagattgcatttatgtttgtgccggctgttatctcctcgggattctgtccgccagtcacttgttaacggctaattgaagctaatctcatggttgttgcgtttgtgcatcctcgaattgcggccaaggaacgaccctcgaccctcgaccctcgaccctcgaccctggccctctagcccctatccaaacaccaacccgtggcatgcaaacaattcgcagacacgcgtcttcttttccaacacaaatatatattttcaatgtttctctttgatttgaaatcaatgaacgaacgaaaagcatcacactaaaattcttacatacttaagcactaacaacatagaccctttacacagattagggataaatatttcattgaattttcaagtagttgtgttttcagattacgagctgcataatcccaatgaattcgatttggcttacactcattgcaactcgataacattcatatttgaatatgagattggttggcacacttcgctttgggttttcattgtttttccatatgtggtttatgttcactgataatcgccatcgccggaacacttctggttttcaattgagcttccgctgcttcggaattggattgaattgaaattgcaattcccaattaatttatttgcgatttgttgaccagttcgtcacgctcgccaactatccacgtttgcacaatgccactagacacacacacccacacaca

SEQ ID NO: 31799 - DNA, 174 bp, DROSOPHILA
atggataatctgggcgtcgtgctcctggtcctgtgcgccttcagcttcctgctctttctcctgcgagtgcttctgattgcctgtcgctcgtactcgatgtcgttgcgcccgaagcaggaacaagccccgagtctgacccatgcccggatgtcctatcaattcggtggccagtag

SEQ ID NO: 31800 - protein, 57 aa, DROSOPHILA
MDNLGVVLLVLCAFSFLLFLLRVLLIACRSYSMSLRPKQEQAPSLTHARMSYQFGGQ

SEQ ID NO: 31801 - DNA, 6416 bp, DROSOPHILA
agcttccgaatctcctggctccccaaacctcgaaacaccgccattcatttgttgccagcaatcgtccatgcaaacagcgaaacttgactaaatgcaataaactgaccagtgccaggccattttgccactgttgcggtccggattctggaactcatcccgatccccctgcaattcgcttgccaactcagcagcatttttgtaccccgcattcattgggttcaaggatggagcggtcctcaaaagtactaatgatttgtggatccataagaactggggcagttgaacttggtacgagtgtatgcgcttatatgtcgcttcaaagacagaaattactggattcaaattaagtagttttgagatctaaggcggaaattatctcacggtctaaggtataaggtacgaatggggtatctctaagtcgagagcctttttgttgcgtttccgtagaataaaatgcaatttgctcatttttgcataagccccaatttcggtttcactctcgctgccaggaaacgaatgagaaattgctgtagcaatctgcgagtccgcagtggatttcggacagatcccgaatcccagatcccggtgaggaggtactgccggcgacaggtaaaatcaaatcggcttgccaacgggctctggctgatatacggggatatggggatatggttgtcatacagcgctccggaattcacgaaatgccccacaaacaacacacgtagttgtgcaacacgccggacacctacctggatttacgtgaaaggacgctcggctccggcggcggaatctagcagactcaaatcgttgaatgtttcacagttttgcagcacctggctgcaagtggcgttaattaaatcaaaatcgatggccacccgatggcccagggattccgattgcgggggcatatgtacggccggggagtccaccttgtgcgcaaggtgggaactcgcccccagcgggcagcagggcatccggggcacatcctggtgccgggctgctgtcatcgccgcctgcagctcctccgcaccgcagtcgaactcgtcgtactcgtcgtccatcagcgattgctctgagtagctctcatcgtcgtcgtcgcagtcaaagtagccgctctgtgggggaatggttggttggttaactttcgagattgagctcttgattggccgggaagaggggagtcatcattgcggatatgccgaacaaggcaggcgtacttatgaaaacctgatttcaattcatctctattaagttattaaagcttagctagcaaaccaataagactacaggtattgtatattcatcagtaagcgtatcgagacctaatgaatcatacccaaatcaggtgctgtttgccccttctaccgtcgactccccactcccacagttactcacctggcagtccaggcatcggcaattatcacagaggctgcaactcaggcccaaaatgtcggctgcctcctggtagagctcggaactcgatttcgcctgctgttgtagttgctggtggctggccagcgacgtgctggtgtcctcattatgcatgctccagttggtcggtttgttcggctgccccccacttccacatccacttccactgccacttccagtgccacttccagcctcccgactgttgctctgatttttcaagttgccgccgttgttgttgccgctcggggtggatggctccgcctcattgctgtcgagcatgttaaatgaaagtttatttagcgtttggttgactaaactaaacgcgtatcaaatggctgcaagtggcgtggaaggactcgcagcgattagcaaggacgagcatgatccccataaaaattgatataaagtgggaaataagcagctacggacatggttatggtaattgacgtttacaggaaaattaaggctctatcgtactggaaaaatataaacagtgcgttagctcaacagaaatcataaaatggttttcacctaacaaaaatatcctgtagctattttttggttgatttaaaatcagtatcaacaatatatattcatattaataatacacattggtgtgttatgaaaacaaaatagttaaaatgttgttggcggaaaccaaaagatatgaaaagaagcatcacaaaagcgtttgaatccgagcgataacaaaggcaaatcgatcgataaaagcgataattcaccacgtctgcaacacttcgccgcccgcaaaagaacttaaaattgaaacacaatgattcccatttaatttgcggcgacaatcggactgggaaatgggcgccaccaacatttgcagccagtgtccacaatgaattaagccaccttcggggagcctttaagccgcatcagcggaaaagcgggctgcgcaaggccgcgaaaagcggtgggaaaaatgcaaaagcgaataactttgcacaacaaatttccgcagttacttggcgacacgagttgggagttattcctgtcagtttgctggtgtcgccatccacaaagttgatgaatgcgcgccggagagtttccgccgtggaaatgcctaagaatgaagaggacgaagggctttgcatttttcccggctggcgtttactaattaaatgagcacagggcactaataaatcaaagcgaagccgcccttttcgcccggtgcaattaatgaaattttcccagccgcctttgccagtgaaaatgttcagtgagcgagcgaacttctgacatcattattgcaaaatggataggtggggagggggcccccaaaaaacagtgcatatgagtgatgtctggggacgggtgtagctcgtaacatctatgtgagtgcaacttgggcgccaagtttcgctgaatgtgattattgcacttcaatatgtgcctttatgggctgggcggcatcggcgttttaatcaacttcttaagccctctttaagcgccgatgctttcgcctcactttatgtttacggcgaccgcgttaatttttcaatttcgcaaatgactgctgggcggaaaatggggtggaaaatgcgggaagtaactttgctcggcgatgatgatcagaacttatgacttcgtgaacaacgccacaaagtttctccgctgcaacaaagtgtccgctgacagataattgaaagcgcttagaagccgcagtccggacaagaaaggcgcatttggccactaggtggccaccgtagaaaccaaggggagtgaccaatcgatatctggaataatggcctcgatgggttcggttcagcgattcactcggctataaatggcaactaacgccgattgctgctcttcaataattaattatgaaattatgaaataatcgcatgccggacgagaaggaatttgacggtcctcagtcaacttaatgagaaaccacttcggcatggcaactaggaccgcggaaccagccagcacttgtcccccggattgccgtcataaaacttgccacagtttgcagcgcgttgcacgacgccctataacatttatgggaatttataagtttttgcgacggctaggagattgccacactgactcaaacgcacatactcgccccaagtgcactcgaaaaaataagttaatatataactggtatcaaataaattgaaaggaatatcaaaaattccgctactcacaggaatatgcaagtgaacaaaattatatatacaaaattattatattatattgtcttgagctcaggtgcgttcgaatttctccgagtgtctgggtgttacatacctgatggcaccagcatcttccggaactgccgcgttgctgcgccatttttcttcttcgagatatttgagaaactttgtcttcttggcaataagcgctgatttgacattggtgcatttcttctttgggagcagagggaggccacctgctcctccgcctccggctggcgaggtaaccgctcccgccgcgccatcgaggcattcgccactccggctccgattccgggcgccttggaggcccactccgcctgccgccgacaggcagctattgttatggttgctggcggcggcattgttgttgctgccactgatgtggatgtggctgctgctgatgctgctgctgccttggttggtgtggttgctgtgggcgtgggtgacattttggcaggcgacgccgacgctgcaattgaacagtttttgcagggccgccgttgccgccgttgccggtgaacacattgcggttgacattgatgtagcgacaggatttacgtagtttgctgcgcctcccgctgctgcatccatggctggtggcgctgcagctgccgcggctgctgctgttgctgcggcactgccgaaagttttgaatttatgctgcaggacgccactcgagcaagtcgacccaattggatttgctgctctgctccggctgccatttatttcacgctttgttgccgcatatgtgccatagtcctgccaagatggtggagagatgcgaagcagagagtgccgaaagaagggcgaaagaggctcagatagatgtgcaagtggactcgcagactggcaggactcaccccataggaaccgtagctggcattcagcacatagatcgagttttgattgctgcactggaagaccatgtcgtccatcgtctgggctgcacagacaacagaaaagggttgtgatttacttcaattgaatggcgaatcgaatcaattttaaatatttcatcttaagtgctttaaatcaagagtagagtattatttaagagtatcttatctgtctgactcccctgaagcaaatacatgattataaggataagggtagcacggcatttaggctactgaaacagatttggagtgataggaaaccgtatgaatgacccatggaaatccctaccccagccgagtcgaaaatattgcttaacaaaattatgcaaattgaactttggaatcaaacagcagacggcgtttctgtttcaactctccgcaatcgaaaagggaaaatccccgggaaaagcgcacacgaggggcggaaaaaggcgaaaatttaatttaaattcttattgctgcctgctgattgtgattgtttctgggagggagtggttgcttacccattgagcattcaataaacttggtttcgtagatttccccggcccgtgccgaggaaggtgtttttgactggtggagcggcgctggaacgccggcttgacggatcctgtccagctcctggtggcaatcaaagctacaattaccgccgacgtgcacgtccaactgaagcggaaacttatgcggctgctggagcgtgtaaacgttgactgcgcgcttctcgtggcctccgcctccgattccgaatccttcgccggtgttccgcttggtcctcccgctggtcttcccggagctgagccagctcgttagccacagggattggatgtctgcgggattgagaaggagagaatatgaggcacaggcataagcaaatttcattcaaaagtgctcagttcacgcattcggtttattgttgcgaagcttctcgggcaaatgcgaaatggttaactcggcctggccaagcatgataaaatttcgtttgaaaggcaagttcattgaaataaacagaccccagcccagccgcccactaactttcgccggcaaacacgcaaaataatcaaaataatcctttttttgttggcccggctccggctcagttacgccatccgggtttcacagacccttctattgttggcttagagagattgctcgacttagtccggcagaaatgccgacaattacgcatcgcacactcaatgtaatcgccgttgccacgacaattgccgaacggaaagtcatggttctgaaatcctcgaaattgagagcgaacaataagtgaaatggatgtatgatattcacgcaggttacaacctcttttttttgccaaaaactcagtattttcgccaaaaaaaccgattctatgatccaaattcagaatggtgtactttgatcaactcgtaattacatttctaatcgatctgcgttcaaatttgaaacttttaatttttttcaatttttttcaaattttaatgatgttaccccttataaaaaattcgaaaattggtcaaaaattcatttttgaaaatccaacggattgtgatagtgaactttagtttggacctttagcagtgcaaaaaactcattctaaaaggattttgatacttttttgataatttttgaggatagacctttttgtaaaagtggtatttttgccatattggcaaaaattgttcgaccaaatccgtattttggcaaaaacaatcgtagtccgatttctaatttaaatttcaatgctatttatgccagatgaagaataattataatccgttagcaataaagctgcaatttactatgcggctattattgaaggtttaatcgttattcgttcagcaaaaacaattaataaacaacaggcattaagtttccacaattattgttt

SEQ ID NO: 31802 - DNA, 1558 bp, DROSOPHILA
atgaaatttgcttatgcctgtgcctcatattctctccttctcaatcccgcagacatccaatccctgtggctaacgagctggctcagctccgggaagaccagcgggaggaccaagcggaacaccggcgaaggattcggaatcggaggcggaggccacgagaagcgcgcagtcaacgtttacacgctccagcagccgcataagtttccgcttcagttggacgtgcacgtcggcggtaattgtagctttgattgccaccaggagctggacaggatccgtcaagccggcgttccagcgccgctccaccagtcaaaaacaccttcctcggcacgggccggggaaatctacgaaaccaagtttattgaatgctcaatggcccagacgatggacgacatggtcttccagtgcagcaatcaaaactcgatctatgtgctgaatgccagctacggttcctatggggactatggcacatatgcggcaacaaagcgtgaaataaatggcagccggagcagagcagcaaatccaattgggtcgacttgctcgagtggcgtcctgcagcataaattcaaaactttcggcagtgccgcagcaacagcagcagccgcggcagctgcagcgccaccagccatggatgcagcagcgggaggcgcagcaaactacgtaaatcctgtcgctacatcaatgtcaaccgcaatgtgttcaccggcaacggcggcaacggcggccctgcaaaaactgttcaattgcagcgtcggcgtcgcctgccaaaatgtcacccacgcccacagcaaccacaccaaccaaggcagcagcagcatcagcagcagccacatccacatcagtggcagcaacaacaatgccgccgccagcaaccataacaatagctgcctgtcggcggcaggcggagtgggcctccaaggcgcccggaatcggagccggagtggcgaatgcctcgatggcgcggcgggagcggttacctcgccagccggaggcggaggagcaggtggcctccctctgctcccaaagaagaaatgcaccaatgtcaaatcagcgcttattgccaagaagacaaagtttctcaaatatctcgaagaagaaaaatggcgcagcaacgcggcagttccggaagatgctggtgccatcagcaatgaggcggagccatccaccccgagcggcaacaacaacggcggcaacttgaaaaatcagagcaacagtcgggaggctggaagtggcactggaagtggcagtggaagtggatgtggaagtggggggcagccgaacaaaccgaccaactggagcatgcataatgaggacaccagcacgtcgctggccagccaccagcaactacaacagcaggcgaaatcgagttccgagctctaccaggaggcagccgacattttgggcctgagttgcagcctctgtgataattgccgatgcctggactgccagagcggctactttgactgcgacgacgacgatgagagctactcagagcaatcgctgatggacgacgagtacgacgagttcgactgcggtgcggaggagctgcaggcggcgatga

SEQ ID NO: 31803 - protein, 519 aa, DROSOPHILA
MKFAYACASYSLLLNPADIQSLWLTSWLSSGKTSGRTKRNTGEGFGIGGGGHEKRAVNVYTLQQPHKFPLQLDVHVGGNCSFDCHQELDRIRQAGVPAPLHQSKTPSSARAGEIYETKFIECSMAQTMDDMVFQCSNQNSIYVLNASYGSYGDYGTYAATKREINGSRSRAANPIGSTCSSGVLQHKFKTFGSAAATAAAAAAAAPPAMDAAAGGAANYVNPVATSMSTAMCSPATAATAALQKLFNCSVGVACQNVTHAHSNHTNQGSSSISSSHIHISGSNNNAAASNHNNSCLSAAGGVGLQGARNRSRSGECLDGAAGAVTSPAGGGGAGGLPLLPKKKCTNVKSALIAKKTKFLKYLEEEKWRSNAAVPEDAGAISNEAEPSTPSGNNNGGNLKNQSNSREAGSGTGSGSGSGCGSGGQPNKPTNWSMHNEDTSTSLASHQQLQQQAKSSSELYQEAADILGLSCSLCDNCRCLDCQSGYFDCDDDDESYSEQSLMDDEYDEFDCGAEELQAAM

SEQ ID NO: 31804 - DNA, 4233 bp, DROSOPHILA
ctcggccagaatccctcgccatgtcggtcgatgaatcttaaagatacgtgtttactgtgcgttttacatactcatactcatactcttcctttttcattttggctcttttgcttcattgggttatacaaatgtttatttccacttatttgtatactaaataaagacatttttagacacttttgcggcttctttttgttttcttcccgttaattgttttaattgttagttaaatcgctcccacctcaactatagtacttcacacacacatgcgcgtatgtacatgtgtaaactaatttaagtaaagttcacgtttcgcttttctttgaaaggtggttgatacgcggcctacacgttgttgtctgaatgaaattgtgtgtcgatcatggggttccccccatttaccgctaatagccttgccgcactcaaatttgtagtctaataaatttggatttttcctttcgtctttttgttttgtagctaacctaaacttttcgtatttatgttcgccagcaattaaattaataactatttatattattatattttccgtcggtatccgttttatgttttagttgtatgctttttaaattgttttttttttgttttcttgtttttgttgttttgttttatacttccgttatcgtttatctaaaaaacctattcttgtggcagttgctttttgtttaattaaatattcatattctttgttctagttgtaataaaatatgctattttggttttgtttcaatagagatttataattaattcatgcttgtttttatttcgtttgaaagaggaccataaatatttaagtggcttctgttttctgtttcgtttaattcgtattccatggatttgtgtgttctgtgtcactgtgtgtccttcccggactcttgccacatctactatgcatcgattccgatttagctattactagtgcttggtatcgcctcctcgccggagagggagtcgtcatggtaatccttatcgttcgcaggcactataaggccccgctgctcaggcagcgccaccatctccgccaccagtcgttgatgttgtagttgtagtagtagaagaagcggtagttcctagtcctagtgcatcctgccgcccgactccactgtaatccacttgggtccttggagttcgctgaacgagcggccctcgtctctcctttgaaccggctccggctgctgaagtatcgtattttgctgcaggtcagcttgtaggcatgccaagagctggaccacagccacgtcctgaaggccaccagctcagcgtcctggtcctgacctggcttctccctacgcaccttcgggctcctctggctgcagctcctgctcttcaccagctcctgctcgtggcagttggcctcgcaggcgaccgcttggcgactgcgagcccggtgtccgccgcagccactgctccactgacagctccacctctgacgcgccgctccacagctgctgagcaggccgagcagggcgctcagccaaaccagcagctgcgtgggcggcttggccaccgctcccgtcccggaggcgtagtacggaatggtgcagcgcgtggtagcggcgggcactacggcacagtcgccggagagcgacgcgtgtggcatctcgccctcctcgtcgtagtagaagatcccgtcgtggctggcgtagtacggcaggcgatcgagcagcgtttccactgcgtccggatcgctccccgtttggctgacgttccgcagggccaaagccacgctcttggcgcgggcgtgctcgccgggatgtgagctcagcgagagtgtgatgttgtgcacacggcgggtggagttgcccgccatttcgcgctcctccgtcccgggctggccgaaatcctggcaaacggtgcatattccggaggccggtccgttgcagtaactgtagcagcaatcgttggggccgtagctagacttctccagctgcgccccagtctcgggtatgttttgatctggcggggattgaagtgcgaggataagaacagcacctatgtcgccgggagccatactcacctaggcagagaaatgtcggctcgccggcatattgggtgggcagcgcaggggcgcgatcggcgggcagcaggtaggggcacttttgttccacggtttggcagacgctcaggcacggccggatacgacgacgcttacggaactctgtcttgcgcgttgatctaggtcagtggtgtatataaaattaatacgaacttactattttgctgtattcgaatgtctagctcacctcttctgtagttttgatatcactggatccgtagctctgggatccgaattattggcagtcgatatgaaattattggattgttgttcggcctccgcctccgtatccagctccagctccgcctccctgttcctacttctcttcctgtccggctccgcacccttatccacttcggagtccgcactgcgtcctaatccagcctcattctccggcaggacctcctcctcgccgtggcggggcttagacagaccaacaacgtcgtagaatgtctggaccaggtccctgtcaatcgcctcctccgcgctgcggtcaatgtccttgctggcgtttgagttcgcgttcgcgttcgcattggagctcttgtcatgcttctgattaatctgacgctcgttcatgttattgccgttatttgatttattgttattgctgattaatttcagagatttatgcttgattccgtccgccatcgccgttgcctccgcactcgctgcactccttgccgagcgtttgcctttgccctgtccttcgtccttcggttgcggcgacacgtcctttggctcggcgaaatatggcactagtgtactgcagacccagcgacgatatgcttcctgcaaaacaagcaattgaaaggactcatcaattatgcaggtcccgggccacatttaaattgtttcagtggaaatgtgctcgcatttgtgttttggaagctttattgaaattactgaataaccgctaaatagggggagtgtcacatttaaataatgtatatatagtaatatgaataatgagcttaatttttcccagtaagacttgtaatttttccaatagacactcaatgggagaaaaatttctcaacagaccacggatcttccagcctaataaatggtttttcggggaaaacaatagtttttatggaccaatttttaattgttatacctcgtttagctcgtagtcacaactagaatcgattggcattcaaatttgaaagattaaatttttgtcaattttttgccacttttatgatgtaaccccttataaaaaatgcaaaaattgaccaaaaatgaatttttgtaaattccccttactttgataggggtttcttgtccctactttcagctgtgtaaaactgtcttttccatccgttttagacactttttagccaagttatgaaggttaccctcctaatttccgacctaaaaatcattattttagacaaaattatcgtttttatggtccaaatgttgagtgctgtacttcttttagctcctattcacattctcaatcgattggcattcaaatttgaaagattaaatttttgtcaattttttgccacttttatgatgtaaccccttataaaaaatgcaaaaattggccaaaaatgaatttttgtaaattccccgtactttgataggggtttcttgtccctactttcagctgtgtaaaactgtcttttccatccttttcagacactttttagccaagttatgaaggttaccctcctaatttccgacctaaaaatccttattttagataaaattatcgtttttatgattcaaatgttgagtgctgtacttcttttagctcctattcacattcttaatcgattggcattcgaatttcccaattccgacctaaaaatcactatttcggccaaaaagtgaatttttgaatagaagcctgattgcttgtggatatagttatggaatcgctgtcaaaactcaacttagaatgcttgccattgccaaagaaggcataatccacttattaattttttttttaaatacccaccaaactgaccatttactctttcctctgctcagccgacatattttccatttggcagccaatttgtttgagggtggaaaacatatttttgcatatttcttgctgcttctgaattctgctgtttgtttctggtcctcttgtgattttctattctgtcagaactattgcagtagtttttttggaatttgca

SEQ ID NO: 31805 - DNA, 1776 bp, DROSOPHILA
atgccaatcgattctagttgtgactacgagctaaacgaggaagcatatcgtcgctgggtctgcagtacactagtgccatatttcgccgagccaaaggacgtgtcgccgcaaccgaaggacgaaggacagggcaaaggcaaacgctcggcaaggagtgcagcgagtgcggaggcaacggcgatggcggacggaatcaagcataaatctctgaaattaatcagcaataacaataaatcaaataacggcaataacatgaacgagcgtcagattaatcagaagcatgacaagagctccaatgcgaacgcgaacgcgaactcaaacgccagcaaggacattgaccgcagcgcggaggaggcgattgacagggacctggtccagacattctacgacgttgttggtctgtctaagccccgccacggcgaggaggaggtcctgccggagaatgaggctggattaggacgcagtgcggactccgaagtggataagggtgcggagccggacaggaagagaagtaggaacagggaggcggagctggagctggatacggaggcggaggccgaacaacaatccaataatttcatatcgactgccaataattcggatcccagagctacggatccagtgatatcaaaactacagaagagatcaacgcgcaagacagagttccgtaagcgtcgtcgtatccggccgtgcctgagcgtctgccaaaccgtggaacaaaagtgcccctacctgctgcccgccgatcgcgcccctgcgctgcccacccaatatgccggcgagccgacatttctctgcctagatcaaaacatacccgagactggggcgcagctggagaagtctagctacggccccaacgattgctgctacagttactgcaacggaccggcctccggaatatgcaccgtttgccaggatttcggccagcccgggacggaggagcgcgaaatggcgggcaactccacccgccgtgtgcacaacatcacactctcgctgagctcacatcccggcgagcacgcccgcgccaagagcgtggctttggccctgcggaacgtcagccaaacggggagcgatccggacgcagtggaaacgctgctcgatcgcctgccgtactacgccagccacgacgggatcttctactacgacgaggagggcgagatgccacacgcgtcgctctccggcgactgtgccgtagtgcccgccgctaccacgcgctgcaccattccgtactacgcctccgggacgggagcggtggccaagccgcccacgcagctgctggtttggctgagcgccctgctcggcctgctcagcagctgtggagcggcgcgtcagaggtggagctgtcagtggagcagtggctgcggcggacaccgggctcgcagtcgccaagcggtcgcctgcgaggccaactgccacgagcaggagctggtgaagagcaggagctgcagccagaggagcccgaaggtgcgtagggagaagccaggtcaggaccaggacgctgagctggtggccttcaggacgtggctgtggtccagctcttggcatgcctacaagctgacctgcagcaaaatacgatacttcagcagccggagccggttcaaaggagagacgagggccgctcgttcagcgaactccaaggacccaagtggattacagtggagtcgggcggcaggatgcactaggactaggaactaccgcttcttctactactacaactacaacatcaacgactggtggcggagatggtggcgctgcctgagcagcggggccttatag

SEQ ID NO: 31806 - protein, 591 aa, DROSOPHILA
MPIDSSCDYELNEEAYRRWVCSTLVPYFAEPKDVSPQPKDEGQGKGKRSARSAASAEATAMADGIKHKSLKLISNNNKSNNGNNMNERQINQKHDKSSNANANANSNASKDIDRSAEEAIDRDLVQTFYDVVGLSKPRHGEEEVLPENEAGLGRSADSEVDKGAEPDRKRSRNREAELELDTEAEAEQQSNNFISTANNSDPRATDPVISKLQKRSTRKTEFRKRRRIRPCLSVCQTVEQKCPYLLPADRAPALPTQYAGEPTFLCLDQNIPETGAQLEKSSYGPNDCCYSYCNGPASGICTVCQDFGQPGTEEREMAGNSTRRVHNITLSLSSHPGEHARAKSVALALRNVSQTGSDPDAVETLLDRLPYYASHDGIFYYDEEGEMPHASLSGDCAVVPAATTRCTIPYYASGTGAVAKPPTQLLVWLSALLGLLSSCGAARQRWSCQWSSGCGGHRARSRQAVACEANCHEQELVKSRSCSQRSPKVRREKPGQDQDAELVAFRTWLWSSSWHAYKLTCSKIRYFSSRSRFKGETRAARSANSKDPSGLQWSRAAGCTRTRNYRFFYYYNYNINDWWRRWWRCLSSGAL

SEQ ID NO: 31807 - DNA, 3982 bp, DROSOPHILA
tgaaaattcaaatggctcctgtcggtcccaattgccaaactatggccacttaactacagagctcctaaaatgttattataaacacaataataacacacttttcaagggaagttgcatacaatttgtgatacttgataaattttccaattttctcaacaaaacattggcctgttgaaacttatataaactgcgaaaaagtttgcagagtcccaaaagccaaagaggcggagagagacagaaagaaagagagagagagagagagagagagagggcgtcctcatagagagcgtgtcctgctgacaccgcaagagagcgcaaaggtcctggaaatctctcaccagctctccgctgactgacttccagctgagagcgcacttttcgaactagaagtatgttaaggctgctgctggagaatctctgctctgattctcttttctcctttctccttctccgccaccctttcactaccccatcaccgcttttcctgcaatccctatccttcggttagtttaaagcccttgttgttgttgcctctgtggctgcacagcgcattaaatgtgtgccaccaggcgtatgcgtaatttaaatttaaatttgtgtgtgtacatatgtctgcccctagcacctgcaccacccatatccatccccatccccatgcccatccccacccccctggcagcccactcccactcacatcttgtgtatttttggcccgcgttgttgttgttgttttgttgccgtctgcttagcatttgcctcaagttttgttaatcagcgcaattcacatttctgtttttttctgttttttttactgcctctctctctcggagattttgcagtattcaaaaggttttcctttgcctacagagaccctcattagcgtagtcattgtttcagccagcttttccttcgccccttcagccatttcaggttttcaggttaaggaaaggaatctctggccgacactcgacgaataattaccaattatatggaacagacatcaaatatgcaccgaaataccgaaatctggtgttgctatgtagcggacaactgcagtcgagcttaagtgccacaaattaaccgcaacgtggactccgcgtcgcttctgctcctgctctcttccctgccatcctgccccgtaattacgagtctgaaatatgaatccttggacaagagtcctggctcgcttatgggccaaagcagcacgagccctcaatgagttctgcactgagagaatgaaaaattgccaaatggtcaatgggaagggtgggaaattttaaatgcaaaaaggtattgttcttggtgaactgaagcttactatttttgacatctgctttgcctagggagctgcttactgtgagagtaaaatgaagaccccttgataaatagataaacctagatgacctgaaagcttaactttgacccttggtcaggcactgaaagaaatttcacaacttttatctaagagtctcgtactttttgtctttcaaatggcgacagtcttagtaacttagtccaagcactccttccaccttaagttcaatttccggcagtatgaataatttgattccagatactcgtatcggcataacatcatgtgatttctcgcagtgtaaattcctctcttagggctttgggtttagctttgttttcagtttttcccttttttcgcagctcaactttaataattaatgagcagctaaaaatgtcacgcggtgcggaagagtttcggcctggcccaaagtggaaagcgaatgaggtttgggcttaattgggttaacggggttggacgaggggattagatgggttaagagccaaggatattagggggtaaactaaactcaccttgcagtcgtcgcactggttgatcagcgagtagacctgccggcagtcgaagcggaacaggatctcggccagctcgcaggtgatcctgttggccagtccatctacgtccagcaggtcgctgagcacgcggacgcactcctggcgatcggtaaggctggcattgagggccagcgtgtgcagggagctaaagacgctcctctcgcagcagttgcgcagccgcaggaccttcagtcgctccagcagatgaccaggtgactggaggccgcacaggtgctgcggactcgactcggcggaatcgcccagatattcaaggcactgttgttgctcctgctgctcctgctcccgctcccgcgggtcctgctggtgggccaggaccggctcctgggcgtgcagatggctgtaggacagcgtgggctccggctccgcctcctcagtggtggaggacacgtccacgtcctggtcgtcggtggtgctcggtggccgctcgctggccagcggggaatggctgtcggtggcgtccatcgcgtgatccccagcgcggcgcaaccgcatctgggttgtcttatagtttacgaaatacttgactttattgttactggtggcactccgcttggccttggaggccactggcttctgttgctgctgttcggcgcaggatcgcgggcaggttgggggcccgggtccctcatcgacccaggccatgggcagtgtaccagccgagcactgaccctgcaaggaagaggaacatttattaatatcagcaaaacctttattgcaaaaacgtacagaaacaatacaatgccactgatgatataaacgctcgatattgccatgcgactacgaaagtcataaaggggatataaacttcagaacaataaaacacgaatctaggatacgacgttcttaggagctcttaaccatgatttaagatcgacaattgaggaatacacttaactagagatttgcagtctcaatttaatatggcatttaatcttttattgtgatacggcttaaaaagctctgttttcggtggaaagctcctatcgaagaagttgaagccattccttaaatcccaagtatccttgcccacatatacatatgtgaaaccaaggtaatgtgtactgaaatgtagttcatgtttattggaacacgctgttcctaacaccactcttttctcctccaccaattaactgtcttgtgtgatttaaaaattaaaccaaccgactgtgatagccacacatacaccactgcaagtcatccccacacacagctacgcgcattggggaaaaccaagccagcggggagcaacaactatatgcagcaggaaaaacaaaaagcacactggtatattggaaaagtttgctcggccaacaacaacagcgaaagtcataaaacgcaaaaaaaacaagtaaatagaagccaaagctgcgaacagcgaaaaaaaaacaggagcattgagtgcataaagagctgatgtttttgttattaaaatgaccgcacttcgttggaattttccacatgcttgcataaaactcaaggcagcagctacaacaataacactgaagaggcgaaaagagggcggagagtgggcggaaagtgggcggcgaggacgagttcgcgtggctggagaatttccgtaggaatttactatcaatattggagtactggtactccaagagctgctgcagcacgagctctgaggactttgagctgcagcgacttaatcgttttccggttaaagcatgaatatttatgagcctggctggaaaaattgcatcccgattgctcaccccaaactgtaggtctgtcagagatgcttacaatgtgctggatattatccaatctaaggtgattcgcctttgctgggtttggggccaacttaaacttgggttcgagttcacagcgattataactgcagatgcacatgtatgcacaagtcagcgtccttgttaatatcctgttaaacaccgaacccatccaattggaaatgtcaaacgtttcggttgccgtaagctccttcgcaaaattttaaacatcaatttaagcccgaataatccgactgcacgctggccgaacaatacgggcattattctctagagtatgcacaggaaattcccttttttgtcgagctgagaac

SEQ ID NO: 31808 - DNA, 894 bp, DROSOPHILA
atgaactacatttcaggtcagtgctcggctggtacactgcccatggcctgggtcgatgagggacccgggcccccaacctgcccgcgatcctgcgccgaacagcagcaacagaagccagtggcctccaaggccaagcggagtgccaccagtaacaataaagtcaagtatttcgtaaactataagacaacccagatgcggttgcgccgcgctggggatcacgcgatggacgccaccgacagccattccccgctggccagcgagcggccaccgagcaccaccgacgaccaggacgtggacgtgtcctccaccactgaggaggcggagccggagcccacgctgtcctacagccatctgcacgcccaggagccggtcctggcccaccagcaggacccgcgggagcgggagcaggagcagcaggagcaacaacagtgccttgaatatctgggcgattccgccgagtcgagtccgcagcacctgtgcggcctccagtcacctggtcatctgctggagcgactgaaggtcctgcggctgcgcaactgctgcgagaggagcgtctttagctccctgcacacgctggccctcaatgccagccttaccgatcgccaggagtgcgtccgcgtgctcagcgacctgctggacgtagatggactggccaacaggatcacctgcgagctggccgagatcctgttccgcttcgactgccggcaggtctactcgctgatcaaccagtgcgacgactgcaagactcgtaattacggggcaggatggcagggaagagagcaggagcagaagcgacgcggagtccacgttgcggttaatttgtggcacttaagctcgactgcagttgtccgctacatagcaacaccagatttcggtatttcggtgcatatttga

SEQ ID NO: 31809 - protein, 297 aa, DROSOPHILA
MNYISGQCSAGTLPMAWVDEGPGPPTCPRSCAEQQQQKPVASKAKRSATSNNKVKYFVNYKTTQMRLRRAGDHAMDATDSHSPLASERPPSTTDDQDVDVSSTTEEAEPEPTLSYSHLHAQEPVLAHQQDPREREQEQQEQQQCLEYLGDSAESSPQHLCGLQSPGHLLERLKVLRLRNCCERSVFSSLHTLALNASLTDRQECVRVLSDLLDVDGLANRITCELAEILFRFDCRQVYSLINQCDDCKTRNYGAGWQGREQEQKRRGVHVAVNLWHLSSTAVVRYIATPDFGISVHI

SEQ ID NO: 31810 - DNA, 5944 bp, DROSOPHILA
ggggactatttacttaggcctctgcgtaggccatttactttaagatgcgattctcatgtcacctatttaaaccgaagatatttccaaataaaatcagtttcttacaaaaactcaacgagtaaagtcttcttatttgggattttacaactatgtatgaagaagatgaatgaagatttaaattgcattaacacaatgcacttacactattgcatgatgaatgctgaaaacgaagcccaaaaaaaaaaaagcgctaattggctaaagcttaaagctggctggcaaaaagttggaaaatctaatagtagtattgtagtacaataacaattcatgcattggaaaaatgaaaatcacatcgggaggagggcaaattgtgggggcatgagacgtgtgtaatgcctcggttcgctgcattagccataaatcttcatcagcgctcgcctcataaataattcgaatatgcgaaaatgagaaatgtttttggtttcgttgtcgctcgcctggtttttgctttaattttaatgacatcaagtcgcagtgtaacatgcatacaaataccattcaggcgaccacaatcgaggccaaagtccgatctattgcatttttctggctggttacacttcaatccccatccacatactgacaataaacgtgcaaatctgatgacattctgtgtgtcctctttgcctttttagccatttaattttcagggtttcaaaagatttcttaaattcctaatatttctgtacatttaattggcaatggaatatggctatggttttgtgtttgctttttctaataagctgtaaatatggttgggcagcacacacattcggcttcccttgtacttgtagtttactttagtataccctggaccccatttaactctgtatctctgcatctctctcgtttccggcatcccggtctcgctttcggaaccacccacagggatccacccattctgcaagcgcacaaccgaacggacatcatactgcgcttacccatgggcaaaaggattaaggacattcgatggctgtcagtgtggtgcagacgcttcacggtgagtcctcgctctttcttcccatctatcgtatctttatttttcagtttttttttctctcggtttttcgcttttctttgcggatggcacgcgccatcctctcagatttgtgtgtgtgtgtgtgtgtgtgtgtacttagccgggcaagagccttttttgtaattacatttttgtaatttaactgcagctgcacaaagattttagcattgtgcccggctatcgattatggtcttaatagcttttcaaaataataataataaaaaaaatgggaagctgtgcagttatttggtttctccgctcgcgtttgtttaagagtaaatggaggatttgccaaggaaactaatccttttgtgctgcctataatgtgggtcagccgcctggaactttgttttcattagagttttagattttaattacagtgctgaatatgcaaattgcactgtccaatgtccttcgtccactggcaattatgtttgccttggtcctgggaaaattacttttgtttaagtttcctacgaggaggcggcgaacaagtgcatttccagataaattccccaaattggaataggattctttccaagggaggaggggttggggtttctgccgtggagttcgctgcacggtcgaataaaagatggcggccgtagtaaaataaattacagcagacatttttgattaactcaagtggttgcatataaacacacacacacagccagacgcccggtccccgcacctcacacagatactcacacggatggggaatcgtgtgtatctgtgtggcatacagggtgctcctccgggtctgtgtgtgtttgtctttgtatgtgtgtgggtgtacgctgccttccattgactgacagccaaaaaacttcttgggggctgactgccgcacactcacacaattgcacccagattggggttagtttgccactgtgtgcgtcggtgtgtatctgtgtgccagtgttgtttgtggagttttgagcgcgcatgcccgattttttaccaagagtgtgggggtttttggggggtttgcaggcggttgggggacagccccacacggaggcatactacataaacacacattatgtacaaatgttttgggtatacaacaacaatgcgcttgtttgcttacttagaaccgcgtcgaatgtagacgcggtgtcgcgtaaaaatcacgtgtagaatttacgacattctcttaaagttaagctttattttaagaactagcttaattatcaactctattaaacacataaaaaggaaatatactctatattcaatcattgaagaatttaagcaataaatttaataatgtctcacaaactttaaaaatacatttttgaaacatttgagataatgctactttctgtaatgatgtaaaatttgcgatgtaaagtgtgcatatattatgtacgtagaaaaataacaaccacgcagccacgccttaactatcagaagaaaaaaaaaaaccaacaatcatgatgtgcacgttaacctttaatgatatgcccaagaagtgaagtctaatgaccttaaccgcctttttaggttgattttggagaggtgttcataccacccaatctggatgtgcccaagccacgggtattgcccgaatttaagcgattggcccacggcctacgttccagcaacatcagtgtgctggatgccaagactttctacatgtgagatttgtcaaaggttttgccgtttaaacaatttacctaaatgtgctctctcttatttcccaagacccaacctacactacgacggagctggacctgatgcctacttttgggtgggcaatggcagcgaaccaaacatcatgggcataaaggtcagtgactcgatgaagatgctttcgaaatatatttaaccatatatgtacttcaggttcccaatgagagtggttcgctggaacccttgcgcggctatcagggcgaggacattgagatccaattaccggaaagtctaaccgtttacgatatcgattggctagctgtgtggtgtgtggagtacaggcacaacttcggacatgtctatatacctcgggatctggatgttccaccagccttgggacaaaccaagataacggtaagtgtgatagtccaaatcggacatagttagtgccggaacattaccccgatacatatgctagcatttgcccatttgcacacaactcataatgtatatctctttgacttatgcgcgccgcattagccttcatggtggtattcacccgtgagtactagacttagcctcatgcatgtcccgctttccaaagccaaccaatcgcacttactctgccttcatttcgcattttcagaccacgacaactccgcgtccagtgtacagcaactgtcgcgagattctgccgaataagcttcagatcaagtgggagctccagggcgaatacctgcaggtggaactcttcggacgcatcaccgaggatcagtacatggccttcggactatccggtgcgaatggtcgagcccagatgtcgcagtccgacgtggtggtggccttctacgacaccacgacccgtgtgttccgggcagaagattactttatctcggacttgtcccagtgcgatggccagcggggtgcatgtcccgacgaaaggattggaggacgcaatgatgtgattgtgtgtaagtataaaatgagttactcataataaaatcctgttaaaaatccttattttcctgcagtgagcggtgataggaagaatggtgtcactagcattcggtataagcgcctgctgcaacccaatgaagccatctacgatgctccgatacccactgatcgcgaggtgtcggtcattgcagcaatcggaccacttaatgcccgaaaggaggccaatgcccactcgcacaccgccagtgatcacaaccaggacgacattcgcatcaacttctcagcgagggtatgttcacctatcgaaaaatgtataatgtagatgtataataagtaagttaatctttcagaacgatcatgcctgccagagttcactgtacgatgttaaggacgagagtggtcccaggccatggcccacgcgcaagatcgaaggtgtcaggaagttccgtgccagcattggacccacgggcggcaaacgcggatatacctccattacgggggtgccctcgtggggcattgcctggtatgtgaacgatctgctgatccctgaaatcactgtggaacgtggcctgacctacgagttcataatcgagggcggcaatgatcctagtcaaccagctaggtacgttagcaaaccccatttcataggcggattaactaataaacatctctttgaaaacagatatcatccgttctacatcacggattcacccgaaggtggactgggtcagaaaatgggtctggaagcgcgaaaacagaaggcctatgctggcgtagaatacgacgaggacggcaatgctattccaacaggaggtgagttcacatccagattgtgccattccaaactataagattgccatttatattaggtggtcgttattgcgaatgggagcaccagaccattgatcgatccgcagaaattgataccttcgaggagtacatgaaaaccttggtgtttaagtgcgaggatggtgaaccaggttatctcaactggacggtgcccacaaatgctcccgatcagctttactatcaggtgagagcgatattggaaacgaaacgtatatgtaatccaaattcaacttatttttcagtgctttacacataacaatctcggctggaaaataaatgtcgtggacatgggctcctccgggggatccaaagtcagcagtcaccagtttagtttttacggaattttcacagtatttagcctggtcgcgacaagccttccgttttttggtcacgtccttgcctgatagtgccagtgtatggattaaattctagatgtctagagagaattttcgacagatgaggtcctgagatctgaatccagatctttgcatatccatgaacattaccatatcccgcccaaatttaaagcatatccaacttccaacttctcgatacgaatttatattttttcacacttaacgaactcgggaaactcatctgtcgagaatttctggccacttggcgactttcacaaccaggctaatatcatctgaaaaacatatcttgacaataattcgtaagatgtaaaactgttgaaattgtgtgtgcatgcgtgagggcccactgtgctgctacagtgggcgtcgaatgggtgttgagccacggccggaacttgatcggttgttggcaatagatttttgtggctaggcagcgagaactttttgtacatttacgagtatggaattctacttttttacatgtatacttattaaatttacttatacatctacatctctagtacagtaaaattgtaatttttctagcaactactatgaaacctacaaaggcatgtagataccagaatcatgtttaatatgcggttctataaaagcgtaagccgacaataataacgcgacacagcgacaataaataaatgaaattaagtgtgtgtgtgaacgccacacataaaatatcgaaaaaattaattatttgggccgcaactgaagctcaatgacattgtacaataagaattatatggatatagaaagggcagaaatcgatgcaatttgtatgacaataaaatctacacaattgtgaattttgaaaaagtttcgcagacaatacaatacttttacacaattcgaatgtactaagaaactaatgacaaataagagaactatgttatttaatgctactgactactgtggtgcttcttgtaacgatattagatgaaatgtatgtaaatcaaacgccacgtttagaatggaatacacgaatccccctttggacgggataaagtttttg

SEQ ID NO: 31811 - DNA, 1746 bp, DROSOPHILA
atgggcaaaaggattaaggacattcgatggctgtcagtgtggtgcagacgcttcacggttgattttggagaggtgttcataccacccaatctggatgtgcccaagccacgggtattgcccgaatttaagcgattggcccacggcctacgttccagcaacatcagtgtgctggatgccaagactttctacatacccaacctacactacgacggagctggacctgatgcctacttttgggtgggcaatggcagcgaaccaaacatcatgggcataaaggttcccaatgagagtggttcgctggaacccttgcgcggctatcagggcgaggacattgagatccaattaccggaaagtctaaccgtttacgatatcgattggctagctgtgtggtgtgtggagtacaggcacaacttcggacatgtctatatacctcgggatctggatgttccaccagccttgggacaaaccaagataacgaccacgacaactccgcgtccagtgtacagcaactgtcgcgagattctgccgaataagcttcagatcaagtgggagctccagggcgaatacctgcaggtggaactcttcggacgcatcaccgaggatcagtacatggccttcggactatccggtgcgaatggtcgagcccagatgtcgcagtccgacgtggtggtggccttctacgacaccacgacccgtgtgttccgggcagaagattactttatctcggacttgtcccagtgcgatggccagcggggtgcatgtcccgacgaaaggattggaggacgcaatgatgtgattgtgttgagcggtgataggaagaatggtgtcactagcattcggtataagcgcctgctgcaacccaatgaagccatctacgatgctccgatacccactgatcgcgaggtgtcggtcattgcagcaatcggaccacttaatgcccgaaaggaggccaatgcccactcgcacaccgccagtgatcacaaccaggacgacattcgcatcaacttctcagcgaggaacgatcatgcctgccagagttcactgtacgatgttaaggacgagagtggtcccaggccatggcccacgcgcaagatcgaaggtgtcaggaagttccgtgccagcattggacccacgggcggcaaacgcggatatacctccattacgggggtgccctcgtggggcattgcctggtatgtgaacgatctgctgatccctgaaatcactgtggaacgtggcctgacctacgagttcataatcgagggcggcaatgatcctagtcaaccagctagatatcatccgttctacatcacggattcacccgaaggtggactgggtcagaaaatgggtctggaagcgcgaaaacagaaggcctatgctggcgtagaatacgacgaggacggcaatgctattccaacaggaggtggtcgttattgcgaatgggagcaccagaccattgatcgatccgcagaaattgataccttcgaggagtacatgaaaaccttggtgtttaagtgcgaggatggtgaaccaggttatctcaactggacggtgcccacaaatgctcccgatcagctttactatcagtgctttacacataacaatctcggctggaaaataaatgtcgtggacatgggctcctccgggggatccaaagtcagcagtcaccagtttagtttttacggaattttcacagtatttagcctggtcgcgacaagccttccgttttttggtcacgtccttgcctga

SEQ ID NO: 31812 - protein, 581 aa, DROSOPHILA
MGKRIKDIRWLSVWCRRFTVDFGEVFIPPNLDVPKPRVLPEFKRLAHGLRSSNISVLDAKTFYIPNLHYDGAGPDAYFWVGNGSEPNIMGIKVPNESGSLEPLRGYQGEDIEIQLPESLTVYDIDWLAVWCVEYRHNFGHVYIPRDLDVPPALGQTKITTTTTPRPVYSNCREILPNKLQIKWELQGEYLQVELFGRITEDQYMAFGLSGANGRAQMSQSDVVVAFYDTTTRVFRAEDYFISDLSQCDGQRGACPDERIGGRNDVIVLSGDRKNGVTSIRYKRLLQPNEAIYDAPIPTDREVSVIAAIGPLNARKEANAHSHTASDHNQDDIRINFSARNDHACQSSLYDVKDESGPRPWPTRKIEGVRKFRASIGPTGGKRGYTSITGVPSWGIAWYVNDLLIPEITVERGLTYEFIIEGGNDPSQPARYHPFYITDSPEGGLGQKMGLEARKQKAYAGVEYDEDGNAIPTGGGRYCEWEHQTIDRSAEIDTFEEYMKTLVFKCEDGEPGYLNWTVPTNAPDQLYYQCFTHNNLGWKINVVDMGSSGGSKVSSHQFSFYGIFTVFSLVATSLPFFGHVLA

SEQ ID NO: 31813 - DNA, 3542 bp, DROSOPHILA
attgtaaaattataattgtaaaacaaaaatgaaatcacacttagcggaaacacacggagcaaataaaaatttaaaaaacaagataactctttgattcatggcccgcttgacccaatctctaaagaaatacacccttgtatacaaactgggaatgttcggagttccacacgcgattcccactgaagttattcccatgacttgatactagcatccgatcccgatgtgacgaaccagcagaggacctcccgagtcaccattgcatgtgtccttatggtccggagatccaacacacaactgggactccgccttatagccttccggcacatcctcgtttgcatccaaccgtaacttgtaagttggtaagttgtaccaaagacactagaataatagaatagaattattctagtgtctttggttgtacttacacatctgagtagaagcagtgagtagccgttaaaaccacctgataacttatcaaggtgccaccacaaaaccacttcgtttgattcccactagagctgtgatgatccagccgagcaaccatgggaaacttttttttggcatatctgcggtggcaacaactaccaaggtccctgaagttgcaccttagaaaggagtattatcactcatactagacgattgctagctatcgaatgtaagctcactgtgaatgtcacaaattttgacagacccaacgtagcacaaaaaagtcagtgacaaaatccgtctggtcattttttattttctactactcccaacggagacttacatacaataaatgtaaatcacatcaccatagactctagtgtcaagaggtaattattagtgtttgacgaaaagaagttcagtaaagttctgtattccgagccgaaaggagctgtgaattttgagttgttcaaaaagtaagcatttgaaatagttcacattcttcctaaataccaaaaaaaaaaaaaactgctttaggctaatattaggagttgggtgaccttacaaaccagcaatgaatgaactgcagtcgaatagcaaccagcctccgccgcgcaatgagccgtatctgcagccggtgaatggcatcgtgcaaccgccggtgattccgccaccgaatcgtcctgggcgaaggacaaacatcctagaagagctcaagtccgtgctgaattgcttatggcgcaatcgcttctcgtatcactttcgccatcccgtcgattctgtgagcctgggtgtgcccgactaccatgcggtggtcaagcatccgatggacttgagtacaattaggaagcgactgcacaacaaatactactggcaggcgagcgaggctctggaggatttcaagctgatattcgataactgcttgttgtacaatttggagggctcaccggtttatcaggcagggaagcttctaatggaggccttttacatgcgaatggagtccattgatttgagcacggaggtggaactaaagccgaagtcggaaaagcgcaagagaaaggctactgaatcattggatcaagcctcgacttcgttctcagcacctcgagcatctaacaattattctagacagtggctctcgagtagttcctcatggctctgtcccccaccgatgcctggcggggtgtcgtcatttaatccttcattccgaaatttcgtgggtcccagcttgatcccatcttttatgcccgattccttggtgaatcccatgcaatctatgcatccaatgtcatcaatgatgaatccgatattcaagaataattgggagacaaatgaagcaatggatccaccgccctcagagccaatttcctatcgtcccttggattccttggcagcacccttaccgtcccctccaatggaacccatgactttgccttggccaaccccagcaccagttgaatctccagcttcatcgcctcctccggctcccaatccacccattatcatctgctacaagtctctcgaccgaatgattgaaaaaagccactcagatcatcttctgaagtcgatggtaaagcgaaagcgcaagcaggttacatgggcatttaatcaggctgactactggcgaaggtactcccagaatccggactacgaccacgatcgcgaagagaaactcgattggaagatactacaggagcgcttggactccgataactttgagagctttgatggattcgtgagctctgtacgaaagatgttccagaacgcattgcgttgctttccggaagatggattggtcaaggtttcggtgaagaaaaccaatgagatctttgagaaaaggctgcccaagtacagggagttaattgccacggccaaggaaaaggggcgtcaactggtggccagcagggaacaagattttcgtgactcacaaaacctgctcattaaacaagaaaacgctaataagaatttcaaaggatgggttccaaagccatttattattaaaacggagtccctgtttgtgcaagaacagcgagtgtacaaaatggagccccaggatgtacaagaattttcacctggtacggagccgctggatgaccaaacttatgatagcgattaaagtgtgtagaattctaccacggaaatgaaaaaaaatgaaaatgcaaattattataattattattcataaagaattgttattagcctaaaatatgattctaattacgagctaccgacattctcatagtttaattatacctgtattactagatgcgttgaaaagtatggaacaggcagaaggaagcgattgcgatcatatacatttgtctatacatttttgatcaggatcaatagccgagtcgatctggccatgtccgtctgtattgatctcattttgccacgcccacacttttgaaaaatgcttagatttttcttcgtgcaaaaaaaaacactagccacgcgcctccttttgctacaatacgcccaaaacggtcacgactattttattccccagtatctatcgatatcccagaaaaatgatgaaatgttccctttggcattcccactagctgagtaacgggtatctgatagtcggggaactcgactataccattttctattgtttttaaattcaaaataaaacagtcaagcaccaaggtgccacctctcggttgacattgcaactacgcagagctaaggtgaccagtcgtcttgcaatctggcagccctataacagaagtgttccaaagtgtcacgctatcgcgtgctaaccaacactaatctgttgcttcgcattaaaaatttttgcttgacttgacaggttcgtagaaaagtcgcagaagaaaaagctgttccgtcggaattaaggcagccactatgtcgtatcaactgtaccgcaacaccacgctcggcaacaccctgcaggagagcctcgacgagctgattcaggtgagttcgcgctggcgaagtgaaacgcattgtaattttgggcttccatattgcagtacggccagattacgcccggactggctttcaaggttctgctgcaattcgacaagagcatcaacaatgccctaaaccagcgggtcaaggcccgcgtcaccttcaaggctggaaaacta

SEQ ID NO: 31814 - DNA, 1542 bp, DROSOPHILA
atgaatgaactgcagtcgaatagcaaccagcctccgccgcgcaatgagccgtatctgcagccggtgaatggcatcgtgcaaccgccggtgattccgccaccgaatcgtcctgggcgaaggacaaacatcctagaagagctcaagtccgtgctgaattgcttatggcgcaatcgcttctcgtatcactttcgccatcccgtcgattctgtgagcctgggtgtgcccgactaccatgcggtggtcaagcatccgatggacttgagtacaattaggaagcgactgcacaacaaatactactggcaggcgagcgaggctctggaggatttcaagctgatattcgataactgcttgttgtacaatttggagggctcaccggtttatcaggcagggaagcttctaatggaggccttttacatgcgaatggagtccattgatttgagcacggaggtggaactaaagccgaagtcggaaaagcgcaagagaaaggctactgaatcattggatcaagcctcgacttcgttctcagcacctcgagcatctaacaattattctagacagtggctctcgagtagttcctcatggctctgtcccccaccgatgcctggcggggtgtcgtcatttaatccttcattccgaaatttcgtgggtcccagcttgatcccatcttttatgcccgattccttggtgaatcccatgcaatctatgcatccaatgtcatcaatgatgaatccgatattcaagaataattgggagacaaatgaagcaatggatccaccgccctcagagccaatttcctatcgtcccttggattccttggcagcacccttaccgtcccctccaatggaacccatgactttgccttggccaaccccagcaccagttgaatctccagcttcatcgcctcctccggctcccaatccacccattatcatctgctacaagtctctcgaccgaatgattgaaaaaagccactcagatcatcttctgaagtcgatggtaaagcgaaagcgcaagcaggttacatgggcatttaatcaggctgactactggcgaaggtactcccagaatccggactacgaccacgatcgcgaagagaaactcgattggaagatactacaggagcgcttggactccgataactttgagagctttgatggattcgtgagctctgtacgaaagatgttccagaacgcattgcgttgctttccggaagatggattggtcaaggtttcggtgaagaaaaccaatgagatctttgagaaaaggctgcccaagtacagggagttaattgccacggccaaggaaaaggggcgtcaactggtggccagcagggaacaagattttcgtgactcacaaaacctgctcattaaacaagaaaacgctaataagaatttcaaaggatgggttccaaagccatttattattaaaacggagtccctgtttgtgcaagaacagcgagtgtacaaaatggagccccaggatgtacaagaattttcacctggtacggagccgctggatgaccaaacttatgatagcgattaa

SEQ ID NO: 31815 - protein, 513 aa, DROSOPHILA
MNELQSNSNQPPPRNEPYLQPVNGIVQPPVIPPPNRPGRRTNILEELKSVLNCLWRNRFSYHFRHPVDSVSLGVPDYHAVVKHPMDLSTIRKRLHNKYYWQASEALEDFKLIFDNCLLYNLEGSPVYQAGKLLMEAFYMRMESIDLSTEVELKPKSEKRKRKATESLDQASTSFSAPRASNNYSRQWLSSSSSWLCPPPMPGGVSSFNPSFRNFVGPSLIPSFMPDSLVNPMQSMHPMSSMMNPIFKNNWETNEAMDPPPSEPISYRPLDSLAAPLPSPPMEPMTLPWPTPAPVESPASSPPPAPNPPIIICYKSLDRMIEKSHSDHLLKSMVKRKRKQVTWAFNQADYWRRYSQNPDYDHDREEKLDWKILQERLDSDNFESFDGFVSSVRKMFQNALRCFPEDGLVKVSVKKTNEIFEKRLPKYRELIATAKEKGRQLVASREQDFRDSQNLLIKQENANKNFKGWVPKPFIIKTESLFVQEQRVYKMEPQDVQEFSPGTEPLDDQTYDSD

SEQ ID NO: 31816 - DNA, 3099 bp, DROSOPHILA
cggtgcaatgcacttataacttggttcatcccagccacccactccgctcccgtggccccagtgccacgcccacttgcctgtgcatcgtttaactcccgccacaaagagctcctcccagcatccatttgagtgttaagttgaggtgggtataaacccccccccccccaccccacctcttttgccagccagccagttggctagcagcacattcaattagatttagtataggtataggtatagacatgacttggcttccccctttcctgggatcagagcgctcattcatggctcggtggtatttacagccaattatgagacaaacaagtccagttcaccatttggccgatgtcagcgtgacgcgaaccagaaactgcgtactcagaaccaatatatggcccatgatttctaattaggcccacgaaaaagatatatagattcaatggagtaaaagaaaatagattttccaagaggttgaagctttcgaatccaactgcaagctgcactatctgcaatgtctccgctttaatagatctccttgaaagtgtattatgtccgagtaagctctattttcatcctacttgggcattatatatattagcaccagcaccattagcagccactttagtttgccgcacttgacttacctgtgcattaaagtcgaatagatactccgggcgcagcggacacggcaggccgcacttgcaggtaccctgtgtgagcagatagtccttgatctggaactgcgtgcgcagcgttttgcccgagggggagccgcaaactgaactcgcagctcgagcgggccatacaagaagcaatgactgagttggataacatttcagcctcctcgacacccgcagccacatcctcgtcatccgcaaccatctctgctgttcccgcatcagcaggaccagctgtaattggcggacaacagcagtatcagcagcagcagcagcagcaacagcagcagcaatcgccctcttcaacgaacaacaaaataaatggactcgcgcggagcaagcgccaggccaacacaagtggggccagcatggtgctgaccaccagtacggcggccacattgagtggcctcttcaatcagcagcgagccaagcccatacgcattgctccggctccaccggtggccacaacgggcacaggcaacattgggacgatagcagcagctggagctgcagcagcttcaactggaaccgggacagcgacaacatcggcccgttccgagatcctgaagctggccaaatgaccagcgctgtcgacgttatcgtcgacagtgagcacagccagctacaccctcgttatcgggcataagtagtgggcagcaggaggatacataccgccaggccatatatatagagttatccatacatatgtgacgatacgagtatagagtttagtgttaggtgtcaggcctcagctttggagtttgttgttttgtattctttgacagactccccgcttagttgcgtcgctgggcggcgcgcgccacactttcgaaatagacaataaaacagcaagatgatgttaatgaaaatcaagttacaaagagcagttctaacaattagcgataggtttttggcttcatagacagcgcctcggcgcaaatttgcgttgttttgtatatagtaagcaccaaaagctaccaagatgtttcgtattaagtatttatttattgcatatagatccttggtttttataggttttgttttcgttgcaatttatagacctaccgattatttgtataaataggtaacctaagctgatacttagccactaagtttaaagaacatccacaacaattacatttgccttgtcaagcaaatgatatcaaatcaaaaacagctactgattttcatttattgtgattgcacaaattgttttttaaactctagaagaacaaattatttatgtcaaacacaaaaaggtaaaaatcatgagaaaattaggaagggtggaaaaaaattatatttataaattgttattatttatttagttgaaactattgtaaaattataattgtaaaacaaaaatgaaatcacacttagcggaaacacacggagcaaataaaaatttaaaaaacaagataactctttgattcatggcccgcttgacccaatctctaaagaaatacacccttgtatacaaactgggaatgttcggagttccacacgcgattcccactgaagttattcccatgacttgatactagcatccgatcccgatgtgacgaaccagcagaggacctcccgagtcaccattgcatgtgtccttatggtccggagatccaacacacaactgggactccgccttatagccttccggcacatcctcgtttgcatccaaccgtaacttgtaagttggtaagttgtaccaaagacactagaataatagaatagaattattctagtgtctttggttgtacttacacatctgagtagaagcagtgagtagccgttaaaaccacctgataacttatcaaggtgccaccacaaaaccacttcgtttgattcccactagagctgtgatgatccagccgagcaaccatgggaaacttttttttggcatatctgcggtggcaacaactaccaaggtccctgaagttgcaccttagaaaggagtattatcactcatactagacgattgctagctatcgaatgtaagctcactgtgaatgtcacaaattttgacagacccaacgtagcacaaaaaagtcagtgacaaaatccgtctggtcattttttattttctactactcccaacggagacttacatacaataaatgtaaatcacatcaccatagactctagtgtcaagaggtaattattagtgtttgacgaaaagaagttcagtaaagttctgtattccgagccgaaaggagctgtgaattttgagttgttcaaaaagtaagcatttgaaatagttcacattcttcctaaataccaaaaaaaaaaaaaactgctttaggctaatattaggagttgggtgaccttacaaaccagcaatgaatgaactgcagtcgaatagcaaccagcctccgccgcgcaatgagccgtatctgcagccggtgaatggcatcgtgcaaccgcc

SEQ ID NO: 31817 - DNA, 6033 bp, DROSOPHILA
aatgtgcgcactcgccgccgccgcaaacgcagcgcaataagctacaaaagaagcagagagtggaatacaaaataatatcattgcaaaaaaaaagtgaaattaagtgttttaaacaaaaggaaaagaaaccataaaaaaaacatgaacatgacatggccgcgtctcgtttacacaataactcaaaattaatttaatatgctggcaaatgagcaaagcgaaaagcaagctaaaaggctttgaattgcgaaggagttctcctgaacggctgcttttatcgccatggccgccgcatctgctggccagcaacagcagcaacatcagcaccagcacaagctgaacatagctgggagtgctgagacggtggtcagcgggatgcaacatcagcagcaacatcagcagcagcatcaacagatcaatatgttcaagcagcagcagcaaatgttgcctctgcagcagcaacatcatcagtttttccagcagcaacaaacgaaatttgtatcgcgggtcgttacaagtgcagcggtgcatcagcagcagcagcaacatcatcatcagcagcagcagcagcagcaacaccagcaacagcaacagatattaccagctggcttggtaaacggcaatggcagcggcaacatgatgcaagtagcaaatctgcaactgctgctactggggcaacgcattgcatgtcgacaacaattgcggcgcgtcaaatgagtcagaacaatcagctctatgccaagaatgttgccaaagccaacaatgccagtagcaatggcaatatcaacaggaagacggccactagctacaatggaaatttggcccccggctggcgtcgcttgaccaacaacaatgaggtggcctatatcagcccctcgggcaaaacgctgcgcacgcagttccagatcaaggactatctgctcacacagggtacctgcaagtgcggcctgccgtgtccgctgcgcccggagtatctattcgactttaatgcacagccgctcaagttgccaacggaggcgtcaacggcgacgccgacaccttgccggcaccagcggcgatttcttgaatctcagcagcttcagctgccacagcagcagcaacagcaacaacatctgcagcatcagcagcagcaacaacaggctgtcaaagatgtatctgtagacgtagccgtatccgtatctgggccagcagctgtcagcgatgtgttctccacgctgatgacatcgacagcgagaacggcgacgatggtgacaccaacagcagcaacatcaccagcccaggcggcaacaaccaccacacatgaaatggccaacaaagacgctgattgccacaaatacggcaataacaaattacctgccacaaaccggacggcgaccacgcccacgccagctccaacgcccccgcctcagcatccaaatgggatgccaactagtcaagcattagcattaggcggagttccagttggcgtccatcccaagcgtccaactgggggccatgtgataaagcaaccagcctccgttcttgggccaccatgcacgccgcctttggctgtcggcggagccaacacagtcatccaacagcagcagccgctacagcaacatccaaactttaaggacgatcctgctggctatctgcaacagcaaacagcactgttgcataacagtcttggagtcggtttggatgcaacgaaaacggcggctggaacatccactgcgagagctctgccacaggaacccattgttcacagctcccagcagcaacagcagcagcagcaacaacaactacagcaacagcagcagttgcagcgccaaaagatccgacgcctgtcgctctttggaaaatgggaaactgatccagcacctgccaccaattctcaaccaacaaatggaacacgagcactgcaagtggatgctgctgcctttgcacgaccacagaaaccacaggtcacttgcgtaacactggtgccacctccacaggagtctccagtatcgagtagtgcagccgagacgctagagaaacgacccgagcaggtgggagccatatccaccagtcacgagagtccgcgtcagagtctgtcgtcgcccacggattcggttgactctgcaaagagcacgccttcagcttcacccaaaccccaaacgcaagtcccaatgcagccgcagttgctgcagatgcgcccgcatctccaggccaatctttccgctcaaacgcccgtcactgtgcccgcacatgtacgtgttatgcggcagcagcaggctcagataattcccggccaacgattgccagtggctagcagcagtgctgcgatggccacgatgaccaggagcatagtgacctccacggcgggaacgagtacgattacagggcgtcctgtggccaccacgttaaacaactcgaatcccactgtggcgcagttgcaatccatggcgaatgccatgaacggagcaggtggtggtggacaattgataatgacttcttcgggacaactactggtcataccgacgcccagcaagcagacaacgcaacatcatcgcccaggtcagcccggacaaggtgtcatcatccagcaacagcagccggcggagttgcatcctcaaccgggtggtggttatatcgtcagccagccctctccggtggcggcggcaagctccagcagtagcagcagtactgtgatcctaaactccggtggagccaagttgttgcaccaccagatcatcacctcgcaggctggacagattaatcaagcgacttcaggaggatcaggaaaccagccgcaaacggtgctgctcaacacactgcccaatggaggttacatcgtccagcagcagccgcaaacgcagtcgccacagcaggcagaacagatcctggcgatgccgcaaccgccgccggcgcaaacacttatcatcagctcgccggacaccaagaggagagcgcggaagcgcaaaagttctgtatgccatacaccgccgccaagtggatcgcccgccaaaatcatttcgcctcagatctcgcccagcatcccaaaccaggcaccagctctgcttcaccagcaggcagctgcagcggcggctgctgctcctcaattccagcaacaattccaattgagtcctggtattcagggaattgtggtaaacaaacctaatccccctcagcaaccacagacgcagcagcttctgctccagaatgggcaaatcttgcaacaggttaatctcattggacagcagcttctcatgccggccgggttggtaatgggaccagatgccacactgttacagatccaaaatatgcccgcaacaagcttgatgacaccgcagggtcccgtgatgttgagaacgccatcgccacagaacaaaccctctttcatatccccgagtgccggaggccaacagtacttagtgggtgccaatggccagttgagtcccatcggtcagatctactccacgcccatgggtctggtcatgccaaccggtcagcagggaggtgcatcctttgtgcaggctagtcccacgacaacaactatacagatccaacaacagccagccccgcagcccacgcagatcagtttgcagccagcacaggccacctacatgacagagacggtgatgagtcgccagggaacggccgccagtccgccggacacaactacctgtagtccacgaagtccggagcggccttccagccatcgcagcagcggtagcgatatggtacaatgtgtatccagttcggagccggatgcagctgtctctccccaaagtactgagagtcggcagtcgccctcttcaacggactgtgagaggagcatttgtaagaacaatgtgtttacccagcccagtgggatctacaagcattcggagccaaagatcagacgcatccacatcacctcacagacgtcggcggagaacggaattagcctgatgcagggacaaggtatgcgcctggcgacatctaacacaaactccacatctgcatccatgtctataacatcgtcatcgtcggcaccactaaccacaactgctctggctggtcaacgccagcttatgcaccgccagcaggccgtgcaccatcacatcccaaacatctccaatagccatccaaacaccttccttcatagccacaaagtagttaactttgactatcagggtaaggacccatcgctgaccagcactaattgcatccacacgctaacccaccaacacaacaccacccgtttggcgactgcatgatcgcctgcaccacctacagcacatgtacctgcacctttgtttagtttagaatctctacccttcgtctgtacttcgctgggtgctgggatcaccattgcccccgagtaaccaaattcgtagtcctagtttctatgagtcgagaagacgacggtcaggacgcccacgaaacgttcgcgccgaccgcaacgaggggcagcgcgtgcggcgccctcggcgtctgataaaagtttcccgctgccaccacgatcctttgccattggggaactgatatggggtccagctcggggccatcccgcctggcccggaaagattgtcaagatgccagacggagtgtgcacgccgtcgcagcaattcgaccacgtctgggttcagtggttcggcggcggcggtcgttcgacctccgagctaattccggtcaactcattgcagagtctctccgagggtctggaagcacatcacaaggcccagaaggatacgagaaagagccgcaaactgaactcgcagctcgagcgggccatacaagaagcaatgactgagttggataacatttcagcctcctcgacacccgcagccacatcctcgtcatccgcaaccatctctgctgttcccgcatcagcaggaccagctgtaattggcggacaacagcagtatcagcagcagcagcagcagcaacagcagcagcaatcgccctcttcaacgaacaacaaaataaatggactcgcgcggagcaagcgccaggccaacacaagtggggccagcatggtgctgaccaccagtacggcggccacattgagtggcctcttcaatcagcagcgagccaagcccatacgcattgctccggctccaccggtggccacaacgggcacaggcaacattgggacgatagcagcagctggagctgcagcagcttcaactggaaccgggacagcgacaacatcggcccgttccgagatcctgaagctggccaaatgaccagcgctgtcgacgttatcgtcgacagtgagcacagccagctacaccctcgttatcgggcataagtagtgggcagcaggaggatacataccgccaggccatatatatagagttatccatacatatgtgacgatacgagtatagagtttagtgttaggtgtcaggcctcagctttggagtttgttgttttgtattctttgacagactccccgcttagttgcgtcgctgggcggcgcgcgccacactttcgaaatagacaataaaacagcaagatgatgttaatgaaaatcaagttacaaagagcagttctaacaattagcgataggtttttggcttcatagacagcgcctcggcgcaaatttgcgttgttttgtatatagtaagcaccaaaagctaccaagatgtttcgtattaagtatttatttattgcatatagatccttggtttttataggttttgttttcgttgcaatttatagacctaccgattatttgtataaataggtaacctaagctgatacttagccactaagtttaaagaacatccacaacaattacatttgccttgtcaagcaaatgatatcaaatcaaaaacagctactgattttcatttattgtgattgcacaaattgttttttaaactctagaagaacaaattatttatgtcaaacacaaaaaggtaaaaatcatgagaaaattaggaagggtggaaaaaaattatatttataaattgttattatttatttagttgaaactattgtaaaattataattgtaaaacaaaaatgaaatcacacttagcggaaacacacggagcaaataaaaatttaaaaaacaagataa

SEQ ID NO: 31818 - protein, 1178 aa, DROSOPHILA
MSTTIAARQMSQNNQLYAKNVAKANNASSNGNINRKTATSYNGNLAPGWRRLTNNNEVAYISPSGKTLRTQFQIKDYLLTQGTCKCGLPCPLRPEYLFDFNAQPLKLPTEASTATPTPCRHQRRFLESQQLQLPQQQQQQQHLQHQQQQQQAVKDVSVDVAVSVSGPAAVSDVFSTLMTSTARTATMVTPTAATSPAQAATTTTHEMANKDADCHKYGNNKLPATNRTATTPTPAPTPPPQHPNGMPTSQALALGGVPVGVHPKRPTGGHVIKQPASVLGPPCTPPLAVGGANTVIQQQQPLQQHPNFKDDPAGYLQQQTALLHNSLGVGLDATKTAAGTSTARALPQEPIVHSSQQQQQQQQQQLQQQQQLQRQKIRRLSLFGKWETDPAPATNSQPTNGTRALQVDAAAFARPQKPQVTCVTLVPPPQESPVSSSAAETLEKRPEQVGAISTSHESPRQSLSSPTDSVDSAKSTPSASPKPQTQVPMQPQLLQMRPHLQANLSAQTPVTVPAHVRVMRQQQAQIIPGQRLPVASSSAAMATMTRSIVTSTAGTSTITGRPVATTLNNSNPTVAQLQSMANAMNGAGGGGQLIMTSSGQLLVIPTPSKQTTQHHRPGQPGQGVIIQQQQPAELHPQPGGGYIVSQPSPVAAASSSSSSSTVILNSGGAKLLHHQIITSQAGQINQATSGGSGNQPQTVLLNTLPNGGYIVQQQPQTQSPQQAEQILAMPQPPPAQTLIISSPDTKRRARKRKSSVCHTPPPSGSPAKIISPQISPSIPNQAPALLHQQAAAAAAAAPQFQQQFQLSPGIQGIVVNKPNPPQQPQTQQLLLQNGQILQQVNLIGQQLLMPAGLVMGPDATLLQIQNMPATSLMTPQGPVMLRTPSPQNKPSFISPSAGGQQYLVGANGQLSPIGQIYSTPMGLVMPTGQQGGASFVQASPTTTTIQIQQQPAPQPTQISLQPAQATYMTETVMSRQGTAASPPDTTTCSPRSPERPSSHRSSGSDMVQCVSSSEPDAAVSPQSTESRQSPSSTDCERSICKNNVFTQPSGIYKHSEPKIRRIHITSQTSAENGISLMQGQGMRLATSNTNSTSASMSITSSSSAPLTTTALAGQRQLMHRQQAVHHHIPNISNSHPNTFLHSHKVVNFDYQGKDPSLTSTNCIHTLTHQHNTTRLATA

SEQ ID NO: 31819 - DNA, 2949 bp, DROSOPHILA
ctgcgtaagtctcttgcggagccttttccagtttcatcaccgtgaccattggatcggtgtcgtcgctgagaactccgactacagcgtgtactttgtggttgagcagcacggagcagcctggttccagctgatccttgtccacgaaggacaggatgctaacatagtgctcggagcccaccgatgtggacacgatggcgtggttgtcgtcgatgatctcctccaggttgcccacggacatgggggtgccgcgcagatcgtcaaccttagagcgctcctcctcgttcttctcgtcctggggcttcaggcgctcctggttgcggatgaactcgtcctccatcatcaggtaatccttgatgcgctccagcttgagcagcttaaggcggcagcgggtgtggggcgtgacctggggcagcttcatggccgcatctggaccctttgcgcgcctcttcttcttgccaacgcgcgttgggattggaggctcgtacttcttctttttatccttgtcatctttcttttcgccagctcccccttgagccgattggttttgtccctgcaaatgtattgttcccgatcgtaaatgagttcagggtgttctgaaggtgctattttaccattttgtcttggtgcttgctgctttgccgaacgtttgatgaactttttactctttattgtcggcaacaaaattactagtcattcgcgttagctgtgttgccgtactatggaaacatgaaggtctggcaactctaagggtgaacaaatattttaaaaaaacgtgaaaattaaaataggcaagaaatgcttaagcaatcggattaaaacaatagtaatgattaacaaccaaaatataaatgaattcaagacttgaaaaaagcaaattttaaaagtcactgttttatatacttatcgattactgtaaacaaactgaatgtttcagtctggcaacgtttgcaattagtgcgaaaagagcatttgtttaaatttgttatattgcgaccttttaatggatcaaaatgtcaagaatgttgatcttaaactggataacattgaggttctgaccagtgggacaacagcggagttcgtgaatggcatcctggacttcttgctctatcaacgccggcaaatccccttcgtgtacaaaacatacaaatattatgtggataaatggtcagatgctgatgaatcgggagaatccaaggatcaggagtcctttgctcattaccaacgcaaccagcagcgctctaaggcaaaggccaccaaggaatctattagtgacatgagagaggtgaggttccccttacatccaggacttcttttggtctttacttgccagttctctcctacagatcatccgacaagccttcaggagctctgaagtgaagagcctgcgatttctttttggcaacaatatgttcatgccctcggaggcctatactctgcacataccacatgattccatatccagagatcactattgcgagcaccatgctctgcccgaaggtcgcatcaaccaggcgctgctccgcctgctcacctgcgaggagctgtacaggctattctccaccgaactaaaagtcaccaacgtgtttctagaaatggagctccttacagactccgatcgaccccaaggatcccattgtgactcctttaatctaatcccaaagcatatattaagccaacttccgcgcagctgcaagaacatacacctgcatctactgcattgcagtgaaaacacaccgaatgaattacgctgctgcaaggagatggatatttaccacgatcttggcgtgcggaatctggataaatctggggaagacgttagccagaccaacgaagagcatgacgttttgaaagcagcaaatgaaaccagcggttggtggcaggccgaggtcatagttcgcggtttcagagctcctggcaaccaaaaatcgggagatttgtggtctagctaacattttataacttggattcttgctattcggcgtgtttgtgtcaaaaataaagtttcgaatcgtttatatttcaagtattaagttattttattatgtatataattgtttaattttatttttggtttcgatttattgagaatgttttgaaaacccaaggcactcaaagatgatccatcgtggtattggtattatcatcttaggtagtgataatcatggaaactggtgcactgcgctctcgctgcttggccacaatcttgttggctatgcgatccaagttacgttgtccttgcggagtcagcttacgaccaccatccgggtgcctctccaccatgttagcagcttccaaggcttgaagagcctgctcatgtgttagatacatgctaagtaatattaaatataaccttaaagtacaaccatttcccactcaccttgcgaatacagccatccgatgagcgacagtgcttggacggacgaacaccgttgcgcttgcgcccgctatagaccttggtgaaggccccaacgccggcgggactgcgcaggtacaggtgtctcataatagaggcgcagcgagtgtagaaccagtcgtcgtcggtaggagcagtctccttgaacttgccagtcttcatatagacggcctgttcgggcacaaaaatttttccggattttttgagaaaagcagccatgtttttggtcagaacgtgctgatcgatttcctttactgtgactccaggcatgttgctctctacgttcttgaaagcacgtttttaaggctcatgggtccgatatatgtatgtatgtatttaaaaaagtcttaccttttgagaagaaaaaggtttgcttccggttagtttgctgactttagtcaaaatggacgattggcaagtgacgtttgaaagagggaccaggtcattgaccccaaaggattactttccgatagttttgtcgtgcagtattggtgaacttggcaattcttttcgaaaacttaacctataaacttgga

SEQ ID NO: 31820 - DNA, 888 bp, DROSOPHILA
atggatcaaaatgtcaagaatgttgatcttaaactggataacattgaggttctgaccagtgggacaacagcggagttcgtgaatggcatcctggacttcttgctctatcaacgccggcaaatccccttcgtgtacaaaacatacaaatattatgtggataaatggtcagatgctgatgaatcgggagaatccaaggatcaggagtcctttgctcattaccaacgcaaccagcagcgctctaaggcaaaggccaccaaggaatctattagtgacatgagagagatcatccgacaagccttcaggagctctgaagtgaagagcctgcgatttctttttggcaacaatatgttcatgccctcggaggcctatactctgcacataccacatgattccatatccagagatcactattgcgagcaccatgctctgcccgaaggtcgcatcaaccaggcgctgctccgcctgctcacctgcgaggagctgtacaggctattctccaccgaactaaaagtcaccaacgtgtttctagaaatggagctccttacagactccgatcgaccccaaggatcccattgtgactcctttaatctaatcccaaagcatatattaagccaacttccgcgcagctgcaagaacatacacctgcatctactgcattgcagtgaaaacacaccgaatgaattacgctgctgcaaggagatggatatttaccacgatcttggcgtgcggaatctggataaatctggggaagacgttagccagaccaacgaagagcatgacgttttgaaagcagcaaatgaaaccagcggttggtggcaggccgaggtcatagttcgcggtttcagagctcctggcaaccaaaaatcgggagatttgtggtctagctaa

SEQ ID NO: 31821 - protein, 295 aa, DROSOPHILA
MDQNVKNVDLKLDNIEVLTSGTTAEFVNGILDFLLYQRRQIPFVYKTYKYYVDKWSDADESGESKDQESFAHYQRNQQRSKAKATKESISDMREIIRQAFRSSEVKSLRFLFGNNMFMPSEAYTLHIPHDSISRDHYCEHHALPEGRINQALLRLLTCEELYRLFSTELKVTNVFLEMELLTDSDRPQGSHCDSFNLIPKHILSQLPRSCKNIHLHLLHCSENTPNELRCCKEMDIYHDLGVRNLDKSGEDVSQTNEEHDVLKAANETSGWWQAEVIVRGFRAPGNQKSGDLWSS

SEQ ID NO: 31822 - DNA, 2174 bp, DROSOPHILA
aaggaggcttcgatgactctacctgccggctttggcagcacctagagcttggctaccggcctgcgatattggttctcctgtttcaatccataaaaccagatagtcagataactctataatcaaacccataacagatcagcagagaaagtggccaaattgtaaccgaaaacgaatatttaaacaagagcaaaactccaatgcgcaagcaaattaaactttatctttcaaaggcgagaaatagcattaacaagcaaacaaaaagtaaaaatttaaaacaaatagatgtaaataaaagttggtgctgtcaagctctaagtactttgaaccaccaccaccaagatgaaacacacaccacccaccaaccaaccaaccaaagaaccacccactgcacaagaaaactgtgaccaccgctgttgaacttgaacttagccaactgaagccaccactatccacctcagtataccacaccacaccaatccacacgaacacaccacaccgcaaaccacagcgcctagaagttgtctacagcatttttgattaatttatatgcgataattttctttgatttccccgcttggaggaacttgatcgaattttgttccattttcgttccgtttctcaactgcaagctttcgtaatccatcattcagtatcgaaatatctataaccgaaaccattttgttgattgacttccgttgcattttgcctgatttctcagctagcttttgaagcacttataacgaatctaagctaaggcaaacgaaatttatttcctttacgttaacgctctattttcttactctcttttctctccaaccgaaatgaaaatacacaaattcacacgaataccaaacaaacttaaatctataaaaaattgaatttcttaactaattaatgcaccggacgctttgaactttaactttcgaattttctctatctctacctaaataccaccgttaaaaatgaaatgtcaattgaataccgttaaccgcaggccaccatgttgaaaaagaacaagctgaaaatgaaacgccggaacacggaacccaccatgatggtggccggctcggccgccccccctctgtccctggccctaccgcccagcgtaggcgaagtgggcgtggctggggagggcgccgagggcgacggcggtacgaacaacacggatttctgaatatggtacagcgagcgtctgatttaacgtgctaattccagcgcagaaccaaactgcatcccacacagaccacagacccacccacccgcgaaaagcccacccgatccccccacccaatagcaaaagcagcagcagaagaagcaaaaggagcaggagcagaagctaaagaagaagccacttaccatctcagcagtccatagtccaacactgaacaccaaacaccacagaaaccaaagagctggcaactcgaaaatcaaaagctgtaatcaaaattacttgtataaagtgtccagtccacagtattagatcggattatatgacgatgatcagtttagcagctcagcgaacccggccgcctttccacggtctgaaatcagtacgttaaactcaaacagctcgaaccaacactgtccgctcgccatttgcatttcgtacagtgtagaaagcagcaagatgcgcagcgggcagacatgaaactaagccaactcaaatgttaaacaatagagggtatttatagtaaaggaaagagatttaattcaaaagcactcagcaatagtctggccaagttgtatcaaattcaagttcaattatgttccttctcgttttgttcctacgtaagcgacagcagaaaccgattagtgataccgttaaacagaaagaagcgcaagcagtagtaaaaaataaacagggagaatgaaaaagaaaacaaaaagaaggagtaaagctaaagctagagaaacccaagaaaacaaaacaaaaagtacaaaattgttgaaaattgtttgttataactaaatgaaatcgcgtaaaaccaagtaagcacacccgaactacgacaaacaaagtgaaatcaaagaaataaagctatgtattaccaagtaggtaaataatgttgtgttccagcgaaccccagtgttccgaaaccaacgtgaaaaggttaaaaaaaaaaacccagccaggtcaagatacaaacgtacagcagatgcgggaaaatttatat

SEQ ID NO: 31823 - DNA, 174 bp, DROSOPHILA
atgttgaaaaagaacaagctgaaaatgaaacgccggaacacggaacccaccatgatggtggccggctcggccgccccccctctgtccctggccctaccgcccagcgtaggcgaagtgggcgtggctggggagggcgccgagggcgacggcggtacgaacaacacggatttctga

SEQ ID NO: 31824 - protein, 57 aa, DROSOPHILA
MLKKNKLKMKRRNTEPTMMVAGSAAPPLSLALPPSVGEVGVAGEGAEGDGGTNNTDF

SEQ ID NO: 31825 - DNA, 2994 bp, DROSOPHILA
gccagcaagttggcgctccctctgcgaccaatgcttgagcattctcggcagctttaccgaagaactaaccgagtcgatgcagaagataagtatactcaagtgcgcccagagtctgccgatgccgaagataaccgaatcgcttacaactagcttgatggccgagaaggtgttgctgcggcaatacaaccagaaacacggcattcgacccattgtatcgcccagtcgcgaggttgctgttgaaagtccagcggatggcatccgtcattttcccaactggtgtgagcgtgtatccacgcagttggagcagtccctacaacggttgctacagcgcgttcccggcattgtgtacttattcaacgaacccgaaggtgccaagacgacgtttctgctggccaactccctgcccgtagtgtatatgactcaggctctggctcaggtgtgcgcagcctcgctcaaagaggatccatatggagtagtgcagaacgatttgcctgctatcatcaaggcgatcaacaagctgcgaaatgagctagataagctaagtagcgtgataggcaacataaggatatccagctctagctttaacgtgcttcgatgcgcagtgcgacgcagtctgtacgccatctgtttgtcgttttgcgactatctggacgatctgctaccccctggagaggaactgcgccagctgcaggacctcgtctgccaggagtaaacccatccatcactttatacactcatcttgtacactgttttgcatctctttagttgtttgtctgcggtaacaataaaaattaataaatataactacaaacgtccaatagttatagaatactattgacttttatacttaaagtacgaaatggtaacacgcgatttgatcataactagcactgatgaaatggtctgcaggttgaatgtgtacaagcgggcggccttactgttcctccatcgccactgccatcatgagcagggccagatcctgctctagctgccgctttggtcaaaggtcggctgcttttgtaggcagtgagctggcaacggcaacggtggctgcctctcccagagactgctccagctgcacggccacctcatccaggtgctggagagcctccttggccttgcggttgcgtccgtccacgaagatctgcgtgtccaggaagtgcagggcgcggaaggccataccgccttgcgggtcatataagctgtcgaactttttcggattcctggcgctggcactctggtccggcgtgtcgggatcgaagggcacgtattcctgaatcggctccttgtgccaccggaaaatgtttcgcgaatctgtaaggagttggtatatgattacgtgatacttgatttcggttgaaaggaaatggaacctagatcagccagcactcgcgtcatttctcgtatctgggcatcctgtcgctccagccgaaagttcatctccgtcagcatattggttagttccatcttctccgattgcgccaactcgtttttcttgttctccttgatggtttgactggaaagtggttggatcaatatagctctggaatggctttggatctctgtttaccaaccgtgagtactcgaaaatcaaaagaccggctccgatcgagaagatgatgaactcgccaagcagattggctcccagctcaatggccatcgcctcgttcagcggtggaacattaacgcgaccacccatgttcagggcccacatcttggtcttcacctctacccagttgtagactgaaaatgtgggattagagcccgtaatctcatctaatcacatcgcaccacttacactgtgcgggcggcatgcatatgtacttcctgaagaaggggctcgatttggcattggacttaatcacgttggctatcggcttgctgacctgcttgatggccaaaatgccgagcttggccgccgggaagacgccaataaccattgttttactttactaattttttactaataactattacaaaatattcatgcaaaattagagatgtgttttaggtagcggtgtgcgcagggatgcacgatagtgatgacaatttgaaactggaaatataaccgtaaataataggcaactttcgataggacgaacttgaaaattactcatttatttattacataataaaattatacaaaaataaatccttatttttcaacgttttttagagctgccttaatccagttgatttccctttggttccgttccacatctgcactgatacagtccacgcactcatctagaactcttttttgatcctcaatttcctggttctgttttttggtttttgtatatgttctataaaaacaaataattgtataggaatacaaattattaagacatttgtaatagttcacactttgaaagctcatagtatatgagacccgcgccgatgccaaacacaaaagcctcactcagcatatcagcgcccaatctggtggcgaccggagtggagaggggtggaatccgcctgggctgctttaatcgaagcatacgaagcttggaacggacctcaaaggtgttgtagagctgggcaggcggaatgatgatgtagcgccgtataaagggatgatgcttgcccatccaaatcagaaggtctccgaatggcttgctaatccgtttcacgccatgaatgaaaatttttccaactggaaaactaccaatcaccattgtgcgttacataaaatttagcacgaatatactggcgactgagatttccaggccaattcagttacattccaaatcccctgtattgcaatatgccgtataggtttccctacttcccagcttgctcctcagctgattgatttccttggtctggcgggcgaccttgttggtgaggttaccaattctttcctccagcttctcccgatgcatcttgtgtttttcgtgcttcaacctgtcattcttggcttgcctaaaagcatatttgaaataagccaagatttcttcaagataatcgaggcttgcataccttttgaactcg

SEQ ID NO: 31826 - DNA, 822 bp, DROSOPHILA
ttttgcatgaatattttgtaatagttattagtaaaaaattagtaaagtaaaacaatggttattggcgtcttcccggcggccaagctcggcattttggccatcaagcaggtcagcaagccgatagccaacgtgattaagtccaatgccaaatcgagccccttcttcaggaagtacatatgcatgccgcccgcacagttctacaactgggtagaggtgaagaccaagatgtgggccctgaacatgggtggtcgcgttaatgttccaccgctgaacgaggcgatggccattgagctgggagccaatctgcttggcgagttcatcatcttctcgatcggagccggtcttttgattttcgagtactcacgtcaaaccatcaaggagaacaagaaaaacgagttggcgcaatcggagaagatggaactaaccaatatgctgacggagatgaactttcggctggagcgacaggatgcccagatacgagaaatgacgcgagtgctggctgatctagattcgcgaaacattttccggtggcacaaggagccgattcaggaatacgtgcccttcgatcccgacacgccggaccagagtgccagcgccaggaatccgaaaaagttcgacagcttatatgacccgcaaggcggtatggccttccgcgccctgcacttcctggacacgcagatcttcgtggacggacgcaaccgcaaggccaaggaggctctccagcacctggatgaggtggccgtgcagctggagcagtctctgggagaggcagccaccgttgccgttgccagctcactgcctacaaaagcagccgacctttga

SEQ ID NO: 31827 - protein, 255 aa, DROSOPHILA
MVIGVFPAAKLGILAIKQVSKPIANVIKSNAKSSPFFRKYICMPPAQFYNWVEVKTKMWALNMGGRVNVPPLNEAMAIELGANLLGEFIIFSIGAGLLIFEYSRQTIKENKKNELAQSEKMELTNMLTEMNFRLERQDAQIREMTRVLADLDSRNIFRWHKEPIQEYVPFDPDTPDQSASARNPKKFDSLYDPQGGMAFRALHFLDTQIFVDGRNRKAKEALQHLDEVAVQLEQSLGEAATVAVASSLPTKAADL

SEQ ID NO: 31828 - DNA, 2615 bp, DROSOPHILA
gttgtagactgaaaatgtgggattagagcccgtaatctcatctaatcacatcgcaccacttacactgtgcgggcggcatgcatatgtacttcctgaagaaggggctcgatttggcattggacttaatcacgttggctatcggcttgctgacctgcttgatggccaaaatgccgagcttggccgccgggaagacgccaataaccattgttttactttactaattttttactaataactattacaaaatattcatgcaaaattagagatgtgttttaggtagcggtgtgcgcagggatgcacgatagtgatgacaatttgaaactggaaatataaccgtaaataataggcaactttcgataggacgaacttgaaaattactcatttatttattacataataaaattatacaaaaataaatccttatttttcaacgttttttagagctgccttaatccagttgatttccctttggttccgttccacatctgcactgatacagtccacgcactcatctagaactcttttttgatcctcaatttcctggttctgttttttggtttttgtatatgttctataaaaacaaataattgtataggaatacaaattattaagacatttgtaatagttcacactttgaaagctcatagtatatgagacccgcgccgatgccaaacacaaaagcctcactcagcatatcagcgcccaatctggtggcgaccggagtggagaggggtggaatccgcctgggctgctttaatcgaagcatacgaagcttggaacggacctcaaaggtgttgtagagctgggcaggcggaatgatgatgtagcgccgtataaagggatgatgcttgcccatccaaatcagaaggtctccgaatggcttgctaatccgtttcacgccatgaatgaaaatttttccaactggaaaactaccaatcaccattgtgcgttacataaaatttagcacgaatatactggcgactgagatttccaggccaattcagttacattccaaatcccctgtattgcaatatgccgtataggtttccctacttcccagcttgctcctcagctgattgatttccttggtctggcgggcgaccttgttggtgaggttaccaattctttcctccagcttctcccgatgcatcttgtgtttttcgtgcttcaacctgtcattcttggcttgcctaaaagcatatttgaaataagccaagatttcttcaagataatcgaggcttgcataccttttgaactcgcctacaatcagcgtggcgccaataatgaagatgaccatttcgcccaggatatcaccgcccatttggatagtcatcgcgtcagtgaggggcggaattagacgaggttgtccaagtcccagcatccacatcttggagcgcacatcaattacgtggtatactgaacattatactggttatgatgataactggtgggcattccacggattgtactcacatctcgccggaggagcaacaaccagggttttgaatgacttattctttttggccgtttgcttgatcagattgccaatgggcttgctaatgtgcttaatggcaagtaaagctagtttcgccagtggaaagacgcccacaaccattgtgcaatttctaagtttcgacagaattccctaagtgccctacaaccgaaaattttcaaatttcatataatcagtttttcaaattatttctaaactcaatttctgagtcgcaataactttaagtctgtggatatccaaacccagcaatttaaaacatgtactctttttaaacttcttgttcttatttaataactaacagattcttgaaagatgtttagacagtttagtttatgaatcggtaatatttggcatataaaacccggtcacacctgttactaaaacgctggttttgtttgttattaaatctttacctctgcatgctttaatattcttcctaaaaaataatgtcggcacttggggattctgatgatgaaactgagtttaaagagatcagctcgactaattatcatcgtgtgcaggaaaaggtggcaaaggtaagtttaaaatgaatttggcgtggccagctttcatgatgaaatcagctggctttacattgccgagtaaacacgacttctaaataccctttccctatcaagataagctatgcagatggcgttgccgatggcagggaaaaggtcttccaagagagcttcgatgaaggctttgagaatggctttaaaactggattcgaactggccaaactgagtgccttctatgaaaccataagcaatgcggcgggagctgaaagctccgaatggaatgcagaacgagaagcttatcaaaaactccaactggcagatgcaacaaataaagcacacttcacatatttggagcatcaaggcgctccactcaacgttatatccgaaaaacaaaagacctacgtggacgacctcctaggaaaactggcacagcaactcccggcaactacgaatttattcacatcggggagcgattctagtgttaatgtggtttaatgcatgtgtttgggaattatcaaaattaacttgaaagtatatcttcgcgcgacttataaataaagaccctcgggcgtgccctcctt

SEQ ID NO: 31829 - DNA, 501 bp, DROSOPHILA
atggttgtgggcgtctttccactggcgaaactagctttacttgccattaagcacattagcaagcccattggcaatctgatcaagcaaacggccaaaaagaataagtcattcaaaaccctggttgttgctcctccggcgagattataccacgtaattgatgtgcgctccaagatgtggatgctgggacttggacaacctcgtctaattccgcccctcactgacgcgatgactatccaaatgggcggtgatatcctgggcgaaatggtcatcttcattattggcgccacgctgattgtaggcgagttcaaaaggcaagccaagaatgacaggttgaagcacgaaaaacacaagatgcatcgggagaagctggaggaaagaattggtaacctcaccaacaaggtcgcccgccagaccaaggaaatcaatcagctgaggagcaagctgggaagtagggaaacctatacggcatattgcaatacaggggatttggaatgtaactga

SEQ ID NO: 31830 - protein, 166 aa, DROSOPHILA
MVVGVFPLAKLALLAIKHISKPIGNLIKQTAKKNKSFKTLVVAPPARLYHVIDVRSKMWMLGLGQPRLIPPLTDAMTIQMGGDILGEMVIFIIGATLIVGEFKRQAKNDRLKHEKHKMHREKLEERIGNLTNKVARQTKEINQLRSKLGSRETYTAYCNTGDLECN

SEQ ID NO: 31831 - DNA, 3212 bp, DROSOPHILA
caaggaaacactgcacatcgttttttacacccttgcgttatgttttttgaatgtatttaaaaacaaaaacaaaatgaaaaaccaaaaccaaataatgaaaaacaaaatatgaaaacacacaaaacactgaaaaaaaaaaccaaaaatagaatgtaagtttaaataatatgctattcaaagaaatccaaaacatgattacccataaaacaaaaaaaaacgcaaaaactaaaaatactaattatagtacatacattgatgtagtgttaattgtaagatcccaggaaattgtttcatgaatgccagaaaacagaaaaacagaataccgataccaaactccaagcagtcgtagatgcagatacagtatcgatgagattcagctgcaaagcccgtaaatgtacaagtaactatttttctctataccaaaagtaaatctccaccatttttgctccacatttaagaaacaaactcggtgcaggcaaagattgaatttagacgcaaaaatacagcgatcaggggctaaatgccgtgcgatcaagaaatttttaattgaattgtaacagactacgcaagcaaatacggaatttaatattaaatgtacaatagcgtcgctttaaagtctataagaacattttgttgcaatgcaaacgtgaaatccaaacccaaatccgtttgacattacgacagattcgaatgacatcaacaacaagaaaacacacacaacacagaagataactgcaaaataaatgtaactgacataacatgttgcattgattgtttcatttcgaatgcttgggattgttggggatgatccgcaatacgtaagtatctttataaatgaatgatttcagaaatattaataatttggttttactatatttgtaacatggaataattaattaaatacatatatatatatatacattacatatcacgtatgttggcttaatacatagggctaatatctctagtttccttcactacaaagataatgtgtgttgccggttgtctgcctcaatgataaggacgaggacgaaatgacatacaatgattataacgcacatgatgagaaatacgtagagaattacaaactgctgctgattgatcacaaacgtcaactatttgttctgttccgtgtcggaggatgcgttcgaaacgatcggcggggtcgacctgccgtcgtactgctgctgattcaccaaccgctgtcgctccaagtacatggaaaccttgatgttgcgcacctggtggttgtcgatcagtttcagaagggcgatgacggcgatgccaacggaaattgcgaatgaaccccatgcgccaaactgtaacaaaaatcaatagaagtggttaaaagagtttattaacttaatttcgcatgcacaactgaatatttggttttacataaaaatataaaatattacgtatacgtaatcaaacattcagaattgccacagaaagcaaaaaaaaaatagatgagaattttttttttgtatcatcttacctgagtggttcccatttcaatgtaaaatccggaggtgttaattttttccgtgtcgccgtggataatgttctgaccggcggaaatggcacaggatgggaatctctcggtcatggaatcgcaccagacaataaagcccagggtaatgaaaatagccgacaaaatggacatagccagcatccaaatgcccagaacgacgtcaatgaacagagctataaacgaggcctcctccttcatgcgggcgtatctatttggcaaagaaattcactttctagatgtcaaaaaccccgaataatacccacaagatacatacctataaatctgcaccaccgaaataattagcaggaagaacccggtaatcaggggaaagttgcagaagccattggaagcccactggacatcgaacatgccgtcctcctcccgccatttgccagttgtaaagagcaggcagtggccactgtgggaaaatagaataaagaaactcaataatttacaggggaccaaagaggaactgcgcacttaccagaattggtcgaggtttataaacaatggcacgacgatgcacagcgacaggataaacaggatgacatggccagctatctggcttagctgcagcacgttggccaaagccattttgcttttgatttcaacaaaaacaaatgaaactccacaatattcagacaaacacggcaatgcacttttggtgttatcgataagcagtgttggacagcaccctgcagctgcctgcattggtatgcgcaattatcgatatatacaccctggggccatcattctcgttaagccatctctagttcgccactgaactcgtaaaaaagtgtaaaatttgtttacattgaaaaaaggtaaaatattgttcttgagggctacctacggtgctccctggctcctagatgggtcagccaagacaaagggccgtgtgcatgtgtggcgcgtagccctttataagtgcggggggtggggggaacagccagggcgaacaaagagcaattaatgcaataggaggaggggggctttctcctccgattttccccacttccccgaattttccaatagaggctgttgtgaaacctaaggtgaagatcgctcgggcgaattaacatggaaatccatttaagagcaccctcctctattgtctatctcgcacacgaccttttgcagacgcatcagcggatcagcggacgcaattcaatgaggtgcttatgagctaactagcagcaggacggcagccaaggaacacggggacgaggtctggatcagttagcagggagccaggaatcacaggctagaggtcagcgcaaactggagggcagcaggtgacctagtttacgcagtagcaggtaagccaaggccttggaattcgagaccagcattaaacaccaccaccgattttcagaagacgattagaggactggcggcagcgtttctgtggcaactcctactggggctgttctgttgtgttaattgaacttagagcatcaacgtgcactgccattagttgtaacctcaatatacctacctaacgtaattagtgaaccagttctgacacagaacagcatgtccaactcccactacaacaactaccagcagcagcagccgcactccagcaacggagatccggaataccagcaccagcagatggtgcaccagccgcaacggttctccaacggccatggcatgaagaccgtcgctgtgccag

SEQ ID NO: 31832 - DNA, 901 bp, DROSOPHILA
cttatcgataacaccaaaagtgcattgccgtgtttgtctgaatattgtggagtttcatttgtttttgttgaaatcaaaagcaaaatggctttggccaacgtgctgcagctaagccagatagctggccatgtcatcctgtttatcctgtcgctgtgcatcgtcgtgccattgtttataaacctcgaccaattctgtggccactgcctgctctttacaactggcaaatggcgggaggaggacggcatgttcgatgtccagtgggcttccaatggcttctgcaactttcccctgattaccgggttcttcctgctaattatttcggtggtgcagatttatagatacgcccgcatgaaggaggaggcctcgtttatagctctgttcattgacgtcgttctgggcatttggatgctggctatgtccattttgtcggctattttcattaccctgggctttattgtctggtgcgattccatgaccgagagattcccatcctgtgccatttccgccggtcagaacattatccacggcgacacggaaaaaattaacacctccggattttacattgaaatgggaaccactcagtttggcgcatggggttcattcgcaatttccgttggcatcgccgtcatcgcccttctgaaactgatcgacaaccaccaggtgcgcaacatcaaggtttccatgtacttggagcgacagcggttggtgaatcagcagcagtacgacggcaggtcgaccccgccgatcgtttcgaacgcatcctccgacacggaacagaacaaatagttgacgtttgtgatcaatcagcagcagtttgtaattctctacgtatttctcatcatgtgcgttataatcattgtatgtcatttcgtcctcgtccttatcattgaggcagacaacc

SEQ ID NO: 31833 - protein, 233 aa, DROSOPHILA
MALANVLQLSQIAGHVILFILSLCIVVPLFINLDQFCGHCLLFTTGKWREEDGMFDVQWASNGFCNFPLITGFFLLIISVVQIYRYARMKEEASFIALFIDVVLGIWMLAMSILSAIFITLGFIVWCDSMTERFPSCAISAGQNIIHGDTEKINTSGFYIEMGTTQFGAWGSFAISVGIAVIALLKLIDNHQVRNIKVSMYLERQRLVNQQQYDGRSTPPIVSNASSDTEQNK

SEQ ID NO: 31834 - DNA, 5442 bp, DROSOPHILA
attgcattcggatacaccgatctatgttgtagccgcagccttgctggtttctttttaaatcaaacacacacaaactaaaactaaacaagcgtatatatggggatatatattaccgaatcaatacaatacaaaatgcagatatataattcacgtaaaatgttcagcaattatattatagatttaacaactaaaccaattacattactaattctaattctatgcgcattaaataaaggtcgaccccttctgagtcgcacaagacaatgcaaaattatcgtccgtctttcctcttggggatcgtggaagcgaaatggagtttacacctcaatgttttggcattacacgtgttcaatgtatactgtttattgttccattatgttgtgcgttgttacatggttttgtacttctaaatctagtcgataatatcgatatatgtttgggctttacgtacggagtagtctcaacaagttgctaagaaaagtctgcctcttggataaatggctacaaaaaactgcgttacgcagcaaggctaatcaaacaatctaacaactaagctagtaacagggcaagttagtctatggctaaagcggcgagctagcgctcaattagtataattactggcatacggtataaatgtatatattcaatatatatagtcaatagatcgcattgattgcaataaagtatgagtccgtcgcgctggcttctcaataagcagtgcaattataatagatggattgtttatacaccgcagcaaaatcgcattccatcggtttgcatcataagtgtacatataaattactttaaaatttgtatggcagtacaatcaacttaatgcggcgccaatttctaaacagtaaatcaatacgtactttaaatagctaagcgaacaaaaaatttacgtatagtttcttcagcgtgtgattcacctccaggtccgtcccaatcgagttgagtctcagtctcaatgcttgcagagaaactgctctaagcactggcactaggtggccgacaaggcgttccactcgaaccgcggattctttgagtgcgtcaccggaagacattcgggttcaaccagcttccagacgccgtccacctgttccaccgttgccaggctgcagtaggggatcttgtggatgacttggcgcaattcgttcgtgctgcgtggaactccaccggtcagttgacgggaacaagtgtccagtgtggtggcatgggcaacaaccaaaatatttccagctggaattaaagaaaattggcattcgagtattttttaaaaccacatttgtataaatttacttgtctgctccaatagctggaggataacgtcatggttacgttcataaaactgctcggtggactcctttaggcgagcagttagctcagacgctggctgcaccggctcataatccaaatcaacgtcgaacttggcctcggtcagctcgttcttagtcagccagtcgggtacaccgctcggataccaggccatccactcaaacaggcccggctccagtttgattttttgcttgcccgtaagcttcagcccctcaagcgcactggtgcaagtctggatgcagcgatacgagggcgaacagtaaacatggtcgatctgcacttgagcctccagcaaagcttgaccaataagattggcctgatagacacccacatttgtcagcggagaatcattctgccagccctccggactgttcttccgacgaggcagcgtcttcggcatgtttaaatccttcctcatgtaatttccaaactcatcgaagcaatatggaatccatgttccaaaagtaaagtcgactcgctcgccatgccgcataatgtagatctttctgttcttggcatgcgaggcgtcaagggatccgggatgcaaggagtggtccgagtgtacactaagtgtgtcatctggacgcggaggctgggctgccggtggttccaccaagatctcgtccaccggttgcttggacatggaggtggaggaagaagacatattggtcgttatctcgatcgtaggcgtgttagggttatgctgatgggtcaagttgtggctgtttagcaattgcactgagggtagttccaggcagggcttcaaagtctgtctcaaatacttctccacgctctgttcggattcctcaaacgaagagccttcaattatatcaggatgtgctgtgtctgttgagagaggcaatgtaactaacttaatccaggatcactgtattcaaaatacgactcactctgacgatcgtcgggctccgttgatatactgcgtccgtccacaatgtccaagtcctcggcggaagttaatgatgaagctacgctcttggagagctggaccacacgatgcagggtccaggcgtccgattctgcggtgcgttcggtgtaattgacgggcaaatgaccggtgcttccggtcaaccaagatatgccttcggcccaaccgtcactggaactgtctactacctcggtattcaaatagatgtaatcgccgattcggagctccagttcatccgtctcgtgcgggttgtgtggataaactaccttttgaacctgaaaagtacaagataaaattataactcatcctcgatcgattataaggagctctaacttgtttggtggcgagccgaggatcgcgggaatatagacgaagttcccaattggaagcgcagctggcgtctaaggtctccacgagtgctttcagtgcattaaactgtgcctgcgggaactggtaggcaagcgtcaggtgcaggctcttaacgtgtggctcgagtgagatggctacaggtagttagaagctattagtagcctttcgctaggcggaacaaacgattactgaatggaaatgaaggcggtgctggttatatgctttcgtatctaacacggtgaatcgatgtttttcgataaggaattatagtcacttaaagttatctttgggcaaaaccaaacgtcacgggcttatcaactacagttctggtcttctaataatcaaagattttttgtatatatagtgacactaatcggttttaataataaactgaaatatttttcaaacaaatgaaacggggtataaacaaattaactatgtagctaccaaaaacatcgatcaccttgctatctacagttactactaattaactacaattagcagcgtcatgttgaatttcgccaaaagggcgattagattagtaacttatctaccagtgcaactaaagcatgcatagagtgataagaaagtgtacttttgggtgaatcaaaaacgattttatgcaaactaatggctctagctaatggcttacatcgactgctgcgcggaatgcagcgggtgcccgaggagacagcaccgcaccagggaaagcaggccacaatggcgtccaactgctcataggtatcgctaatgactgtgcagcatatcccagattatccagaagtgtgcaggaagagaggagaacaacataaccgtgtaagccactccgaaaaatggaaaaccatcaaccgaatcgaacagaacgtgagaaaggtaaaccaaaacaacccaaagagagtgcaaccaacagaaggataattcgtacttgagttggacacctccttcacgtactgcagggccagtcgtttcagatagttggcatcctcctcggccacgaaaaaacccatgaagttttgactcatgtagggctccagtttaagggggcgatccaacaaggcgcccgtcatgtccaccacctgtttgagcgccttggacagctgcagcgagcactcatcgggggcctgtaatttcgattaggtgaataaataaagtctggataatccaacttaagctcactttaaaaaacgaaaccagggttatgtgaggcacgtagttgtgtgctccattccaaccgcacatttggcgcgacttggcccagaactcctccagctgctgcagaaacggacccgtgggacaagcatatataatatattccctgggggcgcactcgtccagggtgccatcgttgacatgtgccagcaaccaatccgaggcaatctggacaccacgattaccagttgaagccaaagctttctccctgtgtaggggtaagcaaaaaaatcaatactctgattctatgaaacaaatcaacatagtgggtcactcgcacgcatagccactatatcttggatggaacctagagcagctggtgactgccaatacgctatgcatagaaaactcacgctctatgcctgggaaaccccatttggagcaatgtttggagcggcgtcagatgctgcttagagatgcagatcctcgtaggggtctgactcttacgcggcggaagcgtggccatttcgattatagcctcctatgtaagcccaggtgaccaccgtttagcagcttttggtttttcctggctgttcaatatttttcagtgataatttcaacaaaaataggatacaattcgttaattggccacaaaaaagtgttggctaacgacagcctaaagatagtcaacttctaccgatagctgtaacacgactgcactatcgataaccagtactgaccagtagagatgagagcgattctcctagcgagacaacaacaaaattcactgcgtaattaattgaatattttttagtaaaaccgaagcgccccacaaagaaacagctcttggagtgttcaccagtgttcaaagtgagtgccactacaaaaggaattaggcgaatagcaaaagcaaagcgttaaaaagagtgttacgcagcaggcgaaaagtgcatggaaaatgccagtggagccccacatcaaacatacacacgcacactcgaaaaacgtacacaacaaagacccacgcacaccgacgcaattagtggcgtagttgtaatggtggagcacaaaaacaagttgttcatggtctaaaaaaggggggcggggagtttatctccctttggagagtccactttcgcactattttcgattgcaccatagtgactccccctgccatcgaggactttgaggaaatgggcgttttcccaggcacttttcctggtattccagacccgctttattagctcgacctcgtctttgtctgtactcagcgcactttctccgctgcgccaatagtgatcacgctttatcgcctcgatgcgggcacctccctcccctactgaccgcctgttcacacagtccagcgatcacacactgcggattgctcagagtgactcacccgatttgtttatcacccagcacggcgtagcacaactgctcgtcattacaaacattttacagctgcgaatggcttgcacttcgagcacttaggcagtcaggtcctggcagagattacggctttcattggcatgtagtttagactctagaggtttgcgcagttcactttcatttatcttaggaaagaaaccatcacacccctacacttcctaatcgaattagaggaaaccgcaatggtattttta

SEQ ID NO: 31835 - DNA, 2373 bp, DROSOPHILA
taacgaattgtatcctatttttgttgaaattatcactgaaaaatattgaacagccaggaaaaaccaaaagctgctaaacggtggtcacctgggcttacataggaggctataatcgaaatggccacgcttccgccgcgtaagagtcagacccctacgaggatctgcatctctaagcagcatctgacgccgctccaaacattgctccaaatggggtttcccaggcatagagcggagaaagctttggcttcaactggtaatcgtggtgtccagattgcctcggattggttgctggcacatgtcaacgatggcaccctggacgagtgcgcccccagggaatatattatatatgcttgtcccacgggtccgtttctgcagcagctggaggagttctgggccaagtcgcgccaaatgtgcggttggaatggagcacacaactacgtgcctcacataaccctggtttcgttttttaaagcccccgatgagtgctcgctgcagctgtccaaggcgctcaaacaggtggtggacatgacgggcgccttgttggatcgcccccttaaactggagccctacatgagtcaaaacttcatgggttttttcgtggccgaggaggatgccaactatctgaaacgactggccctgcagtacgtgaaggaggtgtccaactcaatcattagcgatacctatgagcagttggacgccattgtggcctgctttccctggtgcggtgctgtctcctcgggcacccgctgcattccgcgcagcagtcgatccatctcactcgagccacacgttaagagcctgcacctgacgcttgcctaccagttcccgcaggcacagtttaatgcactgaaagcactcgtggagaccttagacgccagctgcgcttccaattgggaacttcgtctatattcccgcgatcctcggctcgccaccaaacaagttcaaaaggtagtttatccacacaacccgcacgagacggatgaactggagctccgaatcggcgattacatctatttgaataccgaggtagtagacagttccagtgacggttgggccgaaggcatatcttggttgaccggaagcaccggtcatttgcccgtcaattacaccgaacgcaccgcagaatcggacgcctggaccctgcatcgtgtggtccagctctccaagagcgtagcttcatcattaacttccgccgaggacttggacattgtggacggacgcagtatatcaacggagcccgacgatcgtcagaacacagcacatcctgatataattgaaggctcttcgtttgaggaatccgaacagagcgtggagaagtatttgagacagactttgaagccctgcctggaactaccctcagtgcaattgctaaacagccacaacttgacccatcagcataaccctaacacgcctacgatcgagataacgaccaatatgtcttcttcctccacctccatgtccaagcaaccggtggacgagatcttggtggaaccaccggcagcccagcctccgcgtccagatgacacacttagtgtacactcggaccactccttgcatcccggatcccttgacgcctcgcatgccaagaacagaaagatctacattatgcggcatggcgagcgagtcgactttacttttggaacatggattccatattgcttcgatgagtttggaaattacatgaggaaggatttaaacatgccgaagacgctgcctcgtcggaagaacagtccggagggctggcagaatgattctccgctgacaaatgtgggtgtctatcaggccaatcttattggtcaagctttgctggaggctcaagtgcagatcgaccatgtttactgttcgccctcgtatcgctgcatccagacttgcaccagtgcgcttgaggggctgaagcttacgggcaagcaaaaaatcaaactggagccgggcctgtttgagtggatggcctggtatccgagcggtgtacccgactggctgactaagaacgagctgaccgaggccaagttcgacgttgatttggattatgagccggtgcagccagcgtctgagctaactgctcgcctaaaggagtccaccgagcagttttatgaacgtaaccatgacgttatcctccagctattggagcagacaactggaaatattttggttgttgcccatgccaccacactggacacttgttcccgtcaactgaccggtggagttccacgcagcacgaacgaattgcgccaagtcatccacaagatcccctactgcagcctggcaacggtggaacaggtggacggcgtctggaagctggttgaacccgaatgtcttccggtgacgcactcaaagaatccgcggttcgagtggaacgccttgtcggccacctag

SEQ ID NO: 31836 - protein, 751 aa, DROSOPHILA
MATLPPRKSQTPTRICISKQHLTPLQTLLQMGFPRHRAEKALASTGNRGVQIASDWLLAHVNDGTLDECAPREYIIYACPTGPFLQQLEEFWAKSRQMCGWNGAHNYVPHITLVSFFKAPDECSLQLSKALKQVVDMTGALLDRPLKLEPYMSQNFMGFFVAEEDANYLKRLALQYVKEVSNSIISDTYEQLDAIVACFPWCGAVSSGTRCIPRSSRSISLEPHVKSLHLTLAYQFPQAQFNALKALVETLDASCASNWELRLYSRDPRLATKQVQKVVYPHNPHETDELELRIGDYIYLNTEVVDSSSDGWAEGISWLTGSTGHLPVNYTERTAESDAWTLHRVVQLSKSVASSLTSAEDLDIVDGRSISTEPDDRQNTAHPDIIEGSSFEESEQSVEKYLRQTLKPCLELPSVQLLNSHNLTHQHNPNTPTIEITTNMSSSSTSMSKQPVDEILVEPPAAQPPRPDDTLSVHSDHSLHPGSLDASHAKNRKIYIMRHGERVDFTFGTWIPYCFDEFGNYMRKDLNMPKTLPRRKNSPEGWQNDSPLTNVGVYQANLIGQALLEAQVQIDHVYCSPSYRCIQTCTSALEGLKLTGKQKIKLEPGLFEWMAWYPSGVPDWLTKNELTEAKFDVDLDYEPVQPASELTARLKESTEQFYERNHDVILQLLEQTTGNILVVAHATTLDTCSRQLTGGVPRSTNELRQVIHKIPYCSLATVEQVDGVWKLVEPECLPVTHSKNPRFEWNALSAT

SEQ ID NO: 31837 - DNA, 4282 bp, DROSOPHILA
cacgtagtgcagttacataccctactgaagtgggtatatatgtttcattaatttcattaatttttcaactcgagttaaattgattaatttccgttgtttgttagggaaattaagtgactcaaataccaacatttatttcaactccaataattataaaaatttactttataatgtaatcaataataaaatgaataattacataaatagtaaacatatattccaaaatattttttaagaatgcagcaacaccgctgacacaacataccccacatttggttacagggtatcagagtatcgaatttttgctgtcattcttcaaaaatcagtttgtttacgttcacctgcaagccgcataatgggaaaaagtgagaaaaaatcaaagaaaaagcataaggagaagcgcagggaacacaaggaaaagcacaagtcaaagaaatccaagaaacacaaccgaaaaaaggaagaatctccgccgatagcttcaccaacaccaatacagcctgaaagggtcaaccaggaggaggaggatgactttgccataccaataggtccgtaagagcccccctgtatatatttattattgctgaacactctaaacccaccccaaaacccaagcactgatgaatagcaaatcacatgccccggaaactccagaggaataccagcgccgtcagagccagatccgcaaagaggtggacccggtgacgggtcgcgtccggctcatcaaaggcgacagtgaggtgctggaagagattgtgaccaaagagcgccacctggagatcaacaagaaggccacccgcggtgatggagagttctacgaagccagatctctggacgccgccaagcgtcgcaaatagctaatttaccaaaaatgcaaaaatataataagctatttcatgacttgtagtaataattaataactgtcagtttaattaaacaaagggctagctagcgactatatgtacacgcgaaatccgtggaaatttctttggtggcgcagctagtacaactgatggaagaaggtagtgctgccgtcctgccaggcgggatcatcgctaaccttcgccctgcacatcggacaggtctgttcgcgcttgaaccaggtctggacgcactcatcacagaaaatgtggccgcactccaacacagtgggtgtgttgaaggcgtcatggcagattggacacagggcacccgcagcatccagctcgtctttggtcggcggccgctcagagtccttgaataaatgtgtattagaaatgtgtacataacaatcaagtctcaggcattcatacaatattttttctgaaggtcacaatggctttctttagcgacttgccgcgctccaccagctcaaatatcttggcacccaggtacattgcggaaaagagtcctccggaaaccacctccaggccggagtaggactcgtatagaaataggagccactgggtaatgggtgtcattgcccggtagaactgcgaaatgtactccaccaacacataaagcctagcctgaaatgcgaaatcaatgtatataaatggaaatgtatattacaaatgggactttccattttccatttgataatgtaagctcttaattaaattgaaattatgaatatttttgagttgttaatgcatgaactaagatttcatcattagcgttaattttatgctttggcattgggaatttatcgcacattgatccctgtggaaaggaattactcacccgcactttaagtctcatcaagtggtgcggcagcatggtaataataagtttgaccagcattgtcagcagtttgataatgagatcgctcacagcaatgtagtacagcaacatgcccagtgggatcacatttagagatttgtacgtatctttgtacatgttggtcttgatgggttcggacgatgttgtggggctgtcgccttccgagctagtgtgaaaaggcagcgctgtgacctctatgaaaacggattttctggaaggcggcacaatcagtccaaacggatctggcggcgaagtggccaaaaatagacgcactgtaaccaccacggcaacgaggaaagtatcccgcaccatcacggcgtagttcttctgagctagacgggctacctgattgcgtactgatcggttaacattatacatcacagtctgcagcaccagaagatccacaatgcccagcaggtggtcgtgtaaaaacttgaaaaacagtataaagataagcggcagatatcgcacaaaatggctgagaatctggaccaccatgtcatccgagatgagatgttcatcctctggattattctctgctggctctggtggattgccacctccacctccgttctccacgttgccatcgctttcgtcaaggtcttggctctcatttgcttcgcgttcgtcgaaggccgccggattgctgtttagtcctatggcactggcattgtgccgtcctccgttaaggctgtgattgtgtcgcatctcaccctcacgcagcgagatacttctacccatagctccagctgaactggctccagatacggccgaaacgcgcccgtatcgcagagggctgactggctcaggcattgatggttgctgctggccgagcagtatgtgcgagttgtctacgggattggcggctggctgaggtcctggtgccgcgggggctgcagtggttgcaggtggatatctaaaattggaatgtgagatgaaggatcggagcgcctctgtcgacgaggcagttgaaagcgaaaagacatcgttgaggttgacacgccaaaagcccatttgtcgaacacctgccgcagttcctggcgatgctcctggtccacctgctgctccggcgctggacggctcctcgagactgccaccggtgttggcgcccatactacgggactgctgaagacgacggttcatctgtgtggtcacccgcaccggggaactgctgttgctggctggcgtgtacgagcgctgacgggccaaaaatgtggatagaatgttaccatgacggacattaccaccactaaggctgctgctccgcgccgtgggaacgtgttggtggtccaggtttacgctggtgctggtcgatcctccagagacgacgcctccacctccgacgccaccaccagaggtcaccgaagatgaggaggcaggcagcaggtagtcgtgttccgccgtcgtcgagtcattgtcgtcgctctcgatgttgatagacacaccggtcgatccagcgccatcctggggtccagaacctcctcctcctccacgatagggatccttggggctgttgttcattgttccacatccaatctccaatgcttggagctggccttttttcacatagaacaccaatacgtctaacaaagtcttccgtattttgcctccgttgtcagctggtcacaccaaaatctagcttaaaatgaacgcggttaaaaccgaattaaacactattaatacacatatacaatacactaactatcttgaattcaaaaaaataacgttttttatttataataagataagatttatttaagatgaaaaaacaccacaaactcttcaaagataattttcaaaacaataggacatgtacggtcacactttggggtggaacatgtgtggactgtggatttataaaaacaaactcagctactttttaacacaaatttttcatggaggtaggggtaacctgtatttcagagaggggttaaaaatttggttggtgtcgatggcaattaaatagcctacatatttctacatgtcagtagttgtgctgaatcggtcattttgtggttacattttttaagacaattcgctcttgtgttattataaataatataattataatttaatgcattatttcaaaaatttaataaacaaaaatccctctatcaggcgagcaaaagatatatgctaatttttgacagcaggttctctcagccaggttggccgagcggtctaaggcgccagatttaagctctggttctcgagagagagcgtgggttcgaaccccacacctggcaaaagtaaaatttgtttttttttttagaatgactcttttaataacattaataagatgaggaaaattatttaatttccctggcagagagtattagattaacaaattaattcatctgaacatgagtcagtgataaccgaacaaattgatttcaacagattaaatatcattccatttcgcaatatctgtttacttttttttagatctaggagttttttaaaccaatttaagttaatttattcactagaaataagagacggctctctacctcataaatta

SEQ ID NO: 31838 - DNA, 1989 bp, DROSOPHILA
atgaacaacagccccaaggatccctatcgtggaggaggaggaggttctggaccccaggatggcgctggatcgaccggtgtgtctatcaacatcgagagcgacgacaatgactcgacgacggcggaacacgactacctgctgcctgcctcctcatcttcggtgacctctggtggtggcgtcggaggtggaggcgtcgtctctggaggatcgaccagcaccagcgtaaacctggaccaccaacacgttcccacggcgcggagcagcagccttagtggtggtaatgtccgtcatggtaacattctatccacatttttggcccgtcagcgctcgtacacgccagccagcaacagcagttccccggtgcgggtgaccacacagatgaaccgtcgtcttcagcagtcccgtagtatgggcgccaacaccggtggcagtctcgaggagccgtccagcgccggagcagcaggtggaccaggagcatcgccaggaactgcggcaggtgttcgacaaatgggcttttggcgtgtcaacctcaacgatgtcttttcgctttcaactgcctcgtcgacagaggcgctccgatccttcatctcacattccaattttagatatccacctgcaaccactgcagcccccgcggcaccaggacctcagccagccgccaatcccgtagacaactcgcacatactgctcggccagcagcaaccatcaatgcctgagccagtcagccctctgcgatacgggcgcgtttcggccgtatctggagccagttcagctggagctatgggtagaagtatctcgctgcgtgagggtgagatgcgacacaatcacagccttaacggaggacggcacaatgccagtgccataggactaaacagcaatccggcggccttcgacgaacgcgaagcaaatgagagccaagaccttgacgaaagcgatggcaacgtggagaacggaggtggaggtggcaatccaccagagccagcagagaataatccagaggatgaacatctcatctcggatgacatggtggtccagattctcagccattttgtgcgatatctgccgcttatctttatactgtttttcaagtttttacacgaccacctgctgggcattgtggatcttctggtgctgcagactgtgatgtataatgttaaccgatcagtacgcaatcaggtagcccgtctagctcagaagaactacgccgtgatggtgcgggatactttcctcgttgccgtggtggttacagtgcgtctatttttggccacttcgccgccagatccgtttggactgattgtgccgccttccagaaaatccgttttcatagaggtcacagcgctgccttttcacactagctcggaaggcgacagccccacaacatcgtccgaacccatcaagaccaacatgtacaaagatacgtacaaatctctaaatgtgatcccactgggcatgttgctgtactacattgctgtgagcgatctcattatcaaactgctgacaatgctggtcaaacttattattaccatgctgccgcaccacttgatgagacttaaagtgcgggctaggctttatgtgttggtggagtacatttcgcagttctaccgggcaatgacacccattacccagtggctcctatttctatacgagtcctactccggcctggaggtggtttccggaggactcttttccgcaatgtacctgggtgccaagatatttgagctggtggagcgcggcaagtcgctaaagaaagccattgactctgagcggccgccgaccaaagacgagctggatgctgcgggtgccctgtgtccaatctgccatgacgccttcaacacacccactgtgttggagtgcggccacattttctgtgatgagtgcgtccagacctggttcaagcgcgaacagacctgtccgatgtgcagggcgaaggttagcgatgatcccgcctggcaggacggcagcactaccttcttccatcagttgtactag

SEQ ID NO: 31839 - protein, 662 aa, DROSOPHILA
MNNSPKDPYRGGGGGSGPQDGAGSTGVSINIESDDNDSTTAEHDYLLPASSSSVTSGGGVGGGGVVSGGSTSTSVNLDHQHVPTARSSSLSGGNVRHGNILSTFLARQRSYTPASNSSSPVRVTTQMNRRLQQSRSMGANTGGSLEEPSSAGAAGGPGASPGTAAGVRQMGFWRVNLNDVFSLSTASSTEALRSFISHSNFRYPPATTAAPAAPGPQPAANPVDNSHILLGQQQPSMPEPVSPLRYGRVSAVSGASSAGAMGRSISLREGEMRHNHSLNGGRHNASAIGLNSNPAAFDEREANESQDLDESDGNVENGGGGGNPPEPAENNPEDEHLISDDMVVQILSHFVRYLPLIFILFFKFLHDHLLGIVDLLVLQTVMYNVNRSVRNQVARLAQKNYAVMVRDTFLVAVVVTVRLFLATSPPDPFGLIVPPSRKSVFIEVTALPFHTSSEGDSPTTSSEPIKTNMYKDTYKSLNVIPLGMLLYYIAVSDLIIKLLTMLVKLIITMLPHHLMRLKVRARLYVLVEYISQFYRAMTPITQWLLFLYESYSGLEVVSGGLFSAMYLGAKIFELVERGKSLKKAIDSERPPTKDELDAAGALCPICHDAFNTPTVLECGHIFCDECVQTWFKREQTCPMCRAKVSDDPAWQDGSTTFFHQLY

SEQ ID NO: 31840 - DNA, 2634 bp, DROSOPHILA
tcgagcatgaagacaactgttgtggatttatgaaccagtcagccagacaatttgtactgcatgtggccccctttgcggccagccacccacctgatcagccacctcctccgtttccgtctccgtctccttcgccttcgccttcgccttctccatgggccattagcatcccagacgatggagcagattggggtcagtgggaaaataatcgctgccgtgattgctatttaacaaatttatcacacttcggcgcagttgtggcggctcaacgtgatgtgcattgaataatctaaataaggcgcatacattttccaatgccttgcctttttatgctttcaaaaatgttcgaagaaaaaaaagaaaaaagccagcaagaaaccacataaaaggaacacgctttaatttactgcgccttgggacacacaaatcagttgaaaacttcctggagcccagggtgtaattaagattttatttctctaaagcacttgccacatactgattgcttaaacgaacatttaaatatataatatgcgcaaactttttaatccattaataatttggggaacggtggcataactgctagttaagtgtttcgcaaaaaaaaaaggatcaataaagtagcaattaacatttgtttgcttattgtgaaatgagcctgtgtttataaattaagaacatgcccaaaattgtgttcggttttttaactattagaaagcctgtgtcctcccgttgaattttacaattaacaagcatatcaaactatgccatatttgtcataaattcgttatgggccattgctgcagttgacgtggcaaattgcagaggccttttggccatcgaccagaaccgaaatcaaatcggtgccggactgaaactgttaatggcactccggcaatacggcacttggtacttggcactccggcttttggctatcggggcttctggcctggctttctggctcgtgctcaaggcaactgcacttgaccgggccaaaagcaaaagcatgtggcattctgcgtcttgcgttcggtatttaattgtcggcttatggcattggcacacatttccacggcttaattgctttggccagcgtgtaaccagtgcaattggcccgtgcatgccgtcagccatgtgtttgcactgtgctcgtaatacccaaatagcgaaatactcccagtgctaaccatttgcattgtccaccaccacttgcagttagtcaccatcgccaccctctgcctccttgtggccttcgccgcgggccagcaatactttctgggccagttcccaagccggactcgttttggattcgatcccgtggcgctagcgggaccctcatcggccacacaggttcgggatcctcgacagaacaggggtaagtagcagctggatatccttatttgctaataatttgcaagcagaacagaaatttaacactatattcaagtaaacttacttatagttagttatatagcactttcttaacatttcaaaccgatttccttgcaggacccgtcgtcttccccccatccccaccagacgcagtggacgagtccagcggcgtggttgtgggtgcctccggatacggctttgtgccgccccagcaaagtaatgcgaacctctttaagcgcactgtctgaacacagatagagatagctgctactccatctccatctcactcacactcgaacagccacacacgcaaacactttcctagaagagaaaagctttattagtgcaatatgtagtcgtgtttttgttatttctttgttatattgttaaacaattgcccagtaatttgcaacccaaaacaaatgtctaattcgcaggaaaactctctggttaaagttacaaatcttccccacaccgaataccaaatcttccccacacaactatacaacacaacactacacaccgattaccagtaattaacccaaagcactcgaaagcaccacaatcacacactttgcgcaccagcaccggaaacggaaatgcgtccctcttagctaattgcagacacccacaagcaaaaatacacactaacggcgggacccccacttcccttccattcccttcctatcacccccccccctccccctccaaaccgcctaatgtaaagttaacattacttagtttaattagcttgaaaacgctattgagttattttccaccttattgtttcgttttgtattttaattttttattatgattttcgcttcttcttctttaatttatgtttcaaattggaattgtattatgattttatcttttgtttttaccttattttatttgtaacaaaaaacgaaattttaaattatgaataaaccgacaaatattattaaacaaaaaaccacaattaaattcgcagcatttttcgtttatcaatgcaccatctgacttgtatttatgttttgtatctggattaaagcacttgagcggctgatcagcgatcaccgatcaccgcggtagcaattattttaagcgcacataaaactagcgccttaattaacagctccgatccgactttgaagtgcagcggctccgcgattggatggcgggaaataaagactggaacgcagactcaaacgaagacgaagacggatccggggaaaccatcgactgtgaccacttccaactcga

SEQ ID NO: 31841 - DNA, 312 bp, DROSOPHILA
atgtggcattctgcgtcttgcttagtcaccatcgccaccctctgcctccttgtggccttcgccgcgggccagcaatactttctgggccagttcccaagccggactcgttttggattcgatcccgtggcgctagcgggaccctcatcggccacacaggttcgggatcctcgacagaacaggggacccgtcgtcttccccccatccccaccagacgcagtggacgagtccagcggcgtggttgtgggtgcctccggatacggctttgtgccgccccagcaaagtaatgcgaacctctttaagcgcactgtctga

SEQ ID NO: 31842 - protein, 103 aa, DROSOPHILA
MWHSASCLVTIATLCLLVAFAAGQQYFLGQFPSRTRFGFDPVALAGPSSATQVRDPRQNRGPVVFPPSPPDAVDESSGVVVGASGYGFVPPQQSNANLFKRTV

SEQ ID NO: 31843 - DNA, 3710 bp, DROSOPHILA
ccaaccgcaattaagctgacccaaagccgttgcctggttacccaaaaggtgtccacaacaactggccgcgttcaggaagcagaaggccaaaacaaccaccgccaggagtgcaggcaccgccgaaggaccaaggacaaacccttacaacccgtctggtcagttcggtttgtgtatttagacaaggagtaacgtgtgcaacgtgttaaatattcagccagatgcagtttataaatggttcactaatataaatgggtaaatagaagatacgaatatgtgcggttaatagaaagaaaacgtgtaaacgatctaacgatattacgttctagatttaacgttctaatatttaagtgaaaagaaatttccttgtttttaagtatagtgaattacgcaaagaacaaaagagtgtgtaactaaacaataaaaacaaatccaactattatatttattatatatatcatgatatatgaagaaactaccccaaatattattaagcttattaagctcaagtcatcttcaaatcgcataacaaagaagtgccgcacaacaagctgagttccaatcgaaataaagttcgcataagtaaaaaattaagtcaaatgggcaattaaaatataaatattatttattgtacaatatattgtggtataaaagctatattcgtgcatgtgtgtatgtggtgtgtgtgtgtgtgtgtgtgagcggtacacggtttgttttttaacggcctaatcttcttagatggatgttgaaccccaatggcgtaaacaaaaaaaaagaaatagtatagaatgcaaaaatatatatatatatatatatatatatatatatatatatatatatatgtacatatatatgctatatagatttctatatattccattattgatcagtctgtgtaatctctctcgctaaagaaacgcctgatgctggatgctagaggctagatgctgctgttcgatgcttaaagccgatgcagtggctccagctccggccgctccgttcaatgaaccggcaccgtgatgcgtggcgataaggttttggtcgcgctgcgattccggcgctgcaaaaacagcttcacgttcttcaggggcagctggaaatgatagtatgcgcaatagggtagtggatcccagtaggcaaacaatgcctcccgcttgtccagcgccgtcgtcgaagtggttctctccagcgccgaccagctccagttgggcagttcatcctcgggcagtccccgcctgtggatgcacttcatcgcacggcacagcaactgggcatgcgatcgattgtggcatatgtagggcagggccacgcccagtcgcgtgcccagaggcacgaactgaccaccatgggcggggctcttgaccaggcggaagcttatatgcccattgatgggcctctggaagcgcaccttggcaaagaaggagcgcaaccagagttctatctgcgcctcatcgtccctgggcactgggatcagattcttggtatgatgctcaacccgacaactcacattggccaccacccgtgaatccttgacggtggtgcaggtcacatagtggtgatagcccggctgatcccttaccactagccacggttgccgctcgctgatatcgtgctgattcagctttagttccgcccgcctattgggcagtatgtacttgtgccgctccaggactccctgcatccctgcggccatgagtatgttcctatagctgcccacgaaaccgctctcgtagatctgctgcaattgccgtggagctgtcagcaccacatgggctggcagagccatctgttgctgttcgcatctctgaaagagctggaggcagtcatccagctgcagtgtctcctgcacgccgggtatgaaactggcacagcccaggacctccagatgtggtcgggccagggaatcatagtatgccggactggtggcacaaacgggtatatagaccgagggtcgttccttcttcacgatgtggcacagggcggctatgtactgatccggattactggccgttggccgtggcaccacatagaatttgtccaccgctgtggaaaatctggccaatccgaacaaaccctcgaactcaaagaccaccacacgggcgccggatccgtagaagttcctggccaaatgtagggtctgtatggtgctgccgcagctgaggagtatggtcttctgtcgctgcactgcacccagctcctcctcgccgctcagtagccacttgaccaacgcaatgggtacccgcagcagtttccaaaagatccagagcagggcggacaaccaaaagcttggcgccgcaatggacagtggtatgtagaggacgtatctcaagatggtcagcaccagacgcatcagcagttgtggtccgaagagcaggacccgtgtgcctaaattgggttgtggcggcgactgcgtctgaaactgatgcctcagcagattgccatcagccgtccgctgtcgtctcagggtgacaaagtgcttgtgggccgtctgggattccttgtcctcctcctcctccgattggctgggatgctccggtattagatccagcgaattgatgcgccggaacttggagcgcgtggcctggcgcaattgccgggcgtgctcctggcgcaacagcagatcgtccagggtctgggacatcttcactctctcactcgcgtattccgtattatcttcgccgtgtaatctccgattatcgctgccgtgctgctgctggcaaaatccgaactgtgactaaatcgcgttttaaataggagctatactttaaacctatgggatgcagccgcgaccgttgataacccaccccagacacacatgtccatcggcgctgggatcggccaatccctgtctataccttgtgcactgccagaaaaactgccgcaaactaatcaagaaatcgaattgttcttgaaattaatgggtctaacttattggttaacttatcgcactgattagttaattgcactacttttatggccactgaaaatagacttcgacaacaggtactccttcgaaagtcttataaatagcactatcagattcagacactacgaaaaccttaagtttaaagtctgcctatttcaaaatagtgaccttaatagtaatgacttgcgttcatttctggtaggtcagtttctttttgtctatgctgatggatttgctagttgcaaggcgctagaatttggaatttcggtttataagaaaagttctatagtttatatttcataagaacctatctaagtttaaagtactacttgccgaacactatcatattgttgattgaactggattagttactatgtaacactattacaaatcaagattagttaacgcgatgcgattataaaatactatcgccatcatccagatgatgaaactctctctctcagtgtagcatattaattggctgatcagccgaacaatgcgttggcgaacgtgatgtttattgtcgccaactctcgggatgatccgctctcctccgttcgtctgagatttttggcgatcgggtataaatcatcgtcgccgtttgaaggttccagcgaggcggaggtagcgcccgttgccaagagagccgggaaatctccgtcggagccgaagatcagtatagtaagttcgggcggagcacgatcgatgcattattgcaggtccccaggcagagccccaggctgatctccaggcacatttgtggtcccagccggactttggcctg

SEQ ID NO: 31844 - DNA, 1710 bp, DROSOPHILA
cagcacggcagcgataatcggagattacacggcgaagataatacggaatacgcgagtgagagagtgaagatgtcccagaccctggacgatctgctgttgcgccaggagcacgcccggcaattgcgccaggccacgcgctccaagttccggcgcatcaattcgctggatctaataccggagcatcccagccaatcggaggaggaggaggacaaggaatcccagacggcccacaagcactttgtcaccctgagacgacagcggacggctgatggcaatctgctgaggcatcagtttcagacgcagtcgccgccacaacccaatttaggcacacgggtcctgctcttcggaccacaactgctgatgcgtctggtgctgaccatcttgagatacgtcctctacataccactgtccattgcggcgccaagcttttggttgtccgccctgctctggatcttttggaaactgctgcgggtacccattgcgttggtcaagtggctactgagcggcgaggaggagctgggtgcagtgcagcgacagaagaccatactcctcagctgcggcagcaccatacagaccctacatttggccaggaacttctacggatccggcgcccgtgtggtggtctttgagttcgagggtttgttcggattggccagattttccacagcggtggacaaattctatgtggtgccacggccaacggccagtaatccggatcagtacatagccgccctgtgccacatcgtgaagaaggaacgaccctcggtctatatacccgtttgtgccaccagtccggcatactatgattccctggcccgaccacatctggaggtcctgggctgtgccagtttcatacccggcgtgcaggagacactgcagctggatgactgcctccagctctttcagagatgcgaacagcaacagatggctctgccagcccatgtggtgctgacagctccacggcaattgcagcagatctacgagagcggtttcgtgggcagctataggaacatactcatggccgcagggatgcagggagtcctggagcggcacaagtacatactgcccaataggcgggcggaactaaagctgaatcagcacgatatcagcgagcggcaaccgtggctagtggtaagggatcagccgggctatcaccactatgtgacctgcaccaccgtcaaggattcacgggtggtggccaatgtgagttgtcgggttgagcatcataccaagaatctgatcccagtgcccagggacgatgaggcgcagatagaactctggttgcgctccttctttgccaaggtgcgcttccagaggcccatcaatgggcatataagcttccgcctggtcaagagccccgcccatggtggtcagttcgtgcctctgggcacgcgactgggcgtggccctgccctacatatgccacaatcgatcgcatgcccagttgctgtgccgtgcgatgaagtgcatccacaggcggggactgcccgaggatgaactgcccaactggagctggtcggcgctggagagaaccacttcgacgacggcgctggacaagcgggaggcattgtttgcctactgggatccactaccctattgcgcatactatcatttccagctgcccctgaagaacgtgaagctgtttttgcagcgccggaatcgcagcgcgaccaaaaccttatcgccacgcatcacggtgccggttcattga

SEQ ID NO: 31845 - protein, 546 aa, DROSOPHILA
MSQTLDDLLLRQEHARQLRQATRSKFRRINSLDLIPEHPSQSEEEEDKESQTAHKHFVTLRRQRTADGNLLRHQFQTQSPPQPNLGTRVLLFGPQLLMRLVLTILRYVLYIPLSIAAPSFWLSALLWIFWKLLRVPIALVKWLLSGEEELGAVQRQKTILLSCGSTIQTLHLARNFYGSGARVVVFEFEGLFGLARFSTAVDKFYVVPRPTASNPDQYIAALCHIVKKERPSVYIPVCATSPAYYDSLARPHLEVLGCASFIPGVQETLQLDDCLQLFQRCEQQQMALPAHVVLTAPRQLQQIYESGFVGSYRNILMAAGMQGVLERHKYILPNRRAELKLNQHDISERQPWLVVRDQPGYHHYVTCTTVKDSRVVANVSCRVEHHTKNLIPVPRDDEAQIELWLRSFFAKVRFQRPINGHISFRLVKSPAHGGQFVPLGTRLGVALPYICHNRSHAQLLCRAMKCIHRRGLPEDELPNWSWSALERTTSTTALDKREALFAYWDPLPYCAYYHFQLPLKNVKLFLQRRNRSATKTLSPRITVPVH

SEQ ID NO: 31846 - DNA, 2615 bp, DROSOPHILA
aacaaactactacaggatgacatccgcaacctgagcaagctgaaacaattctgcatgaactacacagtgccgaacaacaataggagctatctgtgggccctggtcatgggtattctcccgctccacaaagcgtccacggcgtacgtacgcgaccaaagacgcgaaatgtacgaggatctgcggcgagcggtaaccgtgctccggtttaccgaccataagcagaaggagcagcccttcatgtggctgatagaccataagaagaaagcacaggtcatgcacaccatgtggctgatagagtccaatcgactgtggcatggcaatactagtgccagtctccaggcggacgacatgcacttcatagagattgtgcgcacgttgctgcagatattcgacgacaacgtggaaacctactggatagcaaagggattctacaagtacacccgcgaactgaagaaggagtgcgtcaagctgaaggagcaaacgcagaatatactgaagcgcgaagatttgtccttgcttaagtgagtttgcatatggttagtcgggttatttgaccaattttcttcgattactccttatagtcacctggagcttctgggcctgtttgatggcaactcaacgctactggataactggtatataacctgctttgctggaataatctgtacaactcatttggtcaagatatgggacaaagtctgtggagggtcccggaagattgttgttttcctgtttgtagaactagttaaggacataaggtcctcgatactaaagcaaacatctttagcagacgtcaaaagacttatagaaacggtaagtaaataaggaaaccatttgctaagccataacttatccaaaatttgccttaggtaaaggatcttgacggtgttattatcgtaaacaaggccatcaaatcactacaaaacaacagcagcgaagtcgagtacacgcactaagtaaatctacacttttatattggacatgtatatagcagaatgaactaaatgtatttgaagaccacgtcctttttatcgcccaccgtttgcagttccaaggtcactggacactgcatccaataggagagcagctcctccgtgtaaccaataaggaagtacatttttcgcggtgtaatcgcctgccgaataagggccgcgatcctaatggtgttgtgctgtcgcttgataatgacctcggagcagacgagggcatgccatgtgccggtgacaaacttgcggatgaacacatcctctatggcggtctgggacggacgcagggcatccttcattgttgctaagatagaaggtggccatcaaaatgcttccttaataaaattttctcacaacttacacgtgttccatgagttccacgatttgcggtggccaataaaatgcggcggattggccatctcgtaggtaagaggcctgtttcgctttgtggttatgcggtatcgcccggattgcacgcgacagcacacggagctggtgtggaatcctgaccggctgagctgctgcacctcggtcgccacctggggcaacagctgcaatagattaggttattttaatatataatttgtcctgtttgttgttatttaacacacctttttcaagaagttcattattttgcggcagaaacaattttgcgtccagcaacagctgattgacgtgacgtaacggttcgctagagatggacaaatttatagataagtattcgatattattattgtgtagtgaaaatattttctataaaataaaaaacaacattgaaggaagtagttaaataaaaacacagaaagattaatttttagttgtgtaaatgccctttttagttcttaaatgcaatacttggatctctattgcattgattaaaatcgatttttattttgttttaaagcggggcagagttgtcaacagttgtcggtgggaaaatgtaataatgtaatgtaataaaattattgcacgcttatttaaaatatataaataaacaacattttgagagcttccttaataaatagagttaactttgtattaatccctttattcgaaagaactttgactgatcattgaacttgggcagaactagctataaattagcttaatcggtagcactggagcgctgagcctgcgcgcttggaaaatggcttaaacgcaggccatctcaaacaaagatcgaggatctcagatcagaaggaactacctgttgaagcgaccgtgcaacaggactcatccagaagcaaagctgcaaaggtttattcccagaatccctggtatccgaatgcactaataggtgaggatacattcaaagtaatgacgctgaacgagagcgacgctactcgcctggagctgacgcgcaacttcctggaactgtctcgaaatccggaaacatgcaccgccctgcgcagctcggactgtatccagcttctggtgcagattctgcacgccaacgacgaaggcctctccacggcgaaaaagtacgccagccaggcgctgcacaacatcgtccacaataatccggaggagaaggagcgccagcgggaggtgaagatgctgcgcctgctggaccagatcctcgactactgtaactttctgcacacccagttgcagagcggcggtgaggct

SEQ ID NO: 31847 - DNA, 498 bp, DROSOPHILA
atgaacttcttgaaaaagctgttgccccaggtggcgaccgaggtgcagcagctcagccggtcaggattccacaccagctccgtgtgctgtcgcgtgcaatccgggcgataccgcataaccacaaagcgaaacaggcctcttacctacgagatggccaatccgccgcattttattggccaccgcaaatcgtggaactcatggaacacgtcaacaatgaaggatgccctgcgtccgtcccagaccgccatagaggatgtgttcatccgcaagtttgtcaccggcacatggcatgccctcgtctgctccgaggtcattatcaagcgacagcacaacaccattaggatcgcggcccttattcggcaggcgattacaccgcgaaaaatgtacttccttattggttacacggaggagctgctctcctattggatgcagtgtccagtgaccttggaactgcaaacggtgggcgataaaaaggacgtggtcttcaaatacatttag

SEQ ID NO: 31848 - protein, 165 aa, DROSOPHILA
MNFLKKLLPQVATEVQQLSRSGFHTSSVCCRVQSGRYRITTKRNRPLTYEMANPPHFIGHRKSWNSWNTSTMKDALRPSQTAIEDVFIRKFVTGTWHALVCSEVIIKRQHNTIRIAALIRQAITPRKMYFLIGYTEELLSYWMQCPVTLELQTVGDKKDVVFKYI

SEQ ID NO: 31849 - DNA, 3095 bp, DROSOPHILA
tgacgggtatttgaatgttggtgccgggtatggtgatcagctgggtttgctcctggcccaagccgttcagctgttgcagctgaatgcagttagaggctgccggattagctgccatctggggagcccgcagaatttgaccgttgggcgtgataaaggcctgttgcccgttgaagttgaccgcctgagcggtggccagttgtgcattgaggtttggtatgaagatggcctcctggccatcaatgttcaccgtttgcatgggcatgggctgtacgatctggaacatgttttggggcatgccagcgttctgtccgttcccggcaaccgctccgcctgcaaactgaggaggcatttggtgaatgttgatgatctgctgcatggttggtgtcccgggagcaccgtgaacctgcgtttgtgaagctgctgcactagctccatttggtggaatcgtcgccttgctggaaccgcctgccgccaaaggcgtggcgggtggcgcactagtcgccgcactggcggcactcttgtactgcagcatggcagggctttagatgagatttggtcaatcacaagtgcttggagcgaaacatgttcagtttttttattcgctcagacgcgctactctgccaggagattggtagcatttaaaccaaggtggcacacatggggttatgaacactgggatgcggggtgccgacgctaacattcaaacacataaataacacgaagtctaaagataattgcgctgcgagacggttttagcgagtttttagttttaattttgttttgacacaaacgcagaagaagaagtgagagtgattggccagggttgcattgcgttgcatctcgatggccgccaatcgaccaaccagccaaccgatagtgcgataccaataacaaaccgctaaaagcaagaagaagcatatcacagataaacaaatttttaaccgacaagttgcctatccgacaaaatccatatttaattagattgcatcttgaaaggggcatggagccggttccagaggaagcccgaggagtgggtgatgacgaaggggaactcgattgtctaacacatatgattggggcgttgcttttgcaaaaagaaccggaaaatcctgaaaatggtgactcaaaggaaacaatttggagtggagagctcgaatgggaggatgcacagatattggatcaaccgaagactctgcacacggtccaatgcaaaatctgctccatggttaaagaaggtcagccggagatcaacacggagaactggccaaacaagctgaaaacacaactgatacccaaaaaagtgctgggtaaaattggcgaacaattcctaaaggatgccaggatggttgtattccgatccagccaaggagaggtactcaatttattgatcacggcgatgagctctggtttcgctggttgcatccacttcccctccaatcccaactgcaacatcaaggctctaattctcatctactcgcgcgatcatcaagctttggttggcttcatacccaacaatgaggattcgtttagcgaacgactgcaggagattcttcagggtgcaaaacgaaagccgggcgtcaaaacacccaagcagccacagccagaagaaccgcctcctgtggaggaagatgccattataaatgaactcctatggactggatcgctgaattggtcgacacaagcaagtttagaggagccaagcattagtcacaagcttgagtgttccgtgtacatagctataaaaaacggtgatcccgggatcagtgcggaggattggccaactgatatgcctatggttttgatgccttcaatttatcttggtcagttcgccggagcgtttataaaggactcgaaacttataattctccgatcgacacctggagaagaacacgactcgctagcatcatcaatgtccgccggcagttgtggctgtgcccgattttcctccgaggtcgtctgcaaggttatcatgctgctgtattcgtccccgaggaacgccttcctgggctttattccgagagatcaagctaatttcgtcaagcgattgcgggaagtattagacgaacatcgccaaaaggcgagaaacaaagagtaaacaagtatctcaagatgatctcaaagtatatttaaaatatttatttgaactctaggtatatcaaatttatagtcatcgaagaaagtattgttttataattagatattttttttttttttgtttaattattataaatatagaccaaagaatatttaaacaagatacgctcgcacgtccccagtgggaaaacataccaaggctaaaatatgtaatcagataaataatcataaaactgcgaactcctgaatgcatttacgcaagtttgtattacgaatgtctgtcatacgttgccatattaaaacttaaccgatcttataaataaacatttttgatgtgcatctattatgtttatgttctacaactaggtcaaggacaactgtgttatcgcatgtcagatgctgcagcattaatagacattaaaaaaaaaaccccgactgtaaaataagtaatctaatgaatgcttctatttaggaagtttgaaataaaaataatcttccgaatgcaaaatcctttccttttcgtattagttgtgaattgatcgaataagtattttcatatgttgggttcatcatcttcgtcttaaggattacattttcaaaggtcaattagtctttttcattgcgtaagccttgtaaaaaatgttaacgaatttgattcagttttaaattttgaaacgaacccattcgatgcggccttgaataccagtcatatatatattggagatcttttacacatttttagtatagttttcgatttctttagcggatatcaacatggcctcagtaaaattggtgtgttggtactaatcatatctgcgttccaaaatctaatattttttaaaattttcgcacagttctttattgctattttggttgtagctctatcccttaacacctcagctgcagtgttgaaccctagttcgactgccaaacccagatttgagacgaaagaccgaaaactaagtgctggcgctctgcagtcactcgctggttaattacta

SEQ ID NO: 31850 - DNA, 1095 bp, DROSOPHILA
atggagccggttccagaggaagcccgaggagtgggtgatgacgaaggggaactcgattgtctaacacatatgattggggcgttgcttttgcaaaaagaaccggaaaatcctgaaaatggtgactcaaaggaaacaatttggagtggagagctcgaatgggaggatgcacagatattggatcaaccgaagactctgcacacggtccaatgcaaaatctgctccatggttaaagaaggtcagccggagatcaacacggagaactggccaaacaagctgaaaacacaactgatacccaaaaaagtgctgggtaaaattggcgaacaattcctaaaggatgccaggatggttgtattccgatccagccaaggagaggtactcaatttattgatcacggcgatgagctctggtttcgctggttgcatccacttcccctccaatcccaactgcaacatcaaggctctaattctcatctactcgcgcgatcatcaagctttggttggcttcatacccaacaatgaggattcgtttagcgaacgactgcaggagattcttcagggtgcaaaacgaaagccgggcgtcaaaacacccaagcagccacagccagaagaaccgcctcctgtggaggaagatgccattataaatgaactcctatggactggatcgctgaattggtcgacacaagcaagtttagaggagccaagcattagtcacaagcttgagtgttccgtgtacatagctataaaaaacggtgatcccgggatcagtgcggaggattggccaactgatatgcctatggttttgatgccttcaatttatcttggtcagttcgccggagcgtttataaaggactcgaaacttataattctccgatcgacacctggagaagaacacgactcgctagcatcatcaatgtccgccggcagttgtggctgtgcccgattttcctccgaggtcgtctgcaaggttatcatgctgctgtattcgtccccgaggaacgccttcctgggctttattccgagagatcaagctaatttcgtcaagcgattgcgggaagtattagacgaacatcgccaaaaggcgagaaacaaagagtaa

SEQ ID NO: 31851 - protein, 364 aa, DROSOPHILA
MEPVPEEARGVGDDEGELDCLTHMIGALLLQKEPENPENGDSKETIWSGELEWEDAQILDQPKTLHTVQCKICSMVKEGQPEINTENWPNKLKTQLIPKKVLGKIGEQFLKDARMVVFRSSQGEVLNLLITAMSSGFAGCIHFPSNPNCNIKALILIYSRDHQALVGFIPNNEDSFSERLQEILQGAKRKPGVKTPKQPQPEEPPPVEEDAIINELLWTGSLNWSTQASLEEPSISHKLECSVYIAIKNGDPGISAEDWPTDMPMVLMPSIYLGQFAGAFIKDSKLIILRSTPGEEHDSLASSMSAGSCGCARFSSEVVCKVIMLLYSSPRNAFLGFIPRDQANFVKRLREVLDEHRQKARNKE

SEQ ID NO: 31852 - DNA, 4087 bp, DROSOPHILA
tgcattctggggatcaaatattccgccagcctttgttgcaaatatttagataaataacactagcgaatgaacgagaaacgagtgtgaaataggagccattgtatcgtacgattttccgtctttgatttttcgctctcataatgggtcagcgccccgcttattaattgagctcaatcaggagcgtctttattaattgtcgcaggggtatattgtgttttactaactatagtaagttataagttataagtaagtatggttgaacccttctaactttgtaatactagatttcaaagttgaagttacttggtgtacttgcttaactataagatataattttctaatgaaactaagttcttttagctgatgaaaactggtatctcaacgaacaagaatgggtatctcttagtcgctagactcaactgcgaccatttctttgtatttttgcaatacccgcttaattgtctgtctgtcgcagcgcagctcaattggaagtgaaagagagcgcgtaggtctgagtgatcgtgatcgcctgattgacaaacgactgccatcggatgaggcattcgagtttccacttacctggcttacctggctgcaagcggctgtgcaaatggaaattggtagaggctttccccgtaagtggccggggatcggtgtaatttgctaccaaaaacgactaggggtggctccgtaccatgttagtcatatctccaccttctcctcgtccgcctgaagtggttgtatctgggtattgctatcttggtattagagacccgctctcccgattccatatcgattccactgagagtgcgcatgcagccggcgtttgtttgccgttcttcttttcgcatataacataaacagtcggatatatccgagcaccagagagggtcggatatatagccgcctttgctgttgtccctgtcggttggcatgagctattgtttttggcttcggtttggtcttggtttggtttggatagtcagttcggtttcgttggcctgaggtgacgcatctagatagcgggttgccggtttctttcgcgaagtgcccttgtttttccaccgcggtttcacttcctctccctggccaacatatttgggcaacacgtgttggccgataattgccggaaccgagacggagaattctcgctctccctctctctagggagcaaagtacacgtcacaacggagcagagagtccactctatttctcggaaacttgcgagtgcgtcgacatcacgagattgtgccaaaaaagcatagcgtttccgatttggtgttttattataccggcgccactcgacgaagtcagttgcgcgaacggaatctaatatttagattcgtggactctggacaaaagtgttgagtgtgcagtttagccatgggctacgatgaggccatcatccatctgggtgattttggacgctatcagaagatcatctactttctcatctgcctaacatccataccagttgccttccacaagctggccggggtgttcctgctggccaaaccggacttccggtgcgccctgcccttcgagaatggaagtagctacgacttgcccacccacctgtggaacctatcgtatccggagaatgaaaggtgctcctactacgatgtggattacacggaggagtacctgaatggcagcattccacggagcagcaacgaaaccaagacctgttccagctacgtttacgatcggagcaagtacctcaatagtgcggtgaccgagtggaacctggtttgtggcagggatttcatggcagctaccagtgattcgctcttcatgctgggcgtgcttctgggcagcattgtgtttggtcaactgagcgataagtacggaagaaaacccatcctcttcgcctcactggtcatccaggtgctgttcggtgttctggctggagtggctccggaatatttcacctacacgttcgccaggctgatggtgggagccaccacttccggagttttcctcgtggcctatgtggtggccatggaaatggtgggtccggacaagcgcctttacgccggcatcttcgtcatgatgttcttctccgtgggattcatgctgacggcggtcttcgcctactttgtccacgactggcgctggctgcagattgctctaacgcttcccggactaattttcatgttctactactggatcattccggaatccgcccgctggctgctcttgaagggacgtaaggattgcgccattgccaacatgcagaaggcggcgcgattcaacaaggtggagatcagcgatgaggctttgagtgagctgctcgatgagggagaaaactcggaggagaaggccaagcagaagctggaggatcaggagctggatgagggaccaccgccctccgtgtgggatctcttctgctaccccaatctccggcgcaagacgctgcttatcttcctggactggctggtgaccagcggcgtgtattatggtctctcatggaacaccagcaacctgggtggcaatgtgctgctgaacttcgtcatctcgggagccgtggagatcccggcctatatattcctgctgctgaccttgaaccgctggggccggcgatcgatcctgtgtggctgcctggtgatggccggtctcagtctcctggccacggtcatcattccgcagcgaatgcacaccctcatagtcgcgtgcgccatgcttggcaagctggccatcacggcgtcgtatggaaccgtttacatattctccgccgagcagttcccaaccgtggttagaaatgtggccctgggcgccgcctctatggtggcccggatcagtggcatgatggcaccgttcctcaacttcttggccaccatctggaagccactgccgttgctcatctgcggatccctgaccttggtagccggattgctctccctcctgctgccggagacgcacaataagcccatgctggagaccatcgcggatggcgagcgctttggcaagaagaccaaggcagatgtctacctggaaacgggccaagaactgagagcaccagaggcgcagccactcaagggatcaggcgagacaaatggatcaaccatagccaatggccacaagtaatagttagacgctggtgttgaactttaaagtttcaagaaattacagacagggcatctagaattcggtcacgccaaaggcagggcatttacctttaaaacatagaccaagtattatatacaaattttgaaatctcacacgtaaccaaaaaaaaaaaaagaccatgcaaaaaaaattaagattgaaaagcaatgggtagcaacaaatagatcataactcttttagcatttagccgggcagtgaggagcggtcttataaagagggttacgaattccgaagattaggggaggtttttcccaggaaaatcagctggaaaatataccgtgttgcagcataatttatttctatacctatttaactttagatgattttgaaataaacgtacttttccagagattaaataactttacccctcctcctcgttgacccctcgtaaacccggacagaatgtctggccattccattaggatttttgaaacgtgtttccgctgtgtttattttcgtagtcgcctcttatcagccccaaaaacacgagactctcatttgaaatgtggacccgtactataaatcacgagattaacaagtgatttgttatactacttagttataacaatcatttttggctgcagaaagaactcatatgccttggaatgcgaatcataatcgtacgattcttgggctcttgggcataatgttgcattattcacatctcgcgagcactttgaccttgatcttttcctacgtggctgctcgaaaagtgtgtcgtctatttgtagtgcaccatttaccaagtgaactgccacatgttctctgcacttttcaattaatatttaaacaaaccagccgatgtttcagataagaaacggaagtatacgttttttttttaaagagaaatcggtctgaatgaaagagcaatttttggaagagtatgttagttagtattatctataagcagaaggcaaacgtacatatatggggagctcatatataatacttatcaaca

SEQ ID NO: 31853 - DNA, 2087 bp, DROSOPHILA
cctgaggtgacgcatctagatagcgggttgccggtttctttcgcgaagtgcccttgtttttccaccgcggtttcacttcctctccctggccaacatatttgggcaacacgtgttggccgataattgccggaaccgagacggagaattctcgctctccctctctctagggagcaaagtacacgtcacaacggagcagagagtccactctatttctcggaaacttgcgagtgcgtcgacatcacgagattgtgccaaaaaagcatagcgtttccgatttggtgttttattataccggcgccactcgacgaagtcagttgcgcgaacggaatctaatatttagattcgtggactctggacaaaagtgttgagtgtgcagtttagccatgggctacgatgaggccatcatccatctgggtgattttggacgctatcagaagatcatctactttctcatctgcctaacatccataccagttgccttccacaagctggccggggtgttcctgctggccaaaccggacttccggtgcgccctgcccttcgagaatggaagtagctacgacttgcccacccacctgtggaacctatcgtatccggagaatgaaaggtgctcctactacgatgtggattacacggaggagtacctgaatggcagcattccacggagcagcaacgaaaccaagacctgttccagctacgtttacgatcggagcaagtacctcaatagtgcggtgaccgagtggaacctggtttgtggcagggatttcatggcagctaccagtgattcgctcttcatgctgggcgtgcttctgggcagcattgtgtttggtcaactgagcgataagtacggaagaaaacccatcctcttcgcctcactggtcatccaggtgctgttcggtgttctggctggagtggctccggaatatttcacctacacgttcgccaggctgatggtgggagccaccacttccggagttttcctcgtggcctatgtggtggccatggaaatggtgggtccggacaagcgcctttacgccggcatcttcgtcatgatgttcttctccgtgggattcatgctgacggcggtcttcgcctactttgtccacgactggcgctggctgcagattgctctaacgcttcccggactaattttcatgttctactactggatcattccggaatccgcccgctggctgctcttgaagggacgtaaggattgcgccattgccaacatgcagaaggcggcgcgattcaacaaggtggagatcagcgatgaggctttgagtgagctgctcgatgagggagaaaactcggaggagaaggccaagcagaagctggaggatcaggagctggatgagggaccaccgccctccgtgtgggatctcttctgctaccccaatctccggcgcaagacgctgcttatcttcctggactggctggtgaccagcggcgtgtattatggtctctcatggaacaccagcaacctgggtggcaatgtgctgctgaacttcgtcatctcgggagccgtggagatcccggcctatatattcctgctgctgaccttgaaccgctggggccggcgatcgatcctgtgtggctgcctggtgatggccggtctcagtctcctggccacggtcatcattccgcagcgaatgcacaccctcatagtcgcgtgcgccatgcttggcaagctggccatcacggcgtcgtatggaaccgtttacatattctccgccgagcagttcccaaccgtggttagaaatgtggccctgggcgccgcctctatggtggcccggatcagtggcatgatggcaccgttcctcaacttcttggccaccatctggaagccactgccgttgctcatctgcggatccctgaccttggtagccggattgctctccctcctgctgccggagacgcacaataagcccatgctggagaccatcgcggatggcgagcgctttggcaagaagaccaaggcagatgtctacctggaaacgggccaagaactgagagcaccagaggcgcagccactcaagggatcaggcgagacaaatggatcaaccatagccaatggccacaagtaa

SEQ ID NO: 31854 - protein, 567 aa, DROSOPHILA
MGYDEAIIHLGDFGRYQKIIYFLICLTSIPVAFHKLAGVFLLAKPDFRCALPFENGSSYDLPTHLWNLSYPENERCSYYDVDYTEEYLNGSIPRSSNETKTCSSYVYDRSKYLNSAVTEWNLVCGRDFMAATSDSLFMLGVLLGSIVFGQLSDKYGRKPILFASLVIQVLFGVLAGVAPEYFTYTFARLMVGATTSGVFLVAYVVAMEMVGPDKRLYAGIFVMMFFSVGFMLTAVFAYFVHDWRWLQIALTLPGLIFMFYYWIIPESARWLLLKGRKDCAIANMQKAARFNKVEISDEALSELLDEGENSEEKAKQKLEDQELDEGPPPSVWDLFCYPNLRRKTLLIFLDWLVTSGVYYGLSWNTSNLGGNVLLNFVISGAVEIPAYIFLLLTLNRWGRRSILCGCLVMAGLSLLATVIIPQRMHTLIVACAMLGKLAITASYGTVYIFSAEQFPTVVRNVALGAASMVARISGMMAPFLNFLATIWKPLPLLICGSLTLVAGLLSLLLPETHNKPMLETIADGERFGKKTKADVYLETGQELRAPEAQPLKGSGETNGSTIANGHK

SEQ ID NO: 31855 - DNA, 3891 bp, DROSOPHILA
caatctacactgatggcctcaattggtcatttcaacgaatttaagcattcagcgcacttccatttctccagcgatgtatattgtacaattcattccattttctcagctctatttgtttaattttaaaagcgatttaataaaagtcacgcatatttaaatcgtatttgcacacaagtcgccgtctgttcaacgaactttgtgacaactttgtttttattgagccggttcaccgtcggtgagacgataatataaatttgctcattaaaagaattaggtctaaatggtcggctgataagagaacgctataatctcattgagtgcaatctcctaatgcacttgcccgccagaggaacattcaaattttttactcattaatggcgctaataaagttgcgttcacatatcagtggttgtgagtgataaaactgattactgtcaacgctgtccattgataagaaaatcaaatcaaatccacaaaactcacatgttcccaaccttaagtatgttcaatttaacggactgatcaagtttatctgatttatggttcaacgaccttatattgatattgtatatggaaatgggatattccaatatttatgagccatgtgataattttatacccctaaaactttgaaataaagaacatttcataaatgttatattacttgactaattcaaagataaaaagttttagtttgaattaaacttatcgtgtatgtgaattgtggcgtattgttgttgagcaaatgggttctacataaaaacaagagattatgctatagttgagtaccccgactatcagatacccgttactgagctagtgtaactcgactatagcattctctcttgttattttcattattctaagggcagcccaaaagtatgccccacatcagaaccagcgttttcaaactgtgcctgtgcatgtcaaactgtcttggcgcgagttttcaaatttctcagtgaaatgaagtgagcatacaaattgttggctggactaaatggatttgccctttggcacacagactccggaactagatgtactgattgtgggcgggggcctctcgggcctggcctctgccctgaaaatcctggccatggagagcaccctgaaggtgagaatgattgaggctagcgatgccttgggcggcctgatgggccagaatagcacccgactggtggatgcagcacagcaggacatgctggccctcctgaccctcattcacttgtcaccgcggcggcggaggagcatcagtggcagtcttcggagatgctgggatctggatcgtggactcacagctatgccggccaaatttgaactaggacgatacatcgatatgctggacttacggatgcccaagtttcgctcgaaacgattcaagtgggttgggttattaaagaatttgttagatttgcacaggcttatgactcattttctagtcttcgtgagcgagtgtccaacatggagcagcacatttgccaccatttgttctttagcaagtcaaggaacttcatgttgaacctggtgcagctggtctgcggtgttcctgccaatgaggtggactacgatgtctttatgtccgtctgcagctcctgtggtggtctcaaagttctgattgacttgtaagttgctagatgctacaaagtatttatatatattttatctcttgcgagtattagatgtctatattttcctgcttactttttatgattcagcttctgacagttaagtgtttttaatgatgaatgattacaacagtgtatgtcgcaattttagaagcaaaggtgttaaaaacagtaattaaaacataaaggcagtactttgactatggaatacatggttagatagcgcactaaaaagcagagcacagttgaaattgattgattacttgaaatagttacattttataggtcacgtatgtgtcagcagtctgattgatttgattacgtagatctgaaaggtgttatatgtatcatataattaattaccttattaaatgataattacaccccctacgtagctacttcacctaccccacaagcttctatgagatatccactcagatgctgatagagaacattttggagcagctgcaatttatcaagattatcctaaactgcagagccgtcagattagagcactttaagaactatgtccaggtgacggatgatcagggtaacaagcacacggctcaggctgcgatcctggccattccctggaacaaggtgcagaagttgcacttcgagccgcgcataccaaaggtcttcctaccacggacgacatccagatctggccgaaagggccgccaggtgatcagccagtttcagttgcgatacggcaagtccgtttggacggatctcggttactccggcaactttctcagctcccagccgatggtcagtggtcacgagtgtcggatgtccagcttttgcggctacgtgctgcacttgccggaggatcaggacgaagtgctgcaagatgtcgtcgatctgttggccgaacacttcggcgaggagatgcgccagccactggagtgccagtgcttcacggatgagctgaatgtggcgcagcataagccgcagaccaagccctggcatcgggtcatctggtccagttcctcggccgtgggcaccagctatcgcagcctgatgggtggtgcggtgcagagtggcttccgtgcggcggtgaatgccgtctttgtggtgcgaccgcaggtggtcagctggaaggacatgctcgtcgagcagccaaagaatggccaggatgttgtctccgccggcagaattaggggactcctcagtcgcctcaatctctacaatgtcaccttctacagcttctttgtgatcggactcatctggctgctgaacctgggttatgccaggtcaatctaggggattaccacacctgtgtacatatgtatctatagaaattaaatggttgtttttgaatgcctttagtcggagtctttgtctcgaaaatcaaaagtcgagtggaatgtcttaagtgggctcattgagtttagcaacgcctagatttctatgaattcttgaacaattccgggcaatcattcacttaagctttgccaacgcctggatggctaaattgtgctgtcgttataagtagaaattatcatctcaaaggtttccatacgatgtgtgtgggggtaagtacttaagaacacattataatatacataatatataatgcatgtacatatatcatttttattgtgcaaaatcatttaattataaggccaattattgctacagatgagtttcatacaataggtatgtgtatcttttacgtctcaatgtatcttataaagtgtgtaaagtaacattacatttaagagcaaaaataaagtagtttactatctctttatttgctgtgctatatttaaattgggcttgaatctccttaaattgcattatatctttttatgacaaagcatatcgcattataaagaattctggctgattacgttgataggagggtgtgtattattagattagctctaaatggattgaccgatgtggcctgaaagcggataggattgagtaaataagccagaatagtacacttccgcaccaaaatgcacgtgcgtttggaaaacaatggaggtctggaatcgaaataatgccgggtttcgacccaaaacgaattgctaatggcggcacgcccatgtgcatcacagcgacccatcaactaaagctccaattaagactagaatgtatagatgggtatggctagaaccgttagtacggctagaacggctaacctacggatgaatagaatgcgcctgggaagcgaataaagccgaacaagtgagcagcaattgtggcaaggctaaaattagaatgcgataacaagggaaatcataattgaagtgca

SEQ ID NO: 31856 - DNA, 1434 bp, DROSOPHILA
atggatttgccctttggcacacagactccggaactagatgtactgattgtgggcgggggcctctcgggcctggcctctgccctgaaaatcctggccatggagagcaccctgaaggtgagaatgattgaggctagcgatgccttgggcggcctgatgggccagaatagcacccgactggtggatgcagcacagcaggacatgctggccctcctgaccctcattcacttgtcaccgcggcggcggaggagcatcagtggcagtcttcggagatgctgggatctggatcgtggactcacagctatgccggccaaatttgaactaggacgatacatcgatatgctggacttacggatgcccaagtttcgctcgaaacgattcaatcttcgtgagcgagtgtccaacatggagcagcacatttgccaccatttgttctttagcaagtcaaggaacttcatgttgaacctggtgcagctggtctgcggtgttcctgccaatgaggtggactacgatgtctttatgtccgtctgcagctcctgtggtggtctcaaagttctgattgacttctacttcacctaccccacaagcttctatgagatatccactcagatgctgatagagaacattttggagcagctgcaatttatcaagattatcctaaactgcagagccgtcagattagagcactttaagaactatgtccaggtgacggatgatcagggtaacaagcacacggctcaggctgcgatcctggccattccctggaacaaggtgcagaagttgcacttcgagccgcgcataccaaaggtcttcctaccacggacgacatccagatctggccgaaagggccgccaggtgatcagccagtttcagttgcgatacggcaagtccgtttggacggatctcggttactccggcaactttctcagctcccagccgatggtcagtggtcacgagtgtcggatgtccagcttttgcggctacgtgctgcacttgccggaggatcaggacgaagtgctgcaagatgtcgtcgatctgttggccgaacacttcggcgaggagatgcgccagccactggagtgccagtgcttcacggatgagctgaatgtggcgcagcataagccgcagaccaagccctggcatcgggtcatctggtccagttcctcggccgtgggcaccagctatcgcagcctgatgggtggtgcggtgcagagtggcttccgtgcggcggtgaatgccgtctttgtggtgcgaccgcaggtggtcagctggaaggacatgctcgtcgagcagccaaagaatggccaggatgttgtctccgccggcagaattaggggactcctcagtcgcctcaatctctacaatgtcaccttctacagcttctttgtgatcggactcatctggctgctgaacctgggttatgccaggtcaatctag

SEQ ID NO: 31857 - protein, 477 aa, DROSOPHILA
MDLPFGTQTPELDVLIVGGGLSGLASALKILAMESTLKVRMIEASDALGGLMGQNSTRLVDAAQQDMLALLTLIHLSPRRRRSISGSLRRCWDLDRGLTAMPAKFELGRYIDMLDLRMPKFRSKRFNLRERVSNMEQHICHHLFFSKSRNFMLNLVQLVCGVPANEVDYDVFMSVCSSCGGLKVLIDFYFTYPTSFYEISTQMLIENILEQLQFIKIILNCRAVRLEHFKNYVQVTDDQGNKHTAQAAILAIPWNKVQKLHFEPRIPKVFLPRTTSRSGRKGRQVISQFQLRYGKSVWTDLGYSGNFLSSQPMVSGHECRMSSFCGYVLHLPEDQDEVLQDVVDLLAEHFGEEMRQPLECQCFTDELNVAQHKPQTKPWHRVIWSSSSAVGTSYRSLMGGAVQSGFRAAVNAVFVVRPQVVSWKDMLVEQPKNGQDVVSAGRIRGLLSRLNLYNVTFYSFFVIGLIWLLNLGYARSI

SEQ ID NO: 31858 - DNA, 4375 bp, DROSOPHILA
tgctagaatttctgatgcgaatacaactgtcaaatataaacggtttagaataagaactgacgttttcgggtgctgtaggcgtttgacaaccggagagatacaatgggtggtggacagctatcggtggcacgagcaaatttgttgcgttggatcatcgccgcattggtgtcccattggttgataaaggcacgggcctcgtcgtcacatggctttgccgtactcggtctttcttcctgcaaaaaagattatttcaaattgatttttgtttgaaatattccaaaaaataggcacctgggctcggcggcgtcgaggagcctcagtttccatcgactccagaaagtcccgtctacgatttcgtttggtcgccacactgtccgggaaattaacccaggtgcactcgtacttgcgcttctccagttcgcgcggatggtactgctcgttatcgaagcgttcctgatcgtccccgaccgagatgcgtccgtggccctcgtcctgctcccacatggagcgtcgcttgttcttcttgtacacatccgctttctcccgctccctgagtatctgatcgtctggcaggtattggctgcccactctgggccgctgggaacgcctggcaatgtgacgcgttgaggcgcattcgatccgcgcacggaggagctcgatgcaacggttcaccatcatccgagtgccaccgtggatgttaaccattctcggaagatattttttttttttttacagttttagaaattttattaaaagaattagggaattgtgtaagttttagtattggaatgccaaaatgtagcctgcttccaaagaggcggcgtgtaacgaactgaatccgctcccaacaaatcgaggtgacatgtaaggtgcgtacgaatcaaggcacacctgatgctgtaagtcggctcacctttcttaattagcactgttcacctggcgttaattttccacgactagtatctgtcacacagatcagttgagttctcagagtggcggcatgaggtctacgattttggtacttctgttgatcggagccattagggcggctattgggaatcaaacccatctggtgggctcctctttggagaatcgcattctatcgcgacgggtgcgtgctttggtttttcccgacaaggcatcccttctcctgaccgccgccctaaccaaactaattttgggcggacgaccaagtggccttcagtacagcttggagtttgatatgtacgttccggttcccgacaccattgagggttggcagcccaagatcctaaagaagatgaagccaaagccaatgtcaacgccaaaacgccggtatgattggtcatatagcaaaagacctgaaagctattatccatactatgcggatccatatagaaatgctcattacgaaaggtaaagtatatatatttaaccgttaaagaaataaattcgaaattttaagttttagtcctgctaacaatcatagagttccattctaccaagcaacatcgaggtaaattattatgaattactttcaagaggtaataattacaagttcaatgtcctactagggattcatttccccaagcttcatggcattcatcctcgcccactaatcgcaggaaagagttttatacatcgaggtaatataagattaatcattttgaaataccctaaagtggctttaaaatatttcagaccctcattgaatagggcctcattctatcatagcccatggagcttgtctgcaaatcagagaaactcatatccaccggaggaagaagtttatgaatcctgggatcaagtgcctagttggaagttacatcgtggatacagagaacgcagagagattttcgatcaactcgaggccatgggaaaagtgtaagtcttaagtgatccacagaataatttaaaagaacctattaatagttttcagttggacctaaggtcttgtatcaagagagccatgtgtgaactaagggccaagttaaatgcaggtcaagatcagggattcctcatggaggatctaatgcgaattgtgctgacgtaagtaaaataattcattgtcatatataatgccattaaaaccataataaactatacttcagagttcccgaagaggtggccgatgataagtacaggcatcgcatggataaccaggactgtgcccgattctacgccccaagttgtccctacaatgttctagacttccttacccaaagtggtgcaaaattgtaaacatagtgagccgagaatcgaacttccgccccaagtcgttgtactgtgatttcggataacccagagtcatcagttctcattccgttctcgagctggataggtctctagcctcccagtttcgtgttcgcaaaattccatctaaatttccggcccaaaccttttggaaaatatatttcggttaaaaattcaaaattccagagctcaaaaatggcactgagtgttaatccctcccgagtactgttccgtccaatttttggtgcggttaacagctgtgtgcgatttgcatccggttgtgaaaagaaggggccgagccggtgcccgaaggtgttgaccaagttcccctgcggcaaacccaatctgcaggctccgcccaagaagaagaggaagatggtcaaggcacagtccatgtggctgaacccattctgtgatcccgacgacaccgcctgtccgttcaatccgcgcttcgacgatatctactacgtcgagtcggacaaggccaagcggaagtactggcagacatgggtggcctgccctcccatccagattaagcccaagaagatttgctgtttcgccaaggctaagccggctcctatcaagcggcgaaagccatcggcgaagccatcgaccgcctgcccgcagccttgtccggatccgtcggaggatctgtgtccccgtctggcccgtcgctgccatcgcgatggtcgccgaccaccctcatgcagaagggaacgaggacccctgccgtgtgtgaagccccggacgccatatccatctttctccgagtgccgacgtctcaagcccgatgccccgccactgaaggagtgcaattgtctggcgaaaccgctgctctgtgagatttgggccgagttccgacgacgagccattgccaagaagtagagccgtggccctgattatataaagcgcttttacgattctacagcatatacattttttatttgtatgaggagattaaaatgtttgccctgagtgccagcacggatgcaggatgtgtgatcactgaaacggattcttggccatatttgtcacgaggctccagagcagcggattgcagtcactataggttcgctcgcagtcggcacctccacgtcctgcgtcacgggcatgtaaatacttactggccacattgtccagggtgggtctggaaattcatttataattacaattcataactcaaccattccaagtaaaatgtcacatacaccagtactgcgtttacgatctcactgaagatgttgctgttctgaaagggtttctgcgagatttcgcatatgcttctgagcaggcaaactccgccgtaagcaccatctagtctgcagacaaagagggggattaaaaaataggtagctaatccctaaagttatactcactgctccatgcctacttcgatggcattgtagacccatgtgcgcgcctcgtcgtgcaggacttttgcctgcatgtccttgcgccactcgcgagcagtagacacaaaagcggtggtgttccaaaagctccaccagtagaggggaatggtggtgggtatccactggccttgcaagttgaagaaccaccaaaaggactgctccttgtcggtctgcttcacaggatacgccaggctaggtactaactgcaagtaggcggtaggataagtggaatggttagagatgtgccaaatctaccatgttgtaatcccaccttgacaacgccctggccattgtagatggccacacgcttggagcgactcaaggaggtaagactgctgttatcgctctcatctggatggtttatacttctgctaatccttaaaaaactctcgtctgaggtgtaaatgttctttgtgaagctcagcaccaagtcaatggtgaatagcaaactgaggagaaacaaaagccaggtcagaactctgtggaccatcttgtttgtgttctagtgcaatgctaactaatcgatctttgtttaaacttggatctcagccacgatacacaaagaacgccatatgtgtttgcctaagaaattgacaaattcagattggaaagaatacacagagaaaaaataaatttaactaaattcttgttgattgttgcacttattaaataattataaggaagtattttaaatttcatacttattaattaaaatatgtcttcaacttata

SEQ ID NO: 31859 - DNA, 1524 bp, DROSOPHILA
atgaggtctacgattttggtacttctgttgatcggagccattagggcggctattgggaatcaaacccatctggtgggctcctctttggagaatcgcattctatcgcgacgggtgcgtgctttggtttttcccgacaaggcatcccttctcctgaccgccgccctaaccaaactaattttgggcggacgaccaagtggccttcagtacagcttggagtttgatatgtacgttccggttcccgacaccattgagggttggcagcccaagatcctaaagaagatgaagccaaagccaatgtcaacgccaaaacgccggtatgattggtcatatagcaaaagacctgaaagctattatccatactatgcggatccatatagaaatgctcattacgaaagttttcagttggacctaaggtcttgtatcaagagagccatgtgtgaactaagggccaagttaaatgcaggtcaagatcagggattcctcatggaggatctaatgcgaattgtgctgacagttcccgaagaggtggccgatgataagtacaggcatcgcatggataaccaggactgtgcccgattctacgccccaagttgtccctacaatgttctagacttccttacccaaagtggtgcaaaattctgtgtgcgatttgcatccggttgtgaaaagaaggggccgagccggtgcccgaaggtgttgaccaagttcccctgcggcaaacccaatctgcaggctccgcccaagaagaagaggaagatggtcaaggcacagtccatgtggctgaacccattctgtgatcccgacgacaccgcctgtccgttcaatccgcgcttcgacgatatctactacgtcgagtcggacaaggccaagcggaagtactggcagacatgggtggcctgccctcccatccagattaagcccaagaagatttgctgtttcgccaaggctaagccggctcctatcaagcggcgaaagccatcggcgaagccatcgaccgcctgcccgcagccttgtccggatccgtcggaggatctgtgtccccgtctggcccgtcgctgccatcgcgatggtcgccgaccaccctcatgcagaagggaacgaggacccctgccgtgtgtgaagccccggacgccatatccatctttctccgagtgccgacgtctcaagcccgatgccccgccactgaaggagtgcaattgtctggcgaaaccgctgctctgtgagatttgggccgagttccgacgacgagccattgccaagaagtagagccgtggccctgattatataaagcgcttttacgattctacagcatatacattttttatttgtatgaggagattaaaatgtttgccctgagtgccagcacggatgcaggatgtgtgatcactgaaacggattcttggccatatttgtcacgaggctccagagcagcggattgcagtcactataggttcgctcgcagtcggcacctccacgtcctgcgtcacgggcatgtaaatacttactggccacattgtccagggt

SEQ ID NO: 31860 - protein, 421 aa, DROSOPHILA
MRSTILVLLLIGAIRAAIGNQTHLVGSSLENRILSRRVRALVFPDKASLLLTAALTKLILGGRPSGLQYSLEFDMYVPVPDTIEGWQPKILKKMKPKPMSTPKRRYDWSYSKRPESYYPYYADPYRNAHYESFQLDLRSCIKRAMCELRAKLNAGQDQGFLMEDLMRIVLTVPEEVADDKYRHRMDNQDCARFYAPSCPYNVLDFLTQSGAKFCVRFASGCEKKGPSRCPKVLTKFPCGKPNLQAPPKKKRKMVKAQSMWLNPFCDPDDTACPFNPRFDDIYYVESDKAKRKYWQTWVACPPIQIKPKKICCFAKAKPAPIKRRKPSAKPSTACPQPCPDPSEDLCPRLARRCHRDGRRPPSCRRERGPLPCVKPRTPYPSFSECRRLKPDAPPLKECNCLAKPLLCEIWAEFRRRAIAKK

SEQ ID NO: 31861 - DNA, 2507 bp, DROSOPHILA
acaaaagcggtggtgttccaaaagctccaccagtagaggggaatggtggtgggtatccactggccttgcaagttgaagaaccaccaaaaggactgctccttgtcggtctgcttcacaggatacgccaggctaggtactaactgcaagtaggcggtaggataagtggaatggttagagatgtgccaaatctaccatgttgtaatcccaccttgacaacgccctggccattgtagatggccacacgcttggagcgactcaaggaggtaagactgctgttatcgctctcatctggatggtttatacttctgctaatccttaaaaaactctcgtctgaggtgtaaatgttctttgtgaagctcagcaccaagtcaatggtgaatagcaaactgaggagaaacaaaagccaggtcagaactctgtggaccatcttgtttgtgttctagtgcaatgctaactaatcgatctttgtttaaacttggatctcagccacgatacacaaagaacgccatatgtgtttgcctaagaaattgacaaattcagattggaaagaatacacagagaaaaaataaatttaactaaattcttgttgattgttgcacttattaaataattataaggaagtattttaaatttcatacttattaattaaaatatgtcttcaacttataatgaaggtatatgtattatatttagatccaatctgaattattttctgtgtgtaaagatctttgggtaatgaaacgttcttgtggaggaaaacggagccagccgaagatgtctcttgattggccagatcacgctgtcacttggatcttaatgatggagcatgcgctccactttctgaggtgttttgtggaccattctaattgctattcacgcatctggctctggtcgttgatccgctcattcacagctcgccttaattaatccccaaatagacaatgaagtggtctggatttcgggtggctcgttgcatgattcccaggtggatcacatcgccatgtatcgctcaaagctgcagaacgtcggagatctcggccaggtcagcctgctgctgatcaccctgatacgacccatttatggacttctgctttttcccacctcaacggtgctccagctgacctcatccatatccattcccgccgacctcaacacccgcaccaaagtcttcatggacatgggcttccagatgaattacaacctgccgcccacggtgtccgccttctacaatgccaccatctgggcagatgagctgtcccgaaggcaaaagcgccagttggaccacagcctggatgctaatctgcagcagtatgatctggagggcggcatgcatcccgctgattttacagccggtcaattgtacaagggaatagaaaacatgctcgagacctatggtttccatagatcctgtctgctccgcagtgtctgcgaactggccctgcatcctttcgctgaggaccacttctatggaatggtcacccaagttataaccttcctgctcacgtaagtttcaaacgttgaaagcttgaatttgttaattcattattctttttcttttttgtaaatataaatattctgaagaagattttgttatatccattatatatatttattcggaattttctgtttttaattgcagaccatctcaacacgagggattcgccgatgacgagcagcattatcgtgataaatacgaaaaagccgagcaaattggatttctcggtggtcagtgtcatctatcatatccgagttgtcaagcagatatcataaacctagccacccgactggtcagatgaaataaatatcttagccataaaattgtcgtctatttaattggtctagattatttcttcactggcacacagttgcagtttacaattaagcttcattgaattgaaaatgctttcctaaattattatgcctctaggccaactagttgtccacaatcagtttaatggatcaggtaaacactgctagcttaacaggctgctgatgccactgagaaagtccacggggcagttggaatacagatggccacaatccattccaaggaatccttgttgttcggcatgttcgtaaacttcccggtaaacgttttccccaggtgcgaaagcctcatgcaaagagggtctgcaattgaaagttataagaaaatctatgacaaaatatgatttttacctacgtcagggtaaaagtcagcagggcggtgagcatattgttttccacatccttgaaaggatgtcgcgccaattcacaaacactgcgcagcaggcaggactcatcgaagccatactggatgagcatattctccaggctctcgtacagctctccggctgtaaagtcactcggatgcattgtggacacaccttctggcagatactttgcggtctcattccacaattgacgctttctgcgccgagaaaactcatctggccaaatggtggctgcgtagaaggaggatggttcagccggcagggcgtagttcatctggagaccccaatcccaga

SEQ ID NO: 31862 - DNA, 507 bp, DROSOPHILA
atgtatcgctcaaagctgcagaacgtcggagatctcggccaggtcagcctgctgctgatcaccctgatacgacccatttatggacttctgctttttcccacctcaacggtgctccagctgacctcatccatatccattcccgccgacctcaacacccgcaccaaagtcttcatggacatgggcttccagatgaattacaacctgccgcccacggtgtccgccttctacaatgccaccatctgggcagatgagctgtcccgaaggcaaaagcgccagttggaccacagcctggatgctaatctgcagcagtatgatctggagggcggcatgcatcccgctgattttacagccggtcaattgtacaagggaatagaaaacatgctcgagacctatggtttccatagatcctgtctgctccgcagtgtctgcgaactggccctgcatcctttcgctgaggaccacttctatggaatggtcacccaagttataaccttcctgctcacgtaa

SEQ ID NO: 31863 - protein, 168 aa, DROSOPHILA
MYRSKLQNVGDLGQVSLLLITLIRPIYGLLLFPTSTVLQLTSSISIPADLNTRTKVFMDMGFQMNYNLPPTVSAFYNATIWADELSRRQKRQLDHSLDANLQQYDLEGGMHPADFTAGQLYKGIENMLETYGFHRSCLLRSVCELALHPFAEDHFYGMVTQVITFLLT

SEQ ID NO: 31864 - DNA, 2954 bp, DROSOPHILA
catcgcatcgatgatgatagctatgctaatccttataagtggcaaaattggaatcagaaactaaaatgggacacttaccaatggaaggaaggggactcaaacaaggcaaagtggtcgaaatggaccactccttccccaaagtgggaatccaaatggaatcagaacaagtacagtggagcatggcaatcgcaacattaccacggccatcgcgatcgcagatcactgtttgatcggttcaccaagctcagttcattgtgcgtacttatagtttttttttttttaatttatctgatgatcttgcaactctttaaggattggcattgatgtcaagtcttgcattttgcgcagcatctgtgatagcaagagattactgctgccacctggttattccatgttgcaggacatgttgcgagtggttttcacgtaagtttaaatcctctttatttaaaataaaatattttttttaatttttttttaaaagtctgccccgtttggatgggttggaagatgaatatagtcgcctaatggacaaagatgccgatgaatgtgcagcggagttaaagtctaagtgtaatatgaatttattaatttggctgttgagtggcagacttgaataaagtaaaacttatttatcagtcacgtattttgaccaagatttctcaaattaagttcttcaattgttgaatgtgcaattaacacctcagtacactcgattacaatggtaaacagtaccttgaaattggtacttggttgtcttcactttgaatatctcaatcagtagtcttcagaaatgcgtgtcgatttgttgatcctctttagcttcgaacttatccacttgactttaggccaagtggattcaaaccacacggagttgaagcatgtgcttgatagagtcttttcccgtcgaaagcgtttcgtgctatttcctccaggatcaaatttgaagtttaccgggcagctgagtaaaggtctaatctctgcttatcccaagggagtgaatatgaatatagagcaggcttgttattatcccgttccctcgaaacgcgaagatgtctatccaaagcgttatcgtcagagaacaacgaccacggtgaaaccaaagacaactacggaacccacctatgtttggatacccggaacaaactggaggtttaaggccacccctctaaagaaacccatgccaatgaaactacaccaacgcatcgatgtgaggccacaaaagccatcctacgtagaccctgccaagtggacacattggtccaaatatggtaaccgttacgagaactggtcgccagcgaatcacaactacgagaagtacagtcaacctggcagatggagcaagtggaccacgcagtcgccgaagtggtcaaaacgctggtatagatctgcggatggcgagtattatgatcccgaggtggaaccctatgaggatgtgcggtctcagccgctttatgatccgtacgatcccgacatgacaccgcatgaagtagctcactatcgtgaattggagcatctcaaggatatgcggcattacaacggacatcgcgatcgcaggcagctctttgagcactttgatggtttcagtaagctgtaaggatgagtctaatgcttaatctatggtaaataacttctttataatactttagtttgggcatcgatgctaaagcctgtgttttgagagccatctgtgatagcaagcgcctgcttctgcctcgtggatattcgatgattcaggatattgtgagacttgtgtttacgtatgtttaatgagattatgtaatatcagctagactaatatttgcatattaaccaccttagactaccaaccgcatccggtgtagaggatgactattcccggataatgcaaatggatgcggacgactgcgaccgtcagtttcgcgactcgtgtaagctaaacttactggcctggctaatggatggaaagtggaactgaataaaggcaacttaaagctggcttggggattgggtgtttattgtatgaactgggcctgccacatggactgcttgcactccggatagaggacggcacagtccgccttggatgcgtgggccttgtcgtagtgggagtcgcgataggcaaccggttcgttgtccatggcttccggaagggtgaacactgcacgcattagttcgcccacgaaggtgccgggctcatgctccgtcgatttctggcccgtttcgcagagggttcgcaatacgcagtggtggccatggtgacctcgtctgtggaaggagaatgtcgtttagcacgctaattagtggataagtacttctcaactaaaatccctgatgagtctacctaaaacttgtatctgaactttaaggtatctcaatgaaatagaagaagaagaaagagtacatctagaaggaccgatgccttacttagagtcctacttacttgtccagatacttctcgattcgctcgtacaaggactgtctgcttctgcgatggtgcttgatctggagttgctccaggcggctcatcttgtcctcatgctcagtggccactccactgcgtcgctggcgtttatgtggattggctgcatccggaatgctgcgcttgccaaacaccggatatatgcgatgatgtcgaggagctggccttcgagtgggtcgactggtggtgggtgcgctggtggtggtggtactgtcctgtcgtcgctgcgccgctggcggtgctgcctgttgacttttgtagccgtagtatctatctttgagtctgcaaatgaaatagataattaattaaaatatgaacatgcataaggtaaaactataaaggactgaatactaaagctaaccttttagaaggatgaagattaataacctcctaagtatgtacaatagttttaccttgagtttaaagcccagtagggatagcgtgagttctgggcgtgagagtagggtctcgtccacttggcgaatggattgctgga

SEQ ID NO: 31865 - DNA, 837 bp, DROSOPHILA
atgaatatagagcaggcttgttattatcccgttccctcgaaacgcgaagatgtctatccaaagcgttatcgtcagagaacaacgaccacggtgaaaccaaagacaactacggaacccacctatgtttggatacccggaacaaactggaggtttaaggccacccctctaaagaaacccatgccaatgaaactacaccaacgcatcgatgtgaggccacaaaagccatcctacgtagaccctgccaagtggacacattggtccaaatatggtaaccgttacgagaactggtcgccagcgaatcacaactacgagaagtacagtcaacctggcagatggagcaagtggaccacgcagtcgccgaagtggtcaaaacgctggtatagatctgcggatggcgagtattatgatcccgaggtggaaccctatgaggatgtgcggtctcagccgctttatgatccgtacgatcccgacatgacaccgcatgaagtagctcactatcgtgaattggagcatctcaaggatatgcggcattacaacggacatcgcgatcgcaggcagctctttgagcactttgatggtttcagtaagcttttgggcatcgatgctaaagcctgtgttttgagagccatctgtgatagcaagcgcctgcttctgcctcgtggatattcgatgattcaggatattgtgagacttgtgtttacactaccaaccgcatccggtgtagaggatgactattcccggataatgcaaatggatgcggacgactgcgaccgtcagtttcgcgactcgtgtaagctaaacttactggcctggctaatggatggaaagtggaactga

SEQ ID NO: 31866 - protein, 278 aa, DROSOPHILA
MNIEQACYYPVPSKREDVYPKRYRQRTTTTVKPKTTTEPTYVWIPGTNWRFKATPLKKPMPMKLHQRIDVRPQKPSYVDPAKWTHWSKYGNRYENWSPANHNYEKYSQPGRWSKWTTQSPKWSKRWYRSADGEYYDPEVEPYEDVRSQPLYDPYDPDMTPHEVAHYRELEHLKDMRHYNGHRDRRQLFEHFDGFSKLLGIDAKACVLRAICDSKRLLLPRGYSMIQDIVRLVFTLPTASGVEDDYSRIMQMDADDCDRQFRDSCKLNLLAWLMDGKWN

SEQ ID NO: 31867 - DNA, 3013 bp, DROSOPHILA
tttgtggtccacccgtgggcattctgcagcacccaggtgacattgggcaaatcgtaggcaacgccccaattgatgcccaaactaaggtacagcaggttggggttgccaataacaccggtggtcagacagacagcgccctggaacacggccacataatttaaataagttagcatagtagcatttaagtattgttgattccaactggacacaatcttgtttgcatgagcattcatttggattggttttttttaattcctattatttttttttcctgtgcataaagacggcatgttgtcccattgttcgagggttcgttgactcaccgatgctgatgaaccctggggaaaggccacaaagcgcttgcctctcgagagtttccgctgcgacgatggggccgcatgtggtgtcagtgggtcctggtccaagtcccggtcgaagtcctgtgcgttcccctgtgcgacgacgctgtgtcctggcggagtcagcgtgacattgttgactttgccggcttcgtgacttgtcgccggcggagcaaattcatccggcaaactgctctggcattcgcccaaaagccatgccgtgaacaagagtgtcagccaagtcgcagacataattccaactgaatcaatgatttggcccttgatttctaccatattccgtccagcgctttgtcttagcgttctatcaaaatggcaacttgttaattgaattagagcctggccaagtgacccctttccatactaatgctttgaccaaatagctgctgcgtgccgaattggatggccacgcgaacggaatgtgaacactgcttgttcaatctggagttaagtgtcgatccagcagcagcctggttcttcagttctcggccagcttcgccatggaaaacttaatatggcttagactggcggttttggccattttagtggccttagtttccgcaggaaatggtaccacttccctaatctgcaagtctaactccgggaataggggcgtgacttacatgcacgaaaagatccatctacttcatcgccagaagcgctggctcaccttcgaactgggatctgctctaacggttagtaaaatagtcatttaacttttaaataatggaagttattttacttatacttacttttgctgatcacacaggtgactgccaattgcggtaaggcgattctagatacgatacccagaggacttctttggctggcagagattaccagtctttatgaactacctgctgccattgaagattggatacccaggcatgtaggcaagccgaaggcgaagcttccgcctccacctccgccaccgacacctcctccaccaccacctcctccaccaccaccatctccacctggtgttcctgccaatccagtttcactgccaccacaacccgtgattgtgcctctgaatcccgcagatcccatacagtccttctacttcgcctacccgcaaggcattcccacgctgagtcgccgcaaatcctattcgcagcagttgcagatgggatgtccagccacccatctggtcaaggatatgtacggaacctactactgccgaccatcggcgatgtcccgtcgtctgagaagggaactggagagccagggtaggagggtgatcaatgaggcacagaatccgcacggcatgctcttcgatctgatatccataatggccaccatgtaaggattgacccttttctgtatagtatgtggggagactttcagctttcccatatcaactttcaggtttaattaccagcccaactactgcgtgatgcgcaccctgtgcgaggcacgtcatctgctggctccgccgggcctaacgctcttccacgacatcttccgcatcatgctgcgctacgtgcatccggagatagcccacaagcccaagtatcgggaggcctttactgccggccactcgctccacaaatgcgccagtttgtatggaccacattgccggcagagttttttgctgctcatcagcgaaaggtttcaggagaaatatgcgagttgattgaatgaaatcgaaaatatggagaaaacgccaatgaatttatcgaagtgcaaggcctcagctgactgttatgacaccctatatggagttaagcgttgcgtgttcaatttaatataaacttaaagtgcaataaacggaattgtaaatatgcagcccttttttttaatgcagattcttggaaatatccattaattttgggtttaaattggtgtgcaattatactttttaagcttcaattgttaatatgttttctatttgataataactacccattataattaatttttagaagccatgaacggttaattaaaatataataattttagtattaagagttcttatttacttttcgctcagttttgcctttaatttcttgcgtttattgaagctcataacgatgttaaaaaatcaataccttcgtgcattaagctcgcacaaattgtgtaatatttccacagttcaaacaataaatacaaatgaaaaatgagtgcataaattgatgagcaaaaaaaaaaaaacgcattttattgtgcgccacagcagaaagttgaatggaaattaagtaaatactcgtacatcgacatttttattgaccattttttttggccactttgtggtgcgcttcatcgaaaattgcagtgcatatgagttcgactctttatccgttttgatgtttaaaattattaatgttttttagtatgaccgctcgatattaagtagccgaactgtggtgacataaatgtatatctgcagctaaagtagggtatggaaacattgatggattcccaagtgcatggaactcactctccggggagccgaactgccaattccataatttgtgctgtttgtttttcgcttcacaatgctgacaattggagtggaagtggaaacaaaacaagtgtatttcccactgttgacagaaatttacatgctacagcaatcagtgttggccgcatcgacgcacgatggccaaggggttcggagatagggaaactcaaac

SEQ ID NO: 31868 - DNA, 873 bp, DROSOPHILA
atgcacgaaaagatccatctacttcatcgccagaagcgctggctcaccttcgaactgggatctgctctaacggtgactgccaattgcggtaaggcgattctagatacgatacccagaggacttctttggctggcagagattaccagtctttatgaactacctgctgccattgaagattggatacccaggcatgtaggcaagccgaaggcgaagcttccgcctccacctccgccaccgacacctcctccaccaccacctcctccaccaccaccatctccacctggtgttcctgccaatccagtttcactgccaccacaacccgtgattgtgcctctgaatcccgcagatcccatacagtccttctacttcgcctacccgcaaggcattcccacgctgagtcgccgcaaatcctattcgcagcagttgcagatgggatgtccagccacccatctggtcaaggatatgtacggaacctactactgccgaccatcggcgatgtcccgtcgtctgagaagggaactggagagccagggtaggagggtgatcaatgaggcacagaatccgcacggcatgctcttcgatctgatatccataatggccaccatgtttaattaccagcccaactactgcgtgatgcgcaccctgtgcgaggcacgtcatctgctggctccgccgggcctaacgctcttccacgacatcttccgcatcatgctgcgctacgtgcatccggagatagcccacaagcccaagtatcgggaggcctttactgccggccactcgctccacaaatgcgccagtttgtatggaccacattgccggcagagttttttgctgctcatcagcgaaaggtttcaggagaaatatgcgagttga

SEQ ID NO: 31869 - protein, 290 aa, DROSOPHILA
MHEKIHLLHRQKRWLTFELGSALTVTANCGKAILDTIPRGLLWLAEITSLYELPAAIEDWIPRHVGKPKAKLPPPPPPPTPPPPPPPPPPPSPPGVPANPVSLPPQPVIVPLNPADPIQSFYFAYPQGIPTLSRRKSYSQQLQMGCPATHLVKDMYGTYYCRPSAMSRRLRRELESQGRRVINEAQNPHGMLFDLISIMATMFNYQPNYCVMRTLCEARHLLAPPGLTLFHDIFRIMLRYVHPEIAHKPKYREAFTAGHSLHKCASLYGPHCRQSFLLLISERFQEKYAS

SEQ ID NO: 31870 - DNA, 2820 bp, DROSOPHILA
tgggtttaaattggtgtgcaattatactttttaagcttcaattgttaatatgttttctatttgataataactacccattataattaatttttagaagccatgaacggttaattaaaatataataattttagtattaagagttcttatttacttttcgctcagttttgcctttaatttcttgcgtttattgaagctcataacgatgttaaaaaatcaataccttcgtgcattaagctcgcacaaattgtgtaatatttccacagttcaaacaataaatacaaatgaaaaatgagtgcataaattgatgagcaaaaaaaaaaaaacgcattttattgtgcgccacagcagaaagttgaatggaaattaagtaaatactcgtacatcgacatttttattgaccattttttttggccactttgtggtgcgcttcatcgaaaattgcagtgcatatgagttcgactctttatccgttttgatgtttaaaattattaatgttttttagtatgaccgctcgatattaagtagccgaactgtggtgacataaatgtatatctgcagctaaagtagggtatggaaacattgatggattcccaagtgcatggaactcactctccggggagccgaactgccaattccataatttgtgctgtttgtttttcgcttcacaatgctgacaattggagtggaagtggaaacaaaacaagtgtatttcccactgttgacagaaatttacatgctacagcaatcagtgttggccgcatcgacgcacgatggccaaggggttcggagatagggaaactcaaacccaataccaataccaatcccatggaggaggaggaggaccaccacctaacaatgggcacttgttaaaagcggactttgcagtcaatcgctaatcagtgcaatcaacacggcactcgaactaataagccgctatagcggctggttcacattttcagtttggtttggtcagttaccaacggaacgttctaccgacagcatgaggctctctcgaactggccacttcagtttgctggcactttgcctcctgctgcacgaggtgcaatcccaggtgatgtccatgtcatcagctgccaaccggacaggggaggtgaccaaagttctgcgccggcacaagcgttatctggcatttccggagggctcatcggtttcggtgtgagtgtgttgatggccagttggtcagtgaagcggctctaatggaagacatatcctgcagggcgccgtttgcatgacgatcggcatgattggcaatccagatgttgactatctcagctgggcggtcaactggggcgtggcatacgatctgcccaaccatcagtgggtcatccaacacgcccatggactgaacgccaccctggccaaggataccattaagcggcgatcccggcgagctttttacgatgaggtgcagtctttatttgataagtgagtgaaaatgaagtcaaatttatatagttttgtacccaatgaatttttttttgtgcagcatgggtttcaatggtcgttcgtgtgtggctcgagctctatgcgaaagtgccaagttcatgttgccgtcggtggaacggggaaacatgttgcaggagttggtcaggactgtctttagcctgcctccctccccggtggctgcccacgaaccacaagcccatcatcagtatgatcgaatctaccgtcgatccaagcggagctcacgggattgccatgaaatctatccaggatgtcagttttcactactggctttggcattgggcaaatatatggcggccacaaccacgaagtttagttcatttaactatatgtgaaagaaaaaatgatttaattgaaaaaaaagaaaataaaaaggattaacaataattaaacagttgtggaatttatttactatttattttcgtatttactaaatccctttactcattgatccatttcgaaataaaagacgggctggttttttttttaaaacaaattattttcattcttctttatttaataacgcgtaacatttatttatatagtaattgttttcttttaatgtgttgtcgttttttaattgttttcaattttagtgttgtttttttttcgcaattgttgctattatttcaatttgtttttgcgttagcttaagttcgttaattagtgtcttacatttaggttgttaatgcatttcctttttatactgttgttttagtcaacatatttatgcttctatcgatttcgtttattttgttaaataccttcgatttgtttgtgtatgatctggtaatttttgatcaattttcaatgttcaattgtttgcttgctggctgcgcgtgagtgtaattaatttagtttcggtttgttatgtaatatgtttgcggttttgttgttcaagagagtttcgactatatatttaatatatatatagtaatcatatatatatttacgcacgtatttgttatgtgaaatgtaaatgcaacgcttttccgtttaagtttaagtatcgtgtcacatttatctgaattatactgatgcacacaaatgtccattttaccatctcattttctcaataggttcgcattttgctgatcttgctttgatttgcagtgtcaaatttagcttagtctatacttagtcgcgagtattttacataaatcggattatcgttacttagctaacttacgttatgcgattcgatttaactaaattttcaatttagtcaaaattgattctcgtgtagaatttttagcgagcgcttttggacgcctaactaaatgtttactccatacttgtatttatatctggctttattttactgcgtatatgtat

SEQ ID NO: 31871 - DNA, 696 bp, DROSOPHILA
atgaggctctctcgaactggccacttcagtttgctggcactttgcctcctgctgcacgaggtgcaatcccaggtgatgtccatgtcatcagctgccaaccggacaggggaggtgaccaaagttctgcgccggcacaagcgttatctggcatttccggagggctcatcggtttcgggcgccgtttgcatgacgatcggcatgattggcaatccagatgttgactatctcagctgggcggtcaactggggcgtggcatacgatctgcccaaccatcagtgggtcatccaacacgcccatggactgaacgccaccctggccaaggataccattaagcggcgatcccggcgagctttttacgatgaggtgcagtctttatttgataacatgggtttcaatggtcgttcgtgtgtggctcgagctctatgcgaaagtgccaagttcatgttgccgtcggtggaacggggaaacatgttgcaggagttggtcaggactgtctttagcctgcctccctccccggtggctgcccacgaaccacaagcccatcatcagtatgatcgaatctaccgtcgatccaagcggagctcacgggattgccatgaaatctatccaggatgtcagttttcactactggctttggcattgggcaaatatatggcggccacaaccacgaagtttagttcatttaactatatgtga

SEQ ID NO: 31872 - protein, 231 aa, DROSOPHILA
MRLSRTGHFSLLALCLLLHEVQSQVMSMSSAANRTGEVTKVLRRHKRYLAFPEGSSVSGAVCMTIGMIGNPDVDYLSWAVNWGVAYDLPNHQWVIQHAHGLNATLAKDTIKRRSRRAFYDEVQSLFDNMGFNGRSCVARALCESAKFMLPSVERGNMLQELVRTVFSLPPSPVAAHEPQAHHQYDRIYRRSKRSSRDCHEIYPGCQFSLLALALGKYMAATTTKFSSFNYM

SEQ ID NO: 31873 - DNA, 3755 bp, DROSOPHILA
ctaagtataaaaaaccaaaccaactaatcagttaaaataaaatagaacccaaaaaatacataaaaatacaaaactaacatgtaggaacgttgcctaagctctacgataaaaattaacacccacggaccgaccgacccactgtatatgtaaccctatataattcctagatttttgggagtacaattggggacaggttccttggctttttggccctatggaataacgttaatgcacaaataacaacaacaactaattgtatgtgtaaggtagatggagatatgtatgagggtatagttaaagtatctctagagttcacatcgtacatctacacgatttctacagtttcttcttctttttgcgccacaaaatctgcataagagtcgcacccttcccgtaacccccacccgcagctccgtcatctgtggatctgtggtcttggcaaaaagaaaaggaaaagaaaaatgtcttaaaaaatacagatatacaaaacgccgccgccgccgcagtgaaagtgaaagttgaaatggaagtcggactgggattcgtatgtacatggtttccagtcccggcctgtctatataagtttccatttagccggggatcgtatccaacagcctgcttgccagccttcctctgcctgcgcccatttggtcaactcgttggccttttgtttttcgctccgatcacgtcgatgttgctgatggtgatgatgatgtgacgatgatgatgatgaccgcctcacatgtgcgttatatccatttaatgggttttcttctttcttcgttgtgttcgttggagttgcgcaacttgggttgggtagaaattcaaaaatccatcgaggagatttacattttccaatccaaaagcgcccacgcatcgctatctcgtctcacgtttcaccaaatcgtcgcaaaatgagccactttctgggctgcgatatcgtctcgtctcgtttcccattttcttggctttggatttgattagttttccactggcatcgtcacgagattgtggaaaacgctggtttcagcttacccaccgtgcccaatatcagcctggtgggtgtggcccggctgtctgggcccagtttggcagctgccacttggctgtcatcgtggctgccacctccactagactgccttcccccgtgccacatcaaacccaaactgttgccgttgccaatggtagtggcggtggcggcggcggcggtggtggtgctgctgctattgttgttgcaatccacgagaaaatccaaggctgtgggcgtcgcatccgtcagattcaaatgctcaaagttaaagacaaggcccgatccgcagttgtggctgccagcgctatccaagccactgtcgctggctgcacccgatccaaatcccgatcccgattccgattccgcctgatctactgcattgcaggtctcgatcagcttgcgtgatatctcattgaggctcgcatcgagcagcgtctccgcctgggcggaaatcgaggaggaggcgttgcccagcttcccacctcgccaacaatttccaaacagatcgttggcaatgttgattccactcaggatatccccgtagccggaatcatcgctcaggcattgcgaaggtgtggccactgcgctcggatgactccgctgggatccgattactcccactttttccgcccggctgctatcgccggtaatgggagcgaattcctcggtggtctcctcctgcagggccaatgagctgggcaggctctggctacaaatggagctatcgcaggagctgtccgagtgagtggatgacgttgaggaggaggactctcggcttccgcctcctggctcgctggaagaggcatcggaaagcgatcgccggagcgggtaatcccaaagcgaacgaagtgggtcacattctcggcagaagcagactccgtgcgtatgatcatgctgcaatattccagatggtagatggtaagatgctcccgcattcgcggtgtaaccgtctagcggattggacatcttcggttgcatatccgcctcaattttgagcaaaaccccattgcccggttttcgatccttctttcgtcgcttcctgggtttaatgatcctcggcagacaggtctccgctggcgaggtggcctgatcctggccagcagcattgttaggcgtcttctcttggctactgagcaccggtggtgccgaattctgatagcgaagggctcgagatttgtcagccaacttgaaagcaggctgactgctcatcggctggtagccactccagttgttggtcacaggatgatggtgatgtagtggctggtggtgctgcatctgctgttgctggagatggtgcttgccattctgctggagcagcggcatgccctgggcatgcacagccagctgggacatagtggcccctccaggtggccaagttggacatgttttaagggcggatttcctcagcaatctctgtcgctgggctggcgacaagtgactggaggcattcgagatgagcggtatgccggcgcactcattgatccgctgctgattaaccactccatagccaactggttgaggtggttggccagccgactgagctgcccaattgggcggtggtgcagacggcggaccatgatgcaacctgtacacaggagctggatgctggctacccggccaatggctcaacggatgctggtggtatcgcaaggacgcgtagttgggcggcggtggtggtggtgctgctgattctggcgccctgtaaacggccacatgcgatctcatactgtttttgtcttagtcccaaactgaatcctgtcggcggatcgagtcgattgcacatcacttggccgcttggttagattattcgacttgagcgagccacctttcagagaggcatttcggttggccaacagtcgagcgattccaccgcaacgaaatgaaaagcgaacgccaagaaactgggacacaacgcgatcgcaattacgaaacacacggcgcatgcgcgacgctcgcgaacgggtttccagctgaagagagactgaggagcagagtggagctagtgcgtccgcctcgtagccaagcgagcggcagactgaagtcagctgctaacgcgatcgacagcgaagcccggctaacagtaaaagccgttaagacaagtctctctctctctctttctctttctctctctgtctcttacgttccacattgggtccacacgaacactctgacgctcagccaccggctctcttttttgggccaacttgcatcggagagcagcatctcttggcttttgcatgtcgaggtcgtgcagttcttttggccaagtccgccaattgttgtaattgttgcattcaattagacatttttaattgatgcgcgggcattatgttttttggcattaatgggcagccgtgagtttgaactttaattatggctttggcaacaggttttatgacctatcctggtgcggaaaaacattagctaacaaactgcgtttgaaaatggacgaataaatatatatttctgctgttacaaccctactatatataaatacatcgaaatcgtttttgatccccaaaaacaaaattttccaacatgccctaaacttcctaataaatatatattttgagcagttacataaagaatttttgctgataacacatggaaagattatctcctactttaagcttccttttttttatcaataaaatcccatcaagcccagtaagatagttaaaatacccttgagtccgtagtttcttcgaaaactttctcttttcgg

SEQ ID NO: 31874 - DNA, 1755 bp, DROSOPHILA
atgagatcgcatgtggccgtttacagggcgccagaatcagcagcaccaccaccaccgccgcccaactacgcgtccttgcgataccaccagcatccgttgagccattggccgggtagccagcatccagctcctgtgtacaggttgcatcatggtccgccgtctgcaccaccgcccaattgggcagctcagtcggctggccaaccacctcaaccagttggctatggagtggttaatcagcagcggatcaatgagtgcgccggcataccgctcatctcgaatgcctccagtcacttgtcgccagcccagcgacagagattgctgaggaaatccgcccttaaaacatgtccaacttggccacctggaggggccactatgtcccagctggctgtgcatgcccagggcatgccgctgctccagcagaatggcaagcaccatctccagcaacagcagatgcagcaccaccagccactacatcaccatcatcctgtgaccaacaactggagtggctaccagccgatgagcagtcagcctgctttcaagttggctgacaaatctcgagcccttcgctatcagaattcggcaccaccggtgctcagtagccaagagaagacgcctaacaatgctgctggccaggatcaggccacctcgccagcggagacctgtctgccgaggatcattaaacccaggaagcgacgaaagaaggatcgaaaaccgggcaatggggttttgctcaaaattgaggcggatatgcaaccgaagatgtccaatccgctagacggttacaccgcgaatgcgggagcatcttaccatctaccatctggaatattgcagcatgatcatacgcacggagtctgcttctgccgagaatgtgacccacttcgttcgctttgggattacccgctccggcgatcgctttccgatgcctcttccagcgagccaggaggcggaagccgagagtcctcctcctcaacgtcatccactcactcggacagctcctgcgatagctccatttgtagccagagcctgcccagctcattggccctgcaggaggagaccaccgaggaattcgctcccattaccggcgatagcagccgggcggaaaaagtgggagtaatcggatcccagcggagtcatccgagcgcagtggccacaccttcgcaatgcctgagcgatgattccggctacggggatatcctgagtggaatcaacattgccaacgatctgtttggaaattgttggcgaggtgggaagctgggcaacgcctcctcctcgatttccgcccaggcggagacgctgctcgatgcgagcctcaatgagatatcacgcaagctgatcgagacctgcaatgcagtagatcaggcggaatcggaatcgggatcgggatttggatcgggtgcagccagcgacagtggcttggatagcgctggcagccacaactgcggatcgggccttgtctttaactttgagcatttgaatctgacggatgcgacgcccacagccttggattttctcgtggattgcaacaacaatagcagcagcaccaccaccgccgccgccgccaccgccactaccattggcaacggcaacagtttgggtttgatgtggcacgggggaaggcagtctagtggaggtggcagccacgatgacagccaagtggcagctgccaaactgggcccagacagccgggccacacccaccaggctgatattgggcacggtgggtaagctgaaaccagcgttttccacaatctcgtga

SEQ ID NO: 31875 - protein, 584 aa, DROSOPHILA
MRSHVAVYRAPESAAPPPPPPNYASLRYHQHPLSHWPGSQHPAPVYRLHHGPPSAPPPNWAAQSAGQPPQPVGYGVVNQQRINECAGIPLISNASSHLSPAQRQRLLRKSALKTCPTWPPGGATMSQLAVHAQGMPLLQQNGKHHLQQQQMQHHQPLHHHHPVTNNWSGYQPMSSQPAFKLADKSRALRYQNSAPPVLSSQEKTPNNAAGQDQATSPAETCLPRIIKPRKRRKKDRKPGNGVLLKIEADMQPKMSNPLDGYTANAGASYHLPSGILQHDHTHGVCFCRECDPLRSLWDYPLRRSLSDASSSEPGGGSRESSSSTSSTHSDSSCDSSICSQSLPSSLALQEETTEEFAPITGDSSRAEKVGVIGSQRSHPSAVATPSQCLSDDSGYGDILSGINIANDLFGNCWRGGKLGNASSSISAQAETLLDASLNEISRKLIETCNAVDQAESESGSGFGSGAASDSGLDSAGSHNCGSGLVFNFEHLNLTDATPTALDFLVDCNNNSSSTTTAAAATATTIGNGNSLGLMWHGGRQSSGGGSHDDSQVAAAKLGPDSRATPTRLILGTVGKLKPAFSTIS

SEQ ID NO: 31876 - DNA, 3898 bp, DROSOPHILA
ttattcgacttgagcgagccacctttcagagaggcatttcggttggccaacagtcgagcgattccaccgcaacgaaatgaaaagcgaacgccaagaaactgggacacaacgcgatcgcaattacgaaacacacggcgcatgcgcgacgctcgcgaacgggtttccagctgaagagagactgaggagcagagtggagctagtgcgtccgcctcgtagccaagcgagcggcagactgaagtcagctgctaacgcgatcgacagcgaagcccggctaacagtaaaagccgttaagacaagtctctctctctctctttctctttctctctctgtctcttacgttccacattgggtccacacgaacactctgacgctcagccaccggctctcttttttgggccaacttgcatcggagagcagcatctcttggcttttgcatgtcgaggtcgtgcagttcttttggccaagtccgccaattgttgtaattgttgcattcaattagacatttttaattgatgcgcgggcattatgttttttggcattaatgggcagccgtgagtttgaactttaattatggctttggcaacaggttttatgacctatcctggtgcggaaaaacattagctaacaaactgcgtttgaaaatggacgaataaatatatatttctgctgttacaaccctactatatataaatacatcgaaatcgtttttgatccccaaaaacaaaattttccaacatgccctaaacttcctaataaatatatattttgagcagttacataaagaatttttgctgataacacatggaaagattatctcctactttaagcttccttttttttatcaataaaatcccatcaagcccagtaagatagttaaaatacccttgagtccgtagtttcttcgaaaactttctcttttcggaagccttttttcgcgtgctttcctttttaccccaaacatgcacacacgcagccagacacacacctggtcaggagctgctcacgcaccgggcgcgcgcacacacatactcagggatttagatagacatgggggggactcacatgacaagttgtccagcatgtaggtgagcagtttctgcgtgccgttcggttcgttgtagatgttcatgaactccttttgcagcggattgcccatgaggccgagtatgacgaggtggaacagcttgccgatctcgtaaggcagtacgcgcagaaagttgttgttcagcaacagctccctaaaaggaggcaagacaatggagtggcttagtgaaaagcatggatcagtgatcaatagggtctgcgcccagacagcgatttcacaatagatcaactgctaagggtgcaatagagtatgagacataataataggactaaaatacgatttaacaacgtaaatcatgtcctatgccaacccacaaactcaccgcaactggatgagctcgccgagctctgcgggaagacttcttagcttattgctggacaggtccaaagttcggaggctggtcagcatgccaacgtctgcgggcaatcgcagcagctggttgtcgttcaggtagagggcggttagatgctcaaattcccacagcgacgggctgatattgcggacgcagcctgtaaacagatgtatggtagaattaatatgatatttttcgggattaagtgtgtgatacccaccagtaatctctaggccactccagttcgtcttcttgcccgcagctatgtcctcctgcgacagaaagatctgctgccgccgattggcgctgtcgtatttgtctttgttacgagacattttataatgattgcctgttcggtatatatagaagagagttatattaatatatgtataaggtaagagataacaagttaaaatctggaattgtttcaaggaagttagggctcatgttaggagacaaaacctcgcttagcaacaaaaatgaatgctttgagttttagcttaaatgtatctaggagtattggaatcaaatcataacctttcataataaccgcctgatgataagcgtctctgcaaaatattaataaagtggtttccattattattttgtattagtaaacaaaggtgggtctgaggtccgggtttggtttacatatacagctaaggtaaaactaatagcagttcttaaacattattaattaaaatttaagtacaaggtaaaaggtcgatatggaaaataccgccaaactcaatagttggaggattttaggaaaaatctttatattttattaataaatagcattggatatgtattttggaacgttgtctatgcacctttttttaaagatacacatattaggctttaaagaactgctattggctttcgcacagctgcggatggtaaattgtaaatcataaataaatgcaaacgaaaatgattttggtaagcgcgcgcaaagtgcaagcaccaacacacacgcacacacacggacgcgtagcacacacagaaacactatacagttagaaagaagaatggcgtgggcgggcaaaacaagaagaagaaggaaagccgtatgtcgcatattgaaaatcgtgggtatcaggaacctgtgtaggattacctggctcagttcactattcctaggaagtcacctcaatcggaaattctggctcaaatttactcgccgtctctcctcgtttcgcgcgctcttttcgctctccgcctgcacttactcgaggattttgaaagaaaaaggaagccgcagctggggattcagcaatattcgatattcactgtgaaatttaaccgacttctaccgtttttggtgcctttatttgggtcctatatttgttattttattattttgctgcttttcgttcgtgtttgtcggaacagaagcgacgattctgctaatcaacctattcgttttggatcgctctttcttctgctgggcctctgcttttcatttatttatcacgcgactcgctttcatcgtcggttcttgtttttgtatacatggtgagcagtcggagttgccactcggttttatcagcggacggtatcacggcaagatttgtccaaaatgcgtgcttattcgtccaactgaagtccggcctagtgttctgataaagtgtgagacaacgtttgtttgtaaaaagaactactcaaatgggatttcagtcaaaacaaaacaagagcacatcacacacaagacgcacacatacacacaagacgcacacgcacacagatggtcaaagaggtgcagggctgaaaataaaaacacgtagatatttcgtactgtttgctttactagccacttttttcggtcaatgctttttgctgaggactcggctttcgacgcgatatattttatgtagtttagatctctggatggacgatttatttgtgaatttatgctgctgctactatgtgtaaactttcgttcttcgctttccttcgttttccatttctcttttgtgcgctggtttggcgtacgcggaaatgcccacttgctgttaatcggctatcggaaagaatttgcaagcaggggctccaactagcgtattgagaaagtagctatattttgtatgacagttaagacccctgttttttgaattgatattttttataggattgaaatcaggagctttgaattattaatttgtaaaataaaatgagtttattttgacagcaaacgaaaatacttagctagaatcgagctaaaccattaaaatctgtaaatactgactaatcgataaccttacagagtttcgatagatccattagccgcgaatgcccttaaaaagttgtaatttatttaatttaatgttgcgtgtttttaaaaaaaggttaatatgtcggggacgcaaatgtctgccttcctgagaaagtatctagccgacgaggacaaaaaaattcgtgcgcaattcaaagaaagcgat

SEQ ID NO: 31877 - DNA, 907 bp, DROSOPHILA
aaagagcgatccaaaacgaataggttgattagcagaatcgtcgcttctgttccgacaaacacgaacgaaaagcagcaaaataataaaataacaaatataggacccaaataaaggcaccaaaaacggtagaagtcggttaaatttcacagtgaatatcgaatattgctgaatccccagctgcggcttcctttttctttcaaaatcctcgagtaagtgcaggcggagagcgaaaagagcgcgcgaaacgaggagagacggcgagtaaatttgagccagaatttccgattgaggtgacttcctaggaatagtgaactgagccagagacgcttatcatcaggcggttattatgaaaggcaatcattataaaatgtctcgtaacaaagacaaatacgacagcgccaatcggcggcagcagatctttctgtcgcaggaggacatagctgcgggcaagaagacgaactggagtggcctagagattactggctgcgtccgcaatatcagcccgtcgctgtgggaatttgagcatctaaccgccctctacctgaacgacaaccagctgctgcgattgcccgcagacgttggcatgctgaccagcctccgaactttggacctgtccagcaataagctaagaagtcttcccgcagagctcggcgagctcatccagttgcgggagctgttgctgaacaacaactttctgcgcgtactgccttacgagatcggcaagctgttccacctcgtcatactcggcctcatgggcaatccgctgcaaaaggagttcatgaacatctacaacgaaccgaacggcacgcagaaactgctcacctacatgctggacaacttgtcatgtgagtcccccccatgtctatctaaatccctgagtatgtgtgtgcgcgcgcccggtgcgtga

SEQ ID NO: 31878 - protein, 179 aa, DROSOPHILA; identical to SEQ ID NO: 26124

SEQ ID NO: 31879 - DNA, 3606 bp, DROSOPHILA
ccttcaaccggagttaagccattgaacgttggatctgttcaacgtagccgttatgtaagaacattaaatattaatgatgtctttatattaatattatatttccttgacagtttccgctgcgagatcgttatggagtggatgtgacgccactaagtttcatacctggtggtcgtatagataaatatttgggcaacctaaactttttctttattcgggagagcacgtcgatccgggaaaatggtggcatcagcggatttgtccatggcttcattaccgaactgttggctgtggtgagagcacacatcgcttcgctgggcggaaatgccatggtctctttttacatcaccgaacttatgttgttcgataatcagcacaagaatcaggtaaggcaaacacaatgatctacttaccttaaagtttttatactgaaatcttgtattcttagggccagtgcctgattagcatcggaggcgatgctgtctatgtgagctaccatgccgatgactgatataaaaacttgcggggcatatagcgcatgttttacgcgaatcgtcccaaaagcgtatactctctattttcttccgcttagctagaactatcagctctgcccagcaactggagttaaactgaagttaaactaattcacgtttacttaacaattttacagcatctgtagatggattctttatgcaatatttgaactgtgaggaatcgttctaatcctaacttagtagtgctaattttttcggtcttgttacttgtttgctggatgtttttagcgttaaatcaattgcaatttctgtacatagttgatgtttattgaatattgaatttagaacgagtgcgagacacaagtataatatcgatatatacaattgttgcaaccacaaacatgacacatatactcgtaccactagatatccaattttggcgcgtaaaatacaatacatacaatattatggaaatacaacaattgctcaactaaatgtatttgattcgattagtttggtgtagtggagagcagcacaaacatgacccacagatgtagtagggccacgtagacgatcacagagacccgcatcatgggatagcgacgcagaaacgttcccacccgaatacccatggagtccgcctggcgaagggctcgcttgaagcgtcgtgccacacgattatcgaatggacttggatgcatgagaagcgggaattgtgctttgactaggtagaactcatatttatgtaatttctggtactcgcagaatgttagacttaccatcatctgtgctgttgagcatagtatggcgggagctgcccctttggctctccatttccaccaagtgcatgttttgctgtagctgcgtctgtgccttttcgtgctgtagtcgcagggcatttctctcactcgtaactctttccagaagactttgacgttcgaccagtgattgggttaaagcctttagccgagtctcgtaatcgctcttggctcccgtgttggcttcctcgctcaatcgctgacgcatctgctgaagctgctgctcccgctcctggagtcgagtggcggcagcagccatttggttactaagttgctgccgcagtgaggccagttcctgcgtgagcactcgctgatcggattcggaggtcacactgtgttcccttgcctgtcgcaactcctttgctagtgtttcctcgcgttggcgggcagagcttagttccacctgtcgttgtctttcctgggaaacgtaatcgtccagctgcaagcgcgccttttgcagttcctcgttggcatgctctagttcttgcttaagtgactcgtgttcaatttgcagaaaacgcgtttcactgtccttggacaccaggtttggatctgcgccctcctccgtgggcttcgccttcaactctgcgatgagggaatcctttgcttgcagagctcgctgagccttgatacggtattcctgaagctcctggcgctgctgctccgtttcctttgtttgcatttgcaatttgtgagcggcgcttatgtattcctgctgcaacttggccagattggtttccagttcggagatggagtgcacatacgccatgttagctgcctgggcctcattgtagtcatgaaccgccttgtcccgctcttcggacagacttttaaccagagcttccagcacctgggtgtgttgatgcagatcaaacttttcggtttcgttattaagatcttccaagcgcagacgcagttcatctctttcggccgtgatttcattcagggcgatcttgaaggcagccaattcatttgtgtccattgagttggcggatatgtcgggactgttggagaaactggccgacgtggtcatcttttggcgcatgtccttagtgaccacggagaccccgccatcgctttttacacttgatgagctattggcccccgagcgccgcactggcgacagagtggacttcagggatgtggacagtgattgggtgctgctcgtcatgctcctacgcatgggatccgctgaacctgtggcgttctctgtctgcagggccgttgccgcattttggtccagcttgttcaaaatgttttcggccttgtccgccagtcctgtgatccaggatgacatatttttctaagaaaaacaaatctcttcgagtaaaacacgtaaacaatatcacactgtgtgcccatatcgctatcgactgcggaatggtcaactccaaagttaaggtcactctaaaagtaacgtaattttgaaaaaccttttttctgatcaaaaaaatatttatatgaaaatgtaaggattggttttagaaataaatgtaattccaatctttcttatccgtgcagaaatgttaatttattatgcttatcaaaactctagggtacaaatgaatattttattcaatactcaacatgggcagtgtaatcttcgcaactcacaactataaactatctcttcactttccaatgcaaaagtccttgaagaccacgtcgagtatatcttcgcagctgatgtgtccggtgatgcgttcgatgcagcgcacggagttgcgcagcttggaggcggctatggccatgtccgggtaaacgtcgggtctgtaatctcgtagaaaaatatcaatgttctcaatgcagcgctccagttgctgacggtagcgtgtgtttgtgatgcgtggattctccgcccgcggttctccgcacagttcttgcagctgcttctccagtgatcccagaaacacgggcatcttatcgggcttatggcatgatatggctaacacgttggacagcttgtccagctgctgatgctcctcatccgtcaaagtgtcggttttattggccaccaattgcagacgtttccctgagcacatgtccagaggtatatccaactcgcccagatagctatctacaaacggagcaactgcgtcgtcgtgcgtcagctgtgcaatgttcttggcttctgctaggagcaatatcaaatcagattggactagacaattcttggctctctgcattccctcctgctctatactatccgtagtatatcggcgtaatccggctgtgtcggaaaataccaccgggtatcctccgaaattgtgcattgtttctataatatcccttgtggt

SEQ ID NO: 31880 - DNA, 1606 bp, DROSOPHILA
atgtcatcctggatcacaggactggcggacaaggccgaaaacattttgaacaagctggaccaaaatgcggcaacggccctgcagacagagaacgccacaggttcagcggatcccatgcgtaggagcatgacgagcagcacccaatcactgtccacatccctgaagtccactctgtcgccagtgcggcgctcgggggccaatagctcatcaagtgtaaaaagcgatggcggggtctccgtggtcactaaggacatgcgccaaaagatgaccacgtcggccagtttctccaacagtcccgacatatccgccaactcaatggacacaaatgaattggctgccttcaagatcgccctgaatgaaatcacggccgaaagagatgaactgcgtctgcgcttggaagatcttaataacgaaaccgaaaagtttgatctgcatcaacacacccaggtgctggaagctctggttaaaagtctgtccgaagagcgggacaaggcggttcatgactacaatgaggcccaggcagctaacatggcgtatgtgcactccatctccgaactggaaaccaatctggccaagttgcagcaggaatacataagcgccgctcacaaattgcaaatgcaaacaaaggaaacggagcagcagcgccaggagcttcaggaataccgtatcaaggctcagcgagctctgcaagcaaaggattccctcatcgcagagttgaaggcgaagcccacggaggagggcgcagatccaaacctggtgtccaaggacagtgaaacgcgttttctgcaaattgaacacgagtcacttaagcaagaactagagcatgccaacgaggaactgcaaaaggcgcgcttgcagctggacgattacgtttcccaggaaagacaacgacaggtggaactaagctctgcccgccaacgcgaggaaacactagcaaaggagttgcgacaggcaagggaacacagtgtgacctccgaatccgatcagcgagtgctcacgcaggaactggcctcactgcggcagcaacttagtaaccaaatggctgctgccgccactcgactccaggagcgggagcagcagcttcagcagatgcgtcagcgattgagcgaggaagccaacacgggagccaagagcgattacgagactcggctaaaggctttaacccaatcactggtcgaacgtcaaagtcttctggaaagagttacgagtgagagaaatgccctgcgactacagcacgaaaaggcacagacgcagctacagcaaaacatgcacttggtggaaatggagagccaaaggggcagctcccgccatactatgctcaacagcacagatgatggtaagtctaacattctgcgagtaccagaaattacataaatatgagttctacctagtcaaagcacaattcccgcttctcatgcatccaagtccattcgataatcgtgtggcacgacgcttcaagcgagcccttcgccaggcggactccatgggtattcgggtgggaacgtttctgcgtcgctatcccatgatgcgggtctctgtgatcgtctacgtggccctactacatctgtgggtcatgtttgtgctgctctccactacaccaaactaa

SEQ ID NO: 31881 - protein, 457 aa, DROSOPHILA
MSSWITGLADKAENILNKLDQNAATALQTENATGSADPMRRSMTSSTQSLSTSLKSTLSPVRRSGANSSSSVKSDGGVSVVTKDMRQKMTTSASFSNSPDISANSMDTNELAAFKIALNEITAERDELRLRLEDLNNETEKFDLHQHTQVLEALVKSLSEERDKAVHDYNEAQAANMAYVHSISELETNLAKLQQEYISAAHKLQMQTKETEQQRQELQEYRIKAQRALQAKDSLIAELKAKPTEEGADPNLVSKDSETRFLQIEHESLKQELEHANEELQKARLQLDDYVSQERQRQVELSSARQREETLAKELRQAREHSVTSESDQRVLTQELASLRQQLSNQMAAAATRLQEREQQLQQMRQRLSEEANTGAKSDYETRLKALTQSLVERQSLLERVTSERNALRLQHEKAQTQLQQNMHLVEMESQRGSSRHTMLNSTDDGKSNILRVPEIT

SEQ ID NO: 31882 - DNA, 2900 bp, DROSOPHILA
gaatcgaacttccgccccaagtcgttgtactgtgatttcggataacccagagtcatcagttctcattccgttctcgagctggataggtctctagcctcccagtttcgtgttcgcaaaattccatctaaatttccggcccaaaccttttggaaaatatatttcggttaaaaattcaaaattccagagctcaaaaatggcactgagtgttaatccctcccgagtactgttccgtccaatttttggtgcggttaacagctgtgtgcgatttgcatccggttgtgaaaagaaggggccgagccggtgcccgaaggtgttgaccaagttcccctgcggcaaacccaatctgcaggctccgcccaagaagaagaggaagatggtcaaggcacagtccatgtggctgaacccattctgtgatcccgacgacaccgcctgtccgttcaatccgcgcttcgacgatatctactacgtcgagtcggacaaggccaagcggaagtactggcagacatgggtggcctgccctcccatccagattaagcccaagaagatttgctgtttcgccaaggctaagccggctcctatcaagcggcgaaagccatcggcgaagccatcgaccgcctgcccgcagccttgtccggatccgtcggaggatctgtgtccccgtctggcccgtcgctgccatcgcgatggtcgccgaccaccctcatgcagaagggaacgaggacccctgccgtgtgtgaagccccggacgccatatccatctttctccgagtgccgacgtctcaagcccgatgccccgccactgaaggagtgcaattgtctggcgaaaccgctgctctgtgagatttgggccgagttccgacgacgagccattgccaagaagtagagccgtggccctgattatataaagcgcttttacgattctacagcatatacattttttatttgtatgaggagattaaaatgtttgccctgagtgccagcacggatgcaggatgtgtgatcactgaaacggattcttggccatatttgtcacgaggctccagagcagcggattgcagtcactataggttcgctcgcagtcggcacctccacgtcctgcgtcacgggcatgtaaatacttactggccacattgtccagggtgggtctggaaattcatttataattacaattcataactcaaccattccaagtaaaatgtcacatacaccagtactgcgtttacgatctcactgaagatgttgctgttctgaaagggtttctgcgagatttcgcatatgcttctgagcaggcaaactccgccgtaagcaccatctagtctgcagacaaagagggggattaaaaaataggtagctaatccctaaagttatactcactgctccatgcctacttcgatggcattgtagacccatgtgcgcgcctcgtcgtgcaggacttttgcctgcatgtccttgcgccactcgcgagcagtagacacaaaagcggtggtgttccaaaagctccaccagtagaggggaatggtggtgggtatccactggccttgcaagttgaagaaccaccaaaaggactgctccttgtcggtctgcttcacaggatacgccaggctaggtactaactgcaagtaggcggtaggataagtggaatggttagagatgtgccaaatctaccatgttgtaatcccaccttgacaacgccctggccattgtagatggccacacgcttggagcgactcaaggaggtaagactgctgttatcgctctcatctggatggtttatacttctgctaatccttaaaaaactctcgtctgaggtgtaaatgttctttgtgaagctcagcaccaagtcaatggtgaatagcaaactgaggagaaacaaaagccaggtcagaactctgtggaccatcttgtttgtgttctagtgcaatgctaactaatcgatctttgtttaaacttggatctcagccacgatacacaaagaacgccatatgtgtttgcctaagaaattgacaaattcagattggaaagaatacacagagaaaaaataaatttaactaaattcttgttgattgttgcacttattaaataattataaggaagtattttaaatttcatacttattaattaaaatatgtcttcaacttataatgaaggtatatgtattatatttagatccaatctgaattattttctgtgtgtaaagatctttgggtaatgaaacgttcttgtggaggaaaacggagccagccgaagatgtctcttgattggccagatcacgctgtcacttggatcttaatgatggagcatgcgctccactttctgaggtgttttgtggaccattctaattgctattcacgcatctggctctggtcgttgatccgctcattcacagctcgccttaattaatccccaaatagacaatgaagtggtctggatttcgggtggctcgttgcatgattcccaggtggatcacatcgccatgtatcgctcaaagctgcagaacgtcggagatctcggccaggtcagcctgctgctgatcaccctgatacgacccatttatggacttctgctttttcccacctcaacggtgctccagctgacctcatccatatccattcccgccgacctcaacacccgcaccaaagtcttcatggacatgggcttccagatgaattacaacctgccgcccacggtgtccgccttctacaatgccaccatctgggcagatgagctgtcccgaaggcaaaagcgccagttggaccacagcctggatgctaatctgcagcagtatgatctggagggcggcatgcatcccgctgattttacagccggtcaattgtacaagggaatagaaaacatgctcgagacctatggtttccatagatcctgtctgctccgcagtgtct

SEQ ID NO: 31883 - DNA, 714 bp, DROSOPHILA
atggtccacagagttctgacctggcttttgtttctcctcagtttgctattcaccattgacttggtgctgagcttcacaaagaacatttacacctcagacgagagttttttaaggattagcagaagtataaaccatccagatgagagcgataacagcagtcttacctccttgagtcgctccaagcgtgtggccatctacaatggccagggcgttgtcaagttagtacctagcctggcgtatcctgtgaagcagaccgacaaggagcagtccttttggtggttcttcaacttgcaaggccagtggatacccaccaccattcccctctactggtggagcttttggaacaccaccgcttttgtgtctactgctcgcgagtggcgcaaggacatgcaggcaaaagtcctgcacgacgaggcgcgcacatgggtctacaatgccatcgaagtaggcatggagcaactagatggtgcttacggcggagtttgcctgctcagaagcatatgcgaaatctcgcagaaaccctttcagaacagcaacatcttcagtgagatcgtaaacgcagtactggtacccaccctggacaatgtggccagtaagtatttacatgcccgtgacgcaggacgtggaggtgccgactgcgagcgaacctatagtgactgcaatccgctgctctggagcctcgtgacaaatatggccaagaatccgtttcagtga

SEQ ID NO: 31884 - protein, 237 aa, DROSOPHILA
MVHRVLTWLLFLLSLLFTIDLVLSFTKNIYTSDESFLRISRSINHPDESDNSSLTSLSRSKRVAIYNGQGVVKLVPSLAYPVKQTDKEQSFWWFFNLQGQWIPTTIPLYWWSFWNTTAFVSTAREWRKDMQAKVLHDEARTWVYNAIEVGMEQLDGAYGGVCLLRSICEISQKPFQNSNIFSEIVNAVLVPTLDNVASKYLHARDAGRGGADCERTYSDCNPLLWSLVTNMAKNPFQ

SEQ ID NO: 31885 - DNA, 3968 bp, DROSOPHILA
ggagtgaatatgaatatagagcaggcttgttattatcccgttccctcgaaacgcgaagatgtctatccaaagcgttatcgtcagagaacaacgaccacggtgaaaccaaagacaactacggaacccacctatgtttggatacccggaacaaactggaggtttaaggccacccctctaaagaaacccatgccaatgaaactacaccaacgcatcgatgtgaggccacaaaagccatcctacgtagaccctgccaagtggacacattggtccaaatatggtaaccgttacgagaactggtcgccagcgaatcacaactacgagaagtacagtcaacctggcagatggagcaagtggaccacgcagtcgccgaagtggtcaaaacgctggtatagatctgcggatggcgagtattatgatcccgaggtggaaccctatgaggatgtgcggtctcagccgctttatgatccgtacgatcccgacatgacaccgcatgaagtagctcactatcgtgaattggagcatctcaaggatatgcggcattacaacggacatcgcgatcgcaggcagctctttgagcactttgatggtttcagtaagctgtaaggatgagtctaatgcttaatctatggtaaataacttctttataatactttagtttgggcatcgatgctaaagcctgtgttttgagagccatctgtgatagcaagcgcctgcttctgcctcgtggatattcgatgattcaggatattgtgagacttgtgtttacgtatgtttaatgagattatgtaatatcagctagactaatatttgcatattaaccaccttagactaccaaccgcatccggtgtagaggatgactattcccggataatgcaaatggatgcggacgactgcgaccgtcagtttcgcgactcgtgtaagctaaacttactggcctggctaatggatggaaagtggaactgaataaaggcaacttaaagctggcttggggattgggtgtttattgtatgaactgggcctgccacatggactgcttgcactccggatagaggacggcacagtccgccttggatgcgtgggccttgtcgtagtgggagtcgcgataggcaaccggttcgttgtccatggcttccggaagggtgaacactgcacgcattagttcgcccacgaaggtgccgggctcatgctccgtcgatttctggcccgtttcgcagagggttcgcaatacgcagtggtggccatggtgacctcgtctgtggaaggagaatgtcgtttagcacgctaattagtggataagtacttctcaactaaaatccctgatgagtctacctaaaacttgtatctgaactttaaggtatctcaatgaaatagaagaagaagaaagagtacatctagaaggaccgatgccttacttagagtcctacttacttgtccagatacttctcgattcgctcgtacaaggactgtctgcttctgcgatggtgcttgatctggagttgctccaggcggctcatcttgtcctcatgctcagtggccactccactgcgtcgctggcgtttatgtggattggctgcatccggaatgctgcgcttgccaaacaccggatatatgcgatgatgtcgaggagctggccttcgagtgggtcgactggtggtgggtgcgctggtggtggtggtactgtcctgtcgtcgctgcgccgctggcggtgctgcctgttgacttttgtagccgtagtatctatctttgagtctgcaaatgaaatagataattaattaaaatatgaacatgcataaggtaaaactataaaggactgaatactaaagctaaccttttagaaggatgaagattaataacctcctaagtatgtacaatagttttaccttgagtttaaagcccagtagggatagcgtgagttctgggcgtgagagtagggtctcgtccacttggcgaatggattgctggagctggagctgaccccgggccgactgtagtaatagtgattgtccttccgcctgcccccctttggacgtgaggagtaataactatccgcatatcgatgcgacggatgcatcggagggcggaaaacgggcgaaaggctgtagtaggagttgctgccactcgaggaggaggaggaggaggaggagccgtaactcgacaaattgatgtagttgggcttgtagtccgccggcctgctcgtcgtggtcgtcgtggcatctgcatccacatccacataggttatgttcgacactgtgtcgttgcgactgatgtctattgtgccgtcctccaacttggtcagcagatcgtccagctcctcgctgggcggcttgctgggcagctcccaggccagggccaccgtaatgcccagaatcaagtagttcgtgtggtccaccactcccacaatctcatcgtacactaaacggatgaagagggaggggtaattgaggcatgtgatttgcattatgtggcacagtggcatagttaggggtaataatagacaaggtttaaagtcacaatctttgtaaatattttagatttataaagattgagatttatttttatactgcaattgcgacaccccctattcaatgtaaaatgccctttaactgcgtcactgtcccgtgactgaggacttacccatctgaaaggagctgccttccggaaataccaaataacgtcgtttccgggacaacagctcctggctggctgactggttgttctggtaggatgcggacgcagactcattcagcctcatctcgatgagctgctccaggctgctgtcgtccgcattgtttatgctcagtgatggctggctcccggttgccaactggatggattccccggtcttcagtgcgtcgaccaagttggccacgatgagaagcgtcaggatggtcggccagcaattacctatcggggaatttcccttctcgatggcattggagcagctccccatctttttccgtgtcgacattttttcaacctgctgtcgaagcgttgtccatgcggcaactgttggccaagtatcgcgatgctggcccaaaccgacaaagagaggcagcaacagaagcgttcttggccaaaagttggctgttaattgtgagtagtggtggtggccaagcagctttccctccagaaagtttccagtttgagtttgagctccgctcgttaaatttcttttgccctcctcctttgtctttcattagttttcacacttttcgtcttttgtgctttgccaagtagtttgtcttgcagagctgcttccattgccatcgccttttgctccgtgtgctcattggtctatttagaggttcaaattactttttcacgctcccaacttttggtttattcgttccatcccgaaagtagcacacttccatcttattccgatagtgctgcagagtggaagttgaagtaatgtgatcactagcctccgtttttccggtgataaactcaaatgctcgccttcgactcgggagatgcttttagctgcaagtgaagaaacttccaaatgacttttgtgcaatcttttctttacaatatccgactagctttctgggtgggttgtcaatacaaactataagatatattaaatagctcgttaatccccaaagttattcaaacactgatttctactgtagtgcccattaatttttgtacatataatattgattaaaactcaatagcagcattcacataattcccagacttttattgtgtttttatgttcaatccaaccagaacgtgtgattacagtcaccgtagatttgccgacagttgcccttctgccgatgtgcctccagataattaggggaaatcattagctcaagttcctccagctcctccacgtcatcgctgctgggcaattgaaagatggccgagagtatttccattataaagctttgtggcctgaccgcattcgtccctcgaaggacatgctgttgcctttgggaggactcgcagagtgcgcggag

SEQ ID NO: 31886 - DNA, 1440 bp, DROSOPHILA
atgtcgacacggaaaaagatggggagctgctccaatgccatcgagaagggaaattccccgataggtaattgctggccgaccatcctgacgcttctcatcgtggccaacttggtcgacgcactgaagaccggggaatccatccagttggcaaccgggagccagccatcactgagcataaacaatgcggacgacagcagcctggagcagctcatcgagatgaggctgaatgagtctgcgtccgcatcctaccagaacaaccagtcagccagccaggagctgttgtcccggaaacgacgttatttggtatttccggaaggcagctcctttcagatggtgtacgatgagattgtgggagtggtggaccacacgaactacttgattctgggcattacggtggccctggcctgggagctgcccagcaagccgcccagcgaggagctggacgatctgctgaccaagttggaggacggcacaatagacatcagtcgcaacgacacagtgtcgaacataacctatgtggatgtggatgcagatgccacgacgaccacgacgagcaggccggcggactacaagcccaactacatcaatttgtcgagttacggctcctcctcctcctcctcctcctcgagtggcagcaactcctactacagcctttcgcccgttttccgccctccgatgcatccgtcgcatcgatatgcggatagttattactcctcacgtccaaaggggggcaggcggaaggacaatcactattactacagtcggcccggggtcagctccagctccagcaatccattcgccaagtggacgagaccctactctcacgcccagaactcacgctatccctactgggctttaaactcaagactcaaagatagatactacggctacaaaagtcaacaggcagcaccgccagcggcgcagcgacgacaggacagtaccaccaccaccagcgcacccaccaccagtcgacccactcgaaggccagctcctcgacatcatcgcatatatccggtgtttggcaagcgcagcattccggatgcagccaatccacataaacgccagcgacgcagtggagtggccactgagcatgaggacaagatgagccgcctggagcaactccagatcaagcaccatcgcagaagcagacagtccttgtacgagcgaatcgagaagtatctggacaaacgaggtcaccatggccaccactgcgtattgcgaaccctctgcgaaacgggccagaaatcgacggagcatgagcccggcaccttcgtgggcgaactaatgcgtgcagtgttcacccttccggaagccatggacaacgaaccggttgcctatcgcgactcccactacgacaaggcccacgcatccaaggcggactgtgccgtcctctatccggagtgcaagcagtccatgtggcaggcccagttcatacaataa

SEQ ID NO: 31887 - protein, 479 aa, DROSOPHILA
MSTRKKMGSCSNAIEKGNSPIGNCWPTILTLLIVANLVDALKTGESIQLATGSQPSLSINNADDSSLEQLIEMRLNESASASYQNNQSASQELLSRKRRYLVFPEGSSFQMVYDEIVGVVDHTNYLILGITVALAWELPSKPPSEELDDLLTKLEDGTIDISRNDTVSNITYVDVDADATTTTTSRPADYKPNYINLSSYGSSSSSSSSSGSNSYYSLSPVFRPPMHPSHRYADSYYSSRPKGGRRKDNHYYYSRPGVSSSSSNPFAKWTRPYSHAQNSRYPYWALNSRLKDRYYGYKSQQAAPPAAQRRQDSTTTTSAPTTSRPTRRPAPRHHRIYPVFGKRSIPDAANPHKRQRRSGVATEHEDKMSRLEQLQIKHHRRSRQSLYERIEKYLDKRGHHGHHCVLRTLCETGQKSTEHEPGTFVGELMRAVFTLPEAMDNEPVAYRDSHYDKAHASKADCAVLYPECKQSMWQAQFIQ

SEQ ID NO: 31888 - DNA, 3420 bp, DROSOPHILA
ggatgcggacgcagactcattcagcctcatctcgatgagctgctccaggctgctgtcgtccgcattgtttatgctcagtgatggctggctcccggttgccaactggatggattccccggtcttcagtgcgtcgaccaagttggccacgatgagaagcgtcaggatggtcggccagcaattacctatcggggaatttcccttctcgatggcattggagcagctccccatctttttccgtgtcgacattttttcaacctgctgtcgaagcgttgtccatgcggcaactgttggccaagtatcgcgatgctggcccaaaccgacaaagagaggcagcaacagaagcgttcttggccaaaagttggctgttaattgtgagtagtggtggtggccaagcagctttccctccagaaagtttccagtttgagtttgagctccgctcgttaaatttcttttgccctcctcctttgtctttcattagttttcacacttttcgtcttttgtgctttgccaagtagtttgtcttgcagagctgcttccattgccatcgccttttgctccgtgtgctcattggtctatttagaggttcaaattactttttcacgctcccaacttttggtttattcgttccatcccgaaagtagcacacttccatcttattccgatagtgctgcagagtggaagttgaagtaatgtgatcactagcctccgtttttccggtgataaactcaaatgctcgccttcgactcgggagatgcttttagctgcaagtgaagaaacttccaaatgacttttgtgcaatcttttctttacaatatccgactagctttctgggtgggttgtcaatacaaactataagatatattaaatagctcgttaatccccaaagttattcaaacactgatttctactgtagtgcccattaatttttgtacatataatattgattaaaactcaatagcagcattcacataattcccagacttttattgtgtttttatgttcaatccaaccagaacgtgtgattacagtcaccgtagatttgccgacagttgcccttctgccgatgtgcctccagataattaggggaaatcattagctcaagttcctccagctcctccacgtcatcgctgctgggcaattgaaagatggccgagagtatttccattataaagctttgtggcctgaccgcattcgtccctcgaaggacatgctgttgcctttgggaggactcgcagagtgcgcggagcacacaggaggtaccatttagtcgtcgcctggaggattacacgtttattacaccactgagcgaaataatttatagtaggcgtcttaaactcacgacttgtacaggcgttcgattttgccaaagagcagctgcctcgagctgagatgctgctgcaggtggagtcgctcgaagtgggcatcctgatcaagactgcgtcgcctcctccgccgagcgaaaacgggatatatgtgatgtttgggtggtgctcgtagcacttctcggggtcgctgggagtaggcatagctgcgaaatattatttttaaaataatattttaacttaaatatgtatattttttaggtttacttactcccacttcgaggggccccatatgcgctgtttttctcgccagttctgctgcactcgctgtccatttcgtgtccaccagttgtcagcgcccgtcgtcttcaccctttgctgccactcagcgggcgactgtcgcgcatgccaattagcaggaatcgccgcctggctctgctgtccatttgcatttgcatccgcattcgcatttgcatttgcatatgggtaagcggccgggatgcgctggatattcgtgtaatacgagtgggagtcatgctcattggccgcatatgccggtggattcgccggcggtgcgtgcactgcctgccaattagccgtgtctgctcctcgattgtccagttccaggttctgcgagtgggttaggggctgggatggagggtcaggttctggatcgggtacgctgccgttccggcggacagtgccgatggtgccgtcgttgatgcgcgtgagcacgttttcaatcagctcgctgggcggcttactgggcagctcccaggccacggagcaggtgatgcccaggatggcgtagttggtgtagtctatgatgggtatgatgatgtcgaacaccagctgaaaggacgagccctcggggaagagcaggtagcgtttctggcgatgcagtcgcaacatcgcatcccttccagattcaagtgggccagcgggagcaggagcaggtgtgatgaccactgtgtgcgagacattcgagtgaccattaccacttggtgcactataattttggatcaggcaaagaggcagcagcaatatgagcagagtgccgactccagcacatccaattactttgattgttttccccatttgtccttaatggaaaccagcaaaagtcacttggtcaacacttagcagccaaaatggagttctaatgaaagtatttttgatggagagttgtaaagtattaagtaagtattaatctctgaaatatattcacattttataagtgatatttgtaaactaatagaatggattcttatattaatgtttgttaacatttttgaaacctatcgaagtatctcttaaacgagcatcatgtagctctattttagggcaccaatcaattttatgcctatttttttattctcaagagtggcgtcccagttttgttcactagtgtaattgagcaatcgaacattccgattgctgcgtgcctgggcactcgaatcgaaaaaagcggcgacgaaatttgcataatttcactttagctgtgacgcttccatttgccggcactgccaatcatgcgttaaattaatgcaattttcgacaatattcgaagcgcaagagatgtccaatatccaatggccggccaatggtcgattctcgctggtccagtttgaatccgttccgatcgggctgcacaattaaaacactgccattttcgaggggccaaaactccggtcggaattgaacgcgaatttatgaagcagataattaccattaggggcgaattggtttctcgattgggagcgattttggccgggcctaaactttttattttacgatatgttgatgccattagctgtccgaatcgaactcgaactgctactgaaactgatgccgcgcgcattccgtccaacgattttggtccagtttggtttggccaagtttaattgtacaattagcacccaattgagtgtcgttaactcgattctgtgccatgccaagtgctctttagaaggtgctaaatagccccatccatttgcattccatctcccaattgaaattgcctgcagctgaaatactaattcctcgatttttcactctattcatttcgtacattgtcaaattgcccgacaacagattg

SEQ ID NO: 31889 - DNA, 1290 bp, DROSOPHILA
atggggaaaacaatcaaagtaattggatgtgctggagtcggcactctgctcatattgctgctgcctctttgcctgatccaaaattatagtgcaccaagtggtaatggtcactcgaatgtctcgcacacagtggtcatcacacctgctcctgctcccgctggcccacttgaatctggaagggatgcgatgttgcgactgcatcgccagaaacgctacctgctcttccccgagggctcgtcctttcagctggtgttcgacatcatcatacccatcatagactacaccaactacgccatcctgggcatcacctgctccgtggcctgggagctgcccagtaagccgcccagcgagctgattgaaaacgtgctcacgcgcatcaacgacggcaccatcggcactgtccgccggaacggcagcgtacccgatccagaacctgaccctccatcccagcccctaacccactcgcagaacctggaactggacaatcgaggagcagacacggctaattggcaggcagtgcacgcaccgccggcgaatccaccggcatatgcggccaatgagcatgactcccactcgtattacacgaatatccagcgcatcccggccgcttacccatatgcaaatgcaaatgcgaatgcggatgcaaatgcaaatggacagcagagccaggcggcgattcctgctaattggcatgcgcgacagtcgcccgctgagtggcagcaaagggtgaagacgacgggcgctgacaactggtggacacgaaatggacagcgagtgcagcagaactggcgagaaaaacagcgcatatggggcccctcgaagtgggactatgcctactcccagcgaccccgagaagtgctacgagcaccacccaaacatcacatatatcccgttttcgctcggcggaggaggcgacgcagtcttgatcaggatgcccacttcgagcgactccacctgcagcagcatctcagctcgaggcagctgctctttggcaaaatcgaacgcctgtacaagtcgcgacgactaaatggtacctcctgtgtgctccgcgcactctgcgagtcctcccaaaggcaacagcatgtccttcgagggacgaatgcggtcaggccacaaagctttataatggaaatactctcggccatctttcaattgcccagcagcgatgacgtggaggagctggaggaacttgagctaatgatttcccctaattatctggaggcacatcggcagaagggcaactgtcggcaaatctacggtgactgtaatcacacgttctggttggattga

SEQ ID NO: 31890 - protein, 429 aa, DROSOPHILA
MGKTIKVIGCAGVGTLLILLLPLCLIQNYSAPSGNGHSNVSHTVVITPAPAPAGPLESGRDAMLRLHRQKRYLLFPEGSSFQLVFDIIIPIIDYTNYAILGITCSVAWELPSKPPSELIENVLTRINDGTIGTVRRNGSVPDPEPDPPSQPLTHSQNLELDNRGADTANWQAVHAPPANPPAYAANEHDSHSYYTNIQRIPAAYPYANANANADANANGQQSQAAIPANWHARQSPAEWQQRVKTTGADNWWTRNGQRVQQNWREKQRIWGPSKWDYAYSQRPREVLRAPPKHHIYPVFARRRRRRSLDQDAHFERLHLQQHLSSRQLLFGKIERLYKSRRLNGTSCVLRALCESSQRQQHVLRGTNAVRPQSFIMEILSAIFQLPSSDDVEELEELELMISPNYLEAHRQKGNCRQIYGDCNHTFWLD

SEQ ID NO: 31891 - DNA, 3508 bp, DROSOPHILA
gtggcaagtgcatcaaaggctgccgcaaacattttaacaccactcggcattttcgtgctgatgacattaaacagctggaacacttttgtcatgcaacgaggtcaacaagggccagcgaatccttggtatcccttttttttttttggttttttgttcgctgccttttcccaactgctcattttcagctgtttaataaaaatgccaattaaatgcatgtcgctgattgccacacgcagcatcagtggctgccggaaaaacagaaacactcatccaaaacctgcaaatggcacacaagttaattataaattgcaaatggcaccaacaccaaataaatatcatcagcagccacaagcacttatagaaggctctccacaaaaatctggaaaatcttgaaaatagcaatgctatttaatgtccaacattttggatattaataacgaatataaaaatgtagtagtacttgtaaaacttgaatattaaatcattgaaactaaaactttttatgttttagtttcccctttgtatgtataccccgtcaaagggtattaaacataactcaaatgaagttgaaatgaagttttaaatttttattaaaaacgcgctgaattaacaatcgtattgtggtatattgtgccatggtacgagcttcaatatttaatcaccccaggcttcaatcactttgaagtgcttttattactatcagtattattattttaggcaatcagtccgtcagttttctggatctatttatttgttttgatgtgcaattcaatctgtgtcttgtttattttatgtagctcaaaaaaacaaaccagttcaatctacagttccgtcatttgccagatgttcagtgaaggttttctgtttcgaaaaatacatttatattcgtaaaagggtcgtcagtttaacatcaagtgcaacatacttattttttaaattatctctataaatctattcatatttatttggccaatctgttctcttttccaattgcttagtgctaaacatcatcggtgtatggggatatgctgtcgaaactcaatggacaatggctgtgcatgatttgctcgcagttctcctcccgcagatgcggcatatgccgcttgtcgtgctcatccagtctgcaattaagtaaagtgtgtggttgggcgcattaatgcacatacgactgtcaggcacttacgtaaatacgtatttcaagagcttaaacaaaaatccctgaccatgatccccggccagggcggtgcaataggccttcaggacacacgcacgtccatccaggccactgcgatcaatcagctcgtggagcaactcgtaggtgtccctgcgaaagggtctattctcccttttgaccaacaccggcgtattggctcgaaagccatagccatgagcccacacaatcggcgatttgatcacattgtttttggcatttacgcggaactttaagggggagttaatatatgtattgactataacttgaaatatacccacaaatatacgagttgtctctataatatccaaatatcgcttggctcgactatggatggcagtggaattttgatcttggcctgccaccagggtcagaaaagttagaactagacccaagcgaaccgtgaccattgtaaccaatgtaagaactcaactaactaacagcaaagaatggggaatggaaagcatacgattgttcttaactcaaatcaaaacaggtttctttttgttcatagacttatgattataatgctaattaaaggccaaactgggtccatctcacgtggaaaatggagcgtatgatcgacttaccggaatatcaatttaagcattttgaaaagcattccgctcttttgcttgggattatccacatcgttaatggcagtgcagaacgacttcagcatgcaagctcgaccatcgaagccatgtctataagaaaaaacgataatagatttaataaattataaaatatagtttagtagtatactgaaaatgcaaagagatagaaatggcaatagaaaacgtacccatccagagcagtctccagttttgagaagaggtccctcttgaacaggcgaaaaaagacggcattatccttcttctgctcctcgatggatggaaagggataattggcacggaagccatagccgtaggcatacagagtgttgattgtccacagattgttcttgccgttggtacgccactgcaggacatcgaagggagccaattaaaactggacaccatacacctaccatatgcaagtatgcatcatatacgcaccgacatacgtgatcccttgctgaattgaagataacgcttgccgcgacgcagaatccttgtggaattgccggatgcggaatcaaagtcggagctgggaatattgctggtcgatggactgaccatgtggctatcgaaatgtttggacagtggactgagcccctcgaaattgtcaacgggttggggttgagtgacgggcggattggacgccggtatgggcaccaccaggagcaagtgcagcatcagcaatgccaacgctgacaggtgagtcatgttgctgaatttccaaatgttcactaattaatactttcaactgctagggattttcgccctgaaactacttcaatttctgacgtttttcctggcttaattgcctcgctcacattgttcgtcgtgggtctgggtcttgtgtccagttccagttcccctgggctactgttataagctcggatatatttaatctggctgacataaatacgagagccaaaaagagaagcaaacaaacaaacaacaaacaatgaatttgttcttgctggcgttgcttatttatttattgctctgtgtggttcggtgacatctcgtgtcttggtcattttatccattcggtccattctgtccgttctatccattctgtccactccatcctgcttcggaattctagtttctagttctggacatgacgtttacttgttaacacttttctttccatctttcgctgagctgcttcttgttgacgtccccaatttacccgtttaccattacaaatggggccagcatggagcatgcggatgaggtgtgaacacctggaaatgattttttacggccgcggatgaactccagattagcaagaattagtagtagtaactacatttaaataagtaaatatttttctaggttattgctgtcgttataggttgataaaaagttaaaattatatataaattggctatttttctgtcttcattcattttctcatttcatccaactccaattgtcaatttactattctgacagattttattacgctctaaatgtattacagcccatatttctcgatgcccaaatgatggctgtttttggccaatagtcgtaaatatgtcagccggtctcctaattttcactcattgtctaagacaatgccaacttttcttttgattgatttcaatcgaaccagcagcagcaaagaaactttggccaatgtatttttatttgactccaattggggttcgtttgccactggcag

SEQ ID NO: 31892 - DNA, 1008 bp, DROSOPHILA
atgctgcacttgctcctggtggtgcccataccggcgtccaatccgcccgtcactcaaccccaacccgttgacaatttcgaggggctcagtccactgtccaaacatttcgatagccacatggtcagtccatcgaccagcaatattcccagctccgactttgattccgcatccggcaattccacaaggattctgcgtcgcggcaagcgttatcttcaattcagcaagggatcacgtatgtcgtggcgtaccaacggcaagaacaatctgtggacaatcaacactctgtatgcctacggctatggcttccgtgccaattatccctttccatccatcgaggagcagaagaaggataatgccgtcttttttcgcctgttcaagagggacctcttctcaaaactggagactgctctggatggacatggcttcgatggtcgagcttgcatgctgaagtcgttctgcactgccattaacgatgtggataatcccaagcaaaagagcggaatgcttttcaaaatgcttaaattgatattccgtcgagccaagcgatatttggatattatagagacaactcgtatatttgtgggtatatttcaagttatagtcaatacatatattaactcccccttaaagttccgcgtaaatgccaaaaacaatgtgatcaaatcgccgattgtgtgggctcatggctatggctttcgagccaatacgccggtgttggtcaaaagggagaatagaccctttcgcagggacacctacgagttgctccacgagctgattgatcgcagtggcctggatggacgtgcgtgtgtcctgaaggcctattgcaccgccctggccggggatcatggtcagggatttttgtttaagctcttgaaatacgtatttacactggatgagcacgacaagcggcatatgccgcatctgcgggaggagaactgcgagcaaatcatgcacagccattgtccattgagtttcgacagcatatccccatacaccgatgatgtttag

SEQ ID NO: 31893 - protein, 335 aa, DROSOPHILA
MLHLLLVVPIPASNPPVTQPQPVDNFEGLSPLSKHFDSHMVSPSTSNIPSSDFDSASGNSTRILRRGKRYLQFSKGSRMSWRTNGKNNLWTINTLYAYGYGFRANYPFPSIEEQKKDNAVFFRLFKRDLFSKLETALDGHGFDGRACMLKSFCTAINDVDNPKQKSGMLFKMLKLIFRRAKRYLDIIETTRIFVGIFQVIVNTYINSPLKFRVNAKNNVIKSPIVWAHGYGFRANTPVLVKRENRPFRRDTYELLHELIDRSGLDGRACVLKAYCTALAGDHGQGFLFKLLKYVFTLDEHDKRHMPHLREENCEQIMHSHCPLSFDSISPYTDDV

SEQ ID NO: 31894 - DNA, 4443 bp, DROSOPHILA
gggcggaaagccgccgtattcgaacaggcgcaagaggtcataatattgtccgtgtatgtcgccgcagatcttcagcggtgcctccagctccaggagtatgggctgcgacaggaatatctcgcgggacttgaggcacaggctgcggatctcgctctctgatagctgaacattctttcccggtcgtgcaccgcgcactgcaatggaaaaccaagcagggaaaatttacgttaaggtgatgagagtgggcggtggttgggtggcaaggcatgtggggaatgggtgatgatgggtgggggcaaggtaatcaaaagttggagccctaacacctaccctccagcaggcgcgagatgatactgtcgatgttcatgatatccgacatctttgtgggcccgcttgctcagcttcctgaagttcgcttatccgccgattgcagcaactgctatttcccgtaacccgtgtattttcggtatacgttcgttatgtatgttatttcatcgatgggcacgggctgcgtgtgcctgtgtgtgtgtgcgccgtgtccgtgtgcggatggaaactcggtgctgggctaatctcgccctttggtcagctggatgcacggattcgcggattcactgcctcggttgctcacccctctgaggttggctgacttcaatcgttccgatccttagccagctgcccttttattgcatttaatgcacgttttactcgcgacgtactaaaaaattttcatctacgttggttagtgacgtcgattgtttacagcgcgagtcgattgcctatcgattgcctatccattgcacggcgcgcagctatcggtaaaaggtagtgtgaccggaatatgcaaattcatttaaaaaacaatattttttagttaagtacggtacattgaacaggtgataggtactcataaaggaatataattatcttatgatatattggctattaaacgtatcgttgacatttatacccaaagtattataatatcatctttattgactcattttaggttatcatcgctgtcattgaagctcttcccgtcctccgtggtgttgaacatcacccgcttcctgggcagcggaactggcctcgaactcagggacgacttggaagctcctcgaatagtggccgccggcttgaccaggatctcctccagacgagccttgaaatcgcgactaactagtctttgaggactggggcttcgagtttgctgttcgctgctatccgtttgctcatccgtctgctcttcgccttgagagctggctatatcctcttcagacttttcagagatcgcagacctcgggatccctttgcctggaacctccattggcttgagtggactcttgtgcttcagcaacatttccgcgcgttccgagaacttggcggagcacagtttttcgacaaacttgcggatgcgatttcgagtggcgtaaaaatgtggatgttgctaaagggtattccagaattgtcaaaagttcattagtttttggcagttataggcttaccagtttcagtttgttgcggtgctctgtcagctcggagttcactctcttcaaagagttatgcgaaatacctttggacttcatatcgaagccgtgagacatcaacttccggttgaccatcttccgggcatccttgcgagtaagtggtttttgagggctccttaaaacatgtggattattattactctaagaaagcttaacatcgaaacactcacttgatgattcttccagaaggcttgattgtttttggcgttggatcctctcgtgctgcttccgacccggaggtgggaacatcggtcccctcctcctctgtcaggctgcgctcctcttcgttctccgtctcttcttggctgagactatcgcttacgtccgtggcttctttcgtttcctgcttattaggagcaggttcccttggagatttcgtataagtcggattgctgtccgaacttccagcacttggctgctccttttccaccacttgaacttgggtcaccagctgtgggaatggtttctccgaaccttttcgtggcgcctcctcaatggaataggtgtcatcgtcatgtttctgtttgaggaactcgctctccacctgcttgcgaatccgatcaatgttggtttcctccttgcgaaccaccggcttgggtattttcgaggcaactggcacagtctgcacaggctctggctgcaccttttgaacactcagctgcttgagctctcgctccagtgcccctagcttctccttgtagccctcctcaaggtgatagaccacctcttccagcctgtgtgcgctgacctttccaatctctgccaccttctcagtgagtatgcgctccagatcctccagacacggcgtggccacccgatcttccagcggaggcgtgctggcggatgcctgtttactctgctcgagtgcgtggctcaggccctccagcctcttgttaatgtcctgaaaggatataaattgtaatggtacttccacaggagtaaggattacttgattctacctgtataaactgttcgttgctctgcttgagctgcgtttgccactcctcaaagttgctcagtcgctccgccaatcctgtgagttgctccttccgttcgctggcctcgctttgcctggcctctccgctgtcctcgtccttctcctttggctccgccagattgctctgtatgcccacgtggcgctgctcctggcgcggacttacccgcttcgatcccgtgctccgctccttaatattccgctcggcggcattcaggcgctcctttagctgcttgatctccagctccattttgatggtgtttatcaggtgcacatcggtggccttatcccgatccttctccttcccggtggcggatgtcagacttggcggtgaggccacacgatgcttccgaccaatgtgcacattcaaggcctcgttgctgatgaagttcttagtgcacagatgacaggggtataccacctcgcgaatggcctcgatctgggtgattctcttgtgcagctgcaccacttcgttgtttgactcactcagggactttcgcagcgtagctatctcctcctgggccgtcgtatgcgcttcctttagatctgtgacacattcgtccaggtaagtgcgacagcacatcaaatactgtatggcatactgagacatcacaaagtacttggcaatgccactgtccagaatgtgagtttccagcactgtgcccagtggagcctcagaaaggtgggtcaacgccttgtccaccagctcgaagttttgctccctgagaatccgctctgtttcataggatcctgccggaaataccgctatgaactaagtgttaactacttttaacataattttccatacccataagtctccaatccagtggaccatcgcgatactgtctcagtttaaagcccgtttcacggaccatctgcggatatttgcccttgaatcccatttctctgaatctgaatcacccaggactgcaaaaaaaatcgaaagtttgtttacttcttcctcgccttctttgttttgcttccgttctttgccaaactttatctgccacttttcttaccacccttgtgtgtttcttagtttttggttacacgttgccaaagcaactacaactaggttgtcaggacgacaggttgaaagtagggttgttgagcctctgaaaatgcatattacaagcatgatatcgtaaaaaatgctcattcctattattaggttttaaaactaactgccattaagagattacagtttttaatattgttagtattgattagaattacttttgttattgttcattctgttatgttattttattatcttttaacacaaataattcaaaagaaccgcgaaagacacgataaatggcaggatccttttagataaaacatttaggagctatcgagcatctccgttgaagcatctgtcaaaaggctcaactcagttgcgattggactctccaaccgtgaggttgtattaaacggaaactcctagcaaaatgtgttaagtttagttaaaaaccttcaattataagcaataagtagcacaaaaagctagagaaaacagcaacaaaatgtggcattggagtttgttgtgtgttttcctacttgttccgttggcgaattccacgggtaagctgcgaaaacttgtgcgtcagtccgagaaaaatcctgtgaaaattccgataccctgatgctgtatcccaagtatttgacagatgtcaggaagctgcgcccacaagagagcaagagagcggcgtctgcgcagcaatttgttttgggaaattttccatttgtttgggaatttaatttggcatttttctctgtttttcccctgaattaccaccactttcctagctccaataagttttgaggcaaatccggacaccaaacgtctctatgatgatttgttgagcaactacaatcgattgattaggcccgttgtgaaca

SEQ ID NO: 31895 - DNA, 2214 bp, DROSOPHILA
atgggattcaagggcaaatatccgcagatggtccgtgaaacgggctttaaactgagacagtatcgcgatggtccactggattggagacttatgggatcctatgaaacagagcggattctcagggagcaaaacttcgagctggtggacaaggcgttgacccacctttctgaggctccactgggcacagtgctggaaactcacattctggacagtggcattgccaagtactttgtgatgtctcagtatgccatacagtatttgatgtgctgtcgcacttacctggacgaatgtgtcacagatctaaaggaagcgcatacgacggcccaggaggagatagctacgctgcgaaagtccctgagtgagtcaaacaacgaagtggtgcagctgcacaagagaatcacccagatcgaggccattcgcgaggtggtatacccctgtcatctgtgcactaagaacttcatcagcaacgaggccttgaatgtgcacattggtcggaagcatcgtgtggcctcaccgccaagtctgacatccgccaccgggaaggagaaggatcgggataaggccaccgatgtgcacctgataaacaccatcaaaatggagctggagatcaagcagctaaaggagcgcctgaatgccgccgagcggaatattaaggagcggagcacgggatcgaagcgggtaagtccgcgccaggagcagcgccacgtgggcatacagagcaatctggcggagccaaaggagaaggacgaggacagcggagaggccaggcaaagcgaggccagcgaacggaaggagcaactcacaggattggcggagcgactgagcaactttgaggagtggcaaacgcagctcaagcagagcaacgaacagtttatacaggacattaacaagaggctggagggcctgagccacgcactcgagcagagtaaacaggcatccgccagcacgcctccgctggaagatcgggtggccacgccgtgtctggaggatctggagcgcatactcactgagaaggtggcagagattggaaaggtcagcgcacacaggctggaagaggtggtctatcaccttgaggagggctacaaggagaagctaggggcactggagcgagagctcaagcagctgagtgttcaaaaggtgcagccagagcctgtgcagactgtgccagttgcctcgaaaatacccaagccggtggttcgcaaggaggaaaccaacattgatcggattcgcaagcaggtggagagcgagttcctcaaacagaaacatgacgatgacacctattccattgaggaggcgccacgaaaaggttcggagaaaccattcccacagctggtgacccaagttcaagtggtggaaaaggagcagccaagtgctggaagttcggacagcaatccgacttatacgaaatctccaagggaacctgctcctaataagcaggaaacgaaagaagccacggacgtaagcgatagtctcagccaagaagagacggagaacgaagaggagcgcagcctgacagaggaggaggggaccgatgttcccacctccgggtcggaagcagcacgagaggatccaacgccaaaaacaatcaagccttctggaagaatcatcaagagccctcaaaaaccacttactcgcaaggatgcccggaagatggtcaaccggaagttgatgtctcacggcttcgatatgaagtccaaaggtatttcgcataactctttgaagagagtgaactccgagctgacagagcaccgcaacaaactgaaactgcaacatccacatttttacgccactcgaaatcgcatccgcaagtttgtcgaaaaactgtgctccgccaagttctcggaacgcgcggaaatgttgctgaagcacaagagtccactcaagccaatggaggttccaggcaaagggatcccgaggtctgcgatctctgaaaagtctgaagaggatatagccagctctcaaggcgaagagcagacggatgagcaaacggatagcagcgaacagcaaactcgaagccccagtcctcaaagactagttagtcgcgatttcaaggctcgtctggaggagatcctggtcaagccggcggccactattcgaggagcttccaagtcgtccctgagttcgaggccagttccgctgcccaggaagcgggtgatgttcaacaccacggaggacgggaagagcttcaatgacagcgatgataacctaaaatga

SEQ ID NO: 31896 - protein, 737 aa, DROSOPHILA
MGFKGKYPQMVRETGFKLRQYRDGPLDWRLMGSYETERILREQNFELVDKALTHLSEAPLGTVLETHILDSGIAKYFVMSQYAIQYLMCCRTYLDECVTDLKEAHTTAQEEIATLRKSLSESNNEVVQLHKRITQIEAIREVVYPCHLCTKNFISNEALNVHIGRKHRVASPPSLTSATGKEKDRDKATDVHLINTIKMELEIKQLKERLNAAERNIKERSTGSKRVSPRQEQRHVGIQSNLAEPKEKDEDSGEARQSEASERKEQLTGLAERLSNFEEWQTQLKQSNEQFIQDINKRLEGLSHALEQSKQASASTPPLEDRVATPCLEDLERILTEKVAEIGKVSAHRLEEVVYHLEEGYKEKLGALERELKQLSVQKVQPEPVQTVPVASKIPKPVVRKEETNIDRIRKQVESEFLKQKHDDDTYSIEEAPRKGSEKPFPQLVTQVQVVEKEQPSAGSSDSNPTYTKSPREPAPNKQETKEATDVSDSLSQEETENEEERSLTEEEGTDVPTSGSEAAREDPTPKTIKPSGRIIKSPQKPLTRKDARKMVNRKLMSHGFDMKSKGISHNSLKRVNSELTEHRNKLKLQHPHFYATRNRIRKFVEKLCSAKFSERAEMLLKHKSPLKPMEVPGKGIPRSAISEKSEEDIASSQGEEQTDEQTDSSEQQTRSPSPQRLVSRDFKARLEEILVKPAATIRGASKSSLSSRPVPLPRKRVMFNTTEDGKSFNDSDDNLK

SEQ ID NO: 31897 - DNA, 2895 bp, DROSOPHILA
ctcctgctccgtacggcgcaacgaggtggcgtactgctgcagttgctcccgcagactggcctccttggactgctcctccagcaccgccttctttagcaccgtcgcttgtgcccgcagctatttggggttcatttttgggggattaattggattaatgggcgttaactgttgctgtcgatttggggcggaatcctacctttgagtattctgtggccaatttctggtacttggcctccggcaccgtgccatccatggctagcgatttctctgccatccaggctggctttaaggtctatgtggttgccggcggtggagttctttgcacggtttctaaattgttttaaacaaattgaccaacaaataaagctggcactgcagtgggcacagccacacactcgcagagaataccaaagcgctaaggtcgaaaatgcattcatttgtgctgctggtcacactacatacttaacggttattttaattaagaaagaagaagaaatttagttttgaaatattttttgattttttattgattaaaaatgcttatatatgttaagccttcaactgttttttttaaattaaccttaagctatttgtttgttttctcaaaactaaaaactgttgactatataatataaatttttacacccttgcattgcattaaagaatttcattgcaaccttgacttctcacttttcagataagcaaaccgatttttctgtttacaggcagcaaattcttcgaattatcttgtttacaagcaataaaaagggaagcgaataattaagaggtgtgaaaggttaaagccctaaacaaaccaactaaagtgttgttaatatatgttaaatatttactttgcccctgaataagttgatgactagttatcatagggtatatcgcaataaataaaacagatttgtatcgtttaagacctttattaactatgtagtaacataaattaagcattacctaataggtacgtaattgaaagctgtttaagcacttaacttaagaatatattatcgaagggcactttctcgaacagtttgttggacagctccctgaagatgatgccgaaactcttggcatatcccacctttagttcgttgaacaccgtctcccagttttcgttaaggaatcgattcataccatccgacagagttttgtcgttgaatagattctcgaagttcatgtacaccctcttgggatcgaaggacacccggtagtcctttagtcgcatgtacttgacgccatccttctcaaagggttcgccgatcaggcgatgctcgatcttggtgttgatcagcgtgacattggcctttccatgtcccgtgatgggcagcagaaggatgcggccggacatctcgtagtcgccaatcatctctatgcgatccgttcggctatcacagataatcaagtgcttatccagatcggttctgaaatttaggaggtcatatattcatcatatatttataacttctttagttgatatgacattgtgatgttatatcatttaatttcattaataaatattttaatcgtgataacccacctgtaccgctggatcttgctggtggagatcatgtcgtgcaccttcacattcttcaaggcctggcgcagatttattggcgcattgccggcgtctataacgagtttctttacggtcagcggttcgaggggcgggatgccaaattccctattgcctgcaatggaattggtgagaggatgactccaggtctgcaaccaaatcggtgtgattactcacccgccttcagctgctgtatcgccacattgacggcatccaccaggcatttgtcgaagttcgcgtcccgtttgcacttgggaaagccttcggctgaaaagtcgagacaaaaatcggttaagtcgcgcttggtcatgacattgaaatctcgccgcgtcgcggattgcggaagtgccactgccaaaaaataaaaatatagcggcctgcaattgggccagcatccattggccagagttcgttggccacagaaacttgtttgtaaacaaaacaaaagtgtcggcgacacaaaaaaaaatgtatatatatatatgtggatgaatacatgagaaaaagaagtgagctagcatattttagtggctcaatgtcaagttgaggggccatttatcatgaatacattgagcagacaaaggcacacatgacctatgccaacggtttcattaatcagctacacagcgagaaaaattccataaaaattccgtgctgcggcgtggaatgtgcgaattaattaacacaatttaatcgccattcggttacatatgtacatatgtatgtccttctctgcgataatcgtaaatttgtgtcacaagcggaagtgtaagtgtgaatgtggatcactggactgtggcctgtggtgtctggaccgccaaactggcctggccaagagcaacctgtttgcagacgatggcttcaattgcataaccgccgtttacagtggacttcagtagctggaaacctctaatgctgccaaaaaaaaccgatcttaattgatcttgaccatttagcagcacgcaaatgaagcgcataaagtcttatggtcgcttgttttttttatatctcccctcaattattctcgtttttaattgccaaaactattatcttggaaatagcccatcgcatttttaatcgtttcatggaaaataattttatttagcttttcggtgattcccacgctaattgtttttaattgttcatatttgtcttgctggatttcttttgggattcaaagttaaatctagctttgattaatgttgaaaccaagaaaagtaattattcatgattctaaagtatttaaaatgtacatgaaaacacttaaaaatacaatttctatggatctacagcaacgttaacataaatat

SEQ ID NO: 31898 - DNA, 717 bp, DROSOPHILA
atgaccaagcgcgacttaaccgatttttgtctcgacttttcagccgaaggctttcccaagtgcaaacgggacgcgaacttcgacaaatgcctggtggatgccgtcaatgtggcgatacagcagctgaaggcgggcaatagggaatttggcatcccgcccctcgaaccgctgaccgtaaagaaactcgttatagacgccggcaatgcgccaataaatctgcgccaggccttgaagaatgtgaaggtgcacgacatgatctccaccagcaagatccagcggtacagaaccgatctggataagcacttgattatctgtgatagccgaacggatcgcatagagatgattggcgactacgagatgtccggccgcatccttctgctgcccatcacgggacatggaaaggccaatgtcacgctgatcaacaccaagatcgagcatcgcctgatcggcgaaccctttgagaaggatggcgtcaagtacatgcgactaaaggactaccgggtgtccttcgatcccaagagggtgtacatgaacttcgagaatctattcaacgacaaaactctgtcggatggtatgaatcgattccttaacgaaaactgggagacggtgttcaacgaactaaaggtgggatatgccaagagtttcggcatcatcttcagggagctgtccaacaaactgttcgagaaagtgcccttcgataatatattcttaagttaa

SEQ ID NO: 31899 - protein, 238 aa, DROSOPHILA
MTKRDLTDFCLDFSAEGFPKCKRDANFDKCLVDAVNVAIQQLKAGNREFGIPPLEPLTVKKLVIDAGNAPINLRQALKNVKVHDMISTSKIQRYRTDLDKHLIICDSRTDRIEMIGDYEMSGRILLLPITGHGKANVTLINTKIEHRLIGEPFEKDGVKYMRLKDYRVSFDPKRVYMNFENLFNDKTLSDGMNRFLNENWETVFNELKVGYAKSFGIIFRELSNKLFEKVPFDNIFLS

SEQ ID NO: 31900 - DNA, 9577 bp, DROSOPHILA
ccctttcccttttgtaggtcgccatgcaacagcacaatatcgacaggatagttagtgccgtcgtgggcaccacggaaaacgtcaaggacgccaacgagcaaatccggcaggccactcaacgaaatgcaggactacgcgtgtggtcgctgttcttcctgctggtcatgtcgttctccctgctcttcttggactggtactacgattaagtgaagtccccaaatttatgtgtaacccacccaatttagggaatgataaatgcaaaaatgttttgttatcgtttgatcgcactaaaagcatattttgtttattacataatttataaataaaaggaaaatatttgtttaggctattcaactgccttgtttcaattcaatgaaacctcgtacaacaatatggaactaaaatcgatttgagcgccttgctcacacatgtctcagtagttaatttaaattctacaccaaaatgtgttttagtgtgttgcttggtacattgtttatatctaggtccttagtcatattattttcattaaacgctcttcaaaaaaatatatatatatatctaactgggaacggaaatcagcaataagtatgtatatgtatatatatgtctaaggcctaaagttaacctttgcgtatttctttcagttggtttcattacatgaatgtctagattctaactagcttaggtctaatattttgtagccttaagatttgtgtctgagggagtgtatccttggcttagtcgctaggtgttcttttgtttttagtgcaatatgggattgcattcaatgcagtctgctggttcttttgttttcttttcatattgtttagaataagagttaagagttacttaatgattggctctccaatgggataaatggaagctattccccacggagtgtggtaatagtgtaggaaggcgccgatattatttggctaggttttttgtgattacttataactatagcgttgtacactaaataataatccggccccgtgggttatggcgttgtggcataggattccagagccacactgttgccagcgcagctctccaccgaattggggtattcatctgggctgtggtacaagtggccgccactgctcatcggcgtcaaaggtgtctcctcgatgggcgtagctggattctccagcttgtcactgctggcgtggctattgttgttgctgggtgacttcgatgcggcatcctcgttgcggaatacgcccagcggcaaatgggttttcatgtgagctaatgtaaatttaaaaaataagttagttattacacgttttactagcttcaaaaacttcaattaagttgttgcatcttaacgtaggccatgcaagaagccggcatttgtaatttacctatccttactctcgtttctcacgacaaactagagcagaacctattacttaaatacatttggaatagtgctgccaactatgtagatacatctaagttgcataagtagataagaacaatggacattacaaacaacattcacacagctagtagtagtcaattatagaatttgaaataataacttggttgaggctttttgaaaactatcaatagttcttaaactaaagctacattgacacctttaaatgatataaggaattcattataattgctaagataaaaatataaaaattcgataaagaagaaaaacaaatctcttctggtaatgaatgtatttttaaattcgaattaacaatgttggcaacaccatttatgaacggcgagactttaccccgaaaattcgtgaaacgcataaaggagcttggacagaatttgcatttgtaaaacatctcgctgtgggtgcgtcgatgtttgcgcaattctttcagatactcgaacgtccgatcgcacccgtcgcactggtaaccgagctctggaaaagacaatttcgttggcctttgtatctttatctttatcgtatcgtatcggtatctacatattcagttcggttgttgtgttgagccattaggattcacacagtgtgatcttgaagggagccaacatagatagcgataaatacactcgtgtcaagcgaattttagtttttatttaattgtaaaccaaagatttcactgtaccggcaaagaacaaccaacatgtaacattgattgttagaggttttatttattttgggttgaaagtgcgtggcgaaatccagagtttcagccagaggaaattccattgaagtagaaagggttaaagcagaagtcaagcaatctatatatatacataggtataagtaatatgtacagctaataaatgtatattcaatggaatattcaacaaccattttcttagaaattcccacgtgttacgaaacgcactccacatctaccaattgaatacaaaataagtgtgttgagtgtgttcagtgatcagtgatccagtgtccaggtcatcggattaataacaaagggcagctaattgtcaataattaggcaagctgagctagagctactgagctagagccgtcagatatcagcgtttaattgtcagagttcatatcaacgggtaattagcgtttatacaatttttgcaagccgttcgaccgaccgggcgcattcataccaccaactggcttgtctactattattgttacattttttttttgtatccactcacaaaactgcatgcgcaagttcataaacggtttattttggcttaaggctaaaagcataagacataagctgtgtgattttcatgccaagcattaggaatatgcccatgccataaatcgatattggtattctcgagacgaaagcgattcgttcacggttgtcatacctttggaacgtatacatattaccacgcttgaataaactgccgccaacaataacaacagcgacatcaacaatacaacgataacaattgatggaggattagtaagaggcttataactcaagctactacagagcagcactaagactaaatgaatggggattagtacatggtgggttaactgctaggcaaccgacaaaaaaaaaaaaagaagaaaatcaacgaactaaacccttttggtggtgctcgaaacttacctccgtggaacttaatgtgcgtcttgagggcgctctccgtgccaaactgtttgccacactcgtcgcaggtgtgcggcttggagagcaggtgcaccgtgatcttgtgcagcgtcagttgcgatggtcgcgggaaccggacgcgacaaatgttgcactcgtacggccgtccctccacatcgtgcgactccatgtgccgatgcagcgccgtacgcatgcgataccctcgcttgcagattgtgcacacatatggcattgttgtcagcgctccgtgcgccagctgatggtgcttcttcagggaaatttcgttggtgaatcgctcctcgcagtacagacaatggtgactcgttcgcagctcgctcacttgcaccgtggacgcgacggcgggcgacggaggcggagctggtgatgcgggcgtagccggagatgccggcggtatgtgatccaccgtcgatgaggagggtgacgacgagggcgatggcgaggccaccggtgtggccaaatgcagcggaccctgtggcccaacgatcacgcctcgcttgcgatactgtcgcaacgtggttgtggaatctggttcggattgttccggcgacggcattgttatgtgctgcgagtacaccatgggctgtggcgatggtaccgagactatggtcgatggcggagtcaacaccgttggcggcgcctgcagtgtctgcagctcctcgaactgttcgttggcatggctgtggccggaagtgcctgtaacgggatgaagacaagttttagatcggaaccaatttggatcgtacaaaatgcttggggtgatcttttttcttttttttttttttttgtaatgaattagatgcagcttggtgataatgccattattccaatttactcacagtcttcgcaatcgggacagcaaagaatctttcgtggcgttgttgggcttgcttgcatttccactgctgttgtggaattcatggtttaataagagattgttatggtgaaagtataaatgtataatactaacttgatggatgcggcgactgtggctgcattaacggttgttgctgtggttgctgcacttgcaacacttgttggtgttgctggtgttgctgcggttgcacttgcacttgcagttgctgcacctgctgtagcacttcttgttgaagttgaggttgctgttgctgttggtggtgttgtgcttggggtagttgctgaagtgccttctgctgctgctgatgctgctgcacttgtaacttctgctgcggctgcagttgatgctgttgaagctgtagccttggcttatacggcctaccccgcggcctgcgttcgctggtgatctgcagctgaacgtcctccaccttcacagcgcccgatggatccgttttcagggtcatatgaaagcgctggatgtgaacgtccagtgccttctgggcgggaaacacatgtgagcactgaccgcactggtactgctgcaccacatgatggctgaggatgtgctgcgatcgcttcgttcggccggcaaaggccatcggacagtgtggacaattgaagggcgccaccgccggatgcagatcgatgatatgccggctgtactccaggctgctggagaatcgcggcccgttatggcagaagcggcacttcagcgtgagcggccgacccctggccgctgtgacgggaatgggggtcactttcgttgatatggaagtggctcccggcattcccaatactggatggctttgtacgacgcgagtttgttgcggctgttgcagccgctgatactgctggtgttgatactgctgccgtatctgttggcgttgcgtgtgctgcatttgatgcacatcgttgctggtggcagcattatagatgtgcagcggtgcctgctgcggattgctggccgaggccactggctgctgaatctctggctgctggatcagtatcataatcggttgctgctgctgttgcgcctgctgttgctgatgctggcgttgatgttgctgttgcgacatctgaatctgttgctggcaatgttgctgctgatgattcacctgctcaatgacgtagctttcattggatgctggttgaagcatcgtgtatgtttcagtctgctgcggataaagatcgctcgcactgatgtagtacgttgtggtcgtgggtgcaacactctcgacgggtgcactctttatggcctcaagtccgccaaccgatgaccactggacttgctgctgttgctgcgactgctgcgtctgccactgtcgtgttgtttccgagccagccgagggcagcgagatgacctgcatcttgttggaggattgctgcaccgtctgctggacaatgtgctgctggtaaatctgttcgtaggtgactgtcgtcgtcgtgccctgcgtctggacgtgaggcaccaactgggactgcagttgtacatgtggaaccacttgatgctgtgcttgcggcacgagctgtaaagtattttgctcctggttttggacttcaatttgaggctcaatttgcggtgggatttggtgttgcatctgagattggtcatgagattgtacttgaggctgatggttttgtggcgattgcacgcttagcacatcgtgttgcattcgagtctcaatttgaggttgcatttgagtctcgatttgaggttccatttgtaattcgatctgagactgaacttgaggtgatgatatgggagattcaaatggtgaatgattagcggactcattttgaggctgtgtatcagcagcttggactggtaggtttgattggacatccatttggacggtgcttggctgtgtctccatttcgattttttccacctgctcccctgccggcggatcggattgtgacggctgcagatcccttaagaactgggtcagttctaaatgcaaattttgtccctcctctggtgtctcaatgttctcgaaacagggaatatcgttttgaaaaccaatcagttcattggtaaagttgctattatcaaatggatcctcagtggcactgggcttttcgtccttcggttcggcaacagaactctgctcgaaaggatttggtggcgacgaaacggacgactcctgctcagtcagtgtggcataatcggctggagtgaggaactcatcaatgtgggcacagtttggtgtgtacatgtgctggtcctgcatctcattgaggatgccattgagtgtggtctccacgtcgttcatctccacctccagtttctgcttggcctccagatcgttgaggggtaccaaatccgagggagtcggtgatggcaccggtgtagtaaccttgagctgttcaattccgttcgcacagtgcttggcaaactcggccatgaaatccatgggcgttggcccagatggcactatcggcacctcatccgtgtccgtgtcatctgaatccgttcccccaggcggtgttgcttcaattttattggttcggagtgccacagcagaattgaagctatctgctgtagcactctggcaaaaattttcatcgttttcgttgttgttcacgtcatcgggacgcagggcaaactccttgggatcagcggactgacgattggccgcctcagtttccggatccacgcaaaggcgacgctgcagattctcatccagaacctccagcggtatgctcactatgatctccctctggtcagcagagtctgattcgtccacagtttgcgtttgttggacggattcatgcgcctccatgttttgtggtaacgcatacgattcctgctttcccatagattccagctgctcaactgctttcggttgcgactcgctggtctctgtggatgaggtcagttcctcggactgcactagatcagcctcagccctgatgtcattcgcaattgactcgatttccgttctaacctgaatatcttcagcagattgttctggttgaactgattcttttataacgctggtggcttcaaatatttgctcttcggatgttgtttccttattattttgaacgctgagggttagttctttatctacaccattggacgctatcatttcattaaccggctccatttccatggcgcctaactggttgcgactgtctatcaaaccatttaaacagatttcatcgcacttcttttggaccacattagaggctacttccattggcgcatcggaagtgctgtcgatggcctcatcacaggacggtgcaaggccttccatccttgattccttcggatatatatccttttgatcagactttttgttctcttcgttgactggctgtgcttttcggtatagcggctcctttctaaccagcgatcgcctctgtcttttggccggcatgtatatcggtgctttcctgggccgccgtcctctgcgcggcattaaatcatacatgggcgatgtcttctccggcgattgctgcttaacgagtatcaccgttctccgcgccgagttggaggtagaggacggattgctgtcgctttcgaagccacagcatggaccgacggacaagtcgctcatgtgctcactgctgctggtgctgctgcgttggcgattgggcgacataaccgccgtcgagcaactggacgcccaattctccgaaagttctttgcgggcagccttcgtcttccagggcatgctgctggcattgatggaagcggcgggacgctccatttcacagtcaatggagagggttcgatacttgcgcactcggtgctgttgaggacttggtttgggcggtggcaaactctcgaaatccgttcgcacctgtttggctggtgttgttgctgttgctgttgctgcttctgctgctgctgctgctgctgtcgaatctccgtccgattcggataccatgcggcgcttacgtatgggctgctgctcctcgtggctggttggctccaactgcagccacctatcgtgtgtcttcttttggactttttgctgacgcttcgcttgtctggccgtctggcggtcggatatctcctgggcaaagtcctgcaggcgctgctgcatccgtacacatttccgccggaacttggccaccatcaaaaactgggccatgcactgccggcagatttcttgcggcagtccatcgtcgcgatttatctggaagtgcaaaagagagggtgcgaaaataaatattcgattcgtggaataaatcattgttggcatttaaattgtcattttggctgctgattgtgatttgcggcccttagttttctgaatggaaaaatctgtgggcttatacatatatgcaatagtgaatttattgcatttactaaattattgaaagtctactctctacacactgatttttaagttcgaacctaaaactttcttttctctggccaacacaatatgtggagttgaaaatcctataaccattttagttgtatggagatcaaggcatttaaagccattaataacccattaaaattatgcttttgaaatactataatctatttttagcaaaccttccttttatagcccatgtatgtgccattaagttttccccacttgggcagcatattatcatgtagattgtccggcgagatttgcatgcaaatctactacttaaaattggcgtaaacataaacattgacttactcgctgactgattagttaataaaattttaatccagcccacttcctgctgtcatacctttccttttcattcgattcgattccaatccattcactttgcgaccaaaactgaccgaccaaattatgaattaattaactgacattgaacattgaacgttgaaaaggcgaagtcgaaaatctttcgcttcgaacgccagtccagtccacaagccacagcgatgtttattaatgatttatgggcagggctggtggctcgaaatccccaatctgcacacaggtggcgaaggcggatcggtatcgggtacgttacggattggagtggagtggagtggagcattcgagtggcaaaaattccaagcgccacaaaaagcaccttcgttttctgcggcgatttggagcaaataatttgcttttgttttccaatcgagtggtttcattaactgcaggcgggggagattcaacaaatcatagtgcccaaaattcgatacagtaaaaaagagcgctttaattaggatttcctaatctttgtgcatacattttgcatttatttacgccggccttaacaagcgaaatagtgacgaaacactctgtgcgcacacgcgactgcaatcaattcgatggtacgtactaccattgaacgttgggccgaaaatgaattaaagcgtagcaggagtggcaagctcaacaaacaaaaaaaaaaacgtaattaacaagttcaagatcttgtgaatgggctaggtaacaaaaaaaaaatccagttactcaatgtgaatggggagagggggcgggggctaaagggataccgtcgaagaatgctgatacaattccgaacatacgttaccgcttgcgaggagcgacaaagagctagctgggtaacgactgggtaaccaactgtagaaaaaaaaaaaccccctgacaacgtgatttgtttcgagatatgtgcttaggttatggtaa

SEQ ID NO: 31901 - DNA, 5193 bp, DROSOPHILA
atgcaaatctcgccggacaatctacatgataatatgctgcccaagtggggaaaacttaatggcacatacatgggctataaaaggaagataaatcgcgacgatggactgccgcaagaaatctgccggcagtgcatggcccagtttttgatggtggccaagttccggcggaaatgtgtacggatgcagcagcgcctgcaggactttgcccaggagatatccgaccgccagacggccagacaagcgaagcgtcagcaaaaagtccaaaagaagacacacgataggtggctgcagttggagccaaccagccacgaggagcagcagcccatacgtaagcgccgcatggtatccgaatcggacggagattcgacagcagcagcagcagcagcagaagcagcaacagcaacagcaacaacaccagccaaacaggtgcgaacggatttcgagagtttgccaccgcccaaaccaagtcctcaacagcaccgagtgcgcaagtatcgaaccctctccattgactgtgaaatggagcgtcccgccgcttccatcaatgccagcagcatgccctggaagacgaaggctgcccgcaaagaactttcggagaattgggcgtccagttgctcgacggcggttatgtcgcccaatcgccaacgcagcagcaccagcagcagtgagcacatgagcgacttgtccgtcggtccatgctgtggcttcgaaagcgacagcaatccgtcctctacctccaactcggcgcggagaacggtgatactcgttaagcagcaatcgccggagaagacatcgcccatgtatgatttaatgccgcgcagaggacggcggcccaggaaagcaccgatatacatgccggccaaaagacagaggcgatcgctggttagaaaggagccgctataccgaaaagcacagccagtcaacgaagagaacaaaaagtctgatcaaaaggatatatatccgaaggaatcaaggatggaaggccttgcaccgtcctgtgatgaggccatcgacagcacttccgatgcgccaatggaagtagcctctaatgtggtccaaaagaagtgcgatgaaatctgtttaaatggtttgatagacagtcgcaaccagttaggcgccatggaaatggagccggttaatgaaatgatagcgtccaatggtgtagataaagaactaaccctcagcgttcaaaataataaggaaacaacatccgaagagcaaatatttgaagccaccagcgttataaaagaatcagttcaaccagaacaatctgctgaagatattcaggttagaacggaaatcgagtcaattgcgaatgacatcagggctgaggctgatctagtgcagtccgaggaactgacctcatccacagagaccagcgagtcgcaaccgaaagcagttgagcagctggaatctatgggaaagcaggaatcgtatgcgttaccacaaaacatggaggcgcatgaatccgtccaacaaacgcaaactgtggacgaatcagactctgctgaccagagggagatcatagtgagcataccgctggaggttctggatgagaatctgcagcgtcgcctttgcgtggatccggaaactgaggcggccaatcgtcagtccgctgatcccaaggagtttgccctgcgtcccgatgacgtgaacaacaacgaaaacgatgaaaatttttgccagagtgctacagcagatagcttcaattctgctgtggcactccgaaccaataaaattgaagcaacaccgcctgggggaacggattcagatgacacggacacggatgaggtgccgatagtgccatctgggccaacgcccatggatttcatggccgagtttgccaagcactgtgcgaacggaattgaacagctcaaggttactacaccggtgccatcaccgactccctcggatttggtacccctcaacgatctggaggccaagcagaaactggaggtggagatgaacgacgtggagaccacactcaatggcatcctcaatgagatgcaggaccagcacatgtacacaccaaactgtgcccacattgatgagttcctcactccagccgattatgccacactgactgagcaggagtcgtccgtttcgtcgccaccaaatcctttcgagcagagttctgttgccgaaccgaaggacgaaaagcccagtgccactgaggatccatttgataatagcaactttaccaatgaactgattggttttcaaaacgatattccctgtttcgagaacattgagacaccagaggagggacaaaatttgcatttagaactgacccagttcttaagggatctgcagccgtcacaatccgatccgccggcaggggagcaggtggaaaaaatcgaaatggagacacagccaagcaccgtccaaatggatgtccaatcaaacctaccagtccaagctgctgatacacagcctcaaaatgagtccgctaatcattcaccatttgaatctcccatatcatcacctcaagttcagtctcagatcgaattacaaatggaacctcaaatcgagactcaaatgcaacctcaaattgagactcgaatgcaacacgatgtgctaagcgtgcaatcgccacaaaaccatcagcctcaagtacaatctcatgaccaatctcagatgcaacaccaaatcccaccgcaaattgagcctcaaattgaagtccaaaaccaggagcaaaatactttacagctcgtgccgcaagcacagcatcaagtggttccacatgtacaactgcagtcccagttggtgcctcacgtccagacgcagggcacgacgacgacagtcacctacgaacagatttaccagcagcacattgtccagcagacggtgcagcaatcctccaacaagatgcaggtcatctcgctgccctcggctggctcggaaacaacacgacagtggcagacgcagcagtcgcagcaacagcagcaagtccagtggtcatcggttggcggacttgaggccataaagagtgcacccgtcgagagtgttgcacccacgaccacaacgtactacatcagtgcgagcgatctttatccgcagcagactgaaacatacacgatgcttcaaccagcatccaatgaaagctacgtcattgagcaggtgaatcatcagcagcaacattgccagcaacagattcagatgtcgcaacagcaacatcaacgccagcatcagcaacagcaggcgcaacagcagcagcaaccgattatgatactgatccagcagccagagattcagcagccagtggcctcggccagcaatccgcagcaggcaccgctgcacatctataatgctgccaccagcaacgatgtgcatcaaatgcagcacacgcaacgccaacagatacggcagcagtatcaacaccagcagtatcagcggctgcaacagccgcaacaaactcgcgtcgtacaaagccatccagtattgggaatgccgggagccacttccatatcaacgaaagtgacccccattcccgtcacagcggccaggggtcggccgctcacgctgaagtgccgcttctgccataacgggccgcgattctccagcagcctggagtacagccggcatatcatcgatctgcatccggcggtggcgcccttcaattgtccacactgtccgatggcctttgccggccgaacgaagcgatcgcagcacatcctcagccatcatgtggtgcagcagtaccagtgcggtcagtgctcacatgtgtttcccgcccagaaggcactggacgttcacatccagcgctttcatatgaccctgaaaacggatccatcgggcgctgtgaaggtggaggacgttcagctgcagatcaccagcgaacgcaggccgcggggtaggccgtataagccaaggctacagcttcaacagcatcaactgcagccgcagcagaagttacaagtgcagcagcatcagcagcagcagaaggcacttcagcaactaccccaagcacaacaccaccaacagcaacagcaacctcaacttcaacaagaagtgctacagcaggtgcagcaactgcaagtgcaagtgcaaccgcagcaacaccagcaacaccaacaagtgttgcaagtgcagcaaccacagcaacaaccgttaatgcagccacagtcgccgcatccatcaacagtggaaatgcaagcaagcccaacaacgccacgaaagattctttgctgtcccgattgcgaagactgcacttccggccacagccatgccaacgaacagttcgaggagctgcagacactgcaggcgccgccaacggtgttgactccgccatcgaccatagtctcggtaccatcgccacagcccatggtgtactcgcagcacataacaatgccgtcgccggaacaatccgaaccagattccacaaccacgttgcgacagtatcgcaagcgaggcgtgatcgttgggccacagggtccgctgcatttggccacaccggtggcctcgccatcgccctcgtcgtcaccctcctcatcgacggtggatcacataccgccggcatctccggctacgcccgcatcaccagctccgcctccgtcgcccgccgtcgcgtccacggtgcaagtgagcgagctgcgaacgagtcaccattgtctgtactgcgaggagcgattcaccaacgaaatttccctgaagaagcaccatcagctggcgcacggagcgctgacaacaatgccatatgtgtgcacaatctgcaagcgagggtatcgcatgcgtacggcgctgcatcggcacatggagtcgcacgatgtggagggacggccgtacgagtgcaacatttgtcgcgtccggttcccgcgaccatcgcaactgacgctgcacaagatcacggtgcacctgctctccaagccgcacacctgcgacgagtgtggcaaacagtttggcacggagagcgccctcaagacgcacattaagttccacggagctcacatgaaaacccatttgccgctgggcgtattccgcaacgaggatgccgcatcgaagtcacccagcaacaacaatagccacgccagcagtgacaagctggagaatccagctacgcccatcgaggagacacctttgacgccgatgagcagtggcggccacttgtaccacagcccagatgaataccccaattcggtggagagctgcgctggcaacagtgtggctctggaatcctatgccacaacgccataa

SEQ ID NO: 31902 - protein, 1730 aa, DROSOPHILA
MQISPDNLHDNMLPKWGKLNGTYMGYKRKINRDDGLPQEICRQCMAQFLMVAKFRRKCVRMQQRLQDFAQEISDRQTARQAKRQQKVQKKTHDRWLQLEPTSHEEQQPIRKRRMVSESDGDSTAAAAAAEAATATATTPAKQVRTDFESLPPPKPSPQQHRVRKYRTLSIDCEMERPAASINASSMPWKTKAARKELSENWASSCSTAVMSPNRQRSSTSSSEHMSDLSVGPCCGFESDSNPSSTSNSARRTVILVKQQSPEKTSPMYDLMPRRGRRPRKAPIYMPAKRQRRSLVRKEPLYRKAQPVNEENKKSDQKDIYPKESRMEGLAPSCDEAIDSTSDAPMEVASNVVQKKCDEICLNGLIDSRNQLGAMEMEPVNEMIASNGVDKELTLSVQNNKETTSEEQIFEATSVIKESVQPEQSAEDIQVRTEIESIANDIRAEADLVQSEELTSSTETSESQPKAVEQLESMGKQESYALPQNMEAHESVQQTQTVDESDSADQREIIVSIPLEVLDENLQRRLCVDPETEAANRQSADPKEFALRPDDVNNNENDENFCQSATADSFNSAVALRTNKIEATPPGGTDSDDTDTDEVPIVPSGPTPMDFMAEFAKHCANGIEQLKVTTPVPSPTPSDLVPLNDLEAKQKLEVEMNDVETTLNGILNEMQDQHMYTPNCAHIDEFLTPADYATLTEQESSVSSPPNPFEQSSVAEPKDEKPSATEDPFDNSNFTNELIGFQNDIPCFENIETPEEGQNLHLELTQFLRDLQPSQSDPPAGEQVEKIEMETQPSTVQMDVQSNLPVQAADTQPQNESANHSPFESPISSPQVQSQIELQMEPQIETQMQPQIETRMQHDVLSVQSPQNHQPQVQSHDQSQMQHQIPPQIEPQIEVQNQEQNTLQLVPQAQHQVVPHVQLQSQLVPHVQTQGTTTTVTYEQIYQQHIVQQTVQQSSNKMQVISLPSAGSETTRQWQTQQSQQQQQVQWSSVGGLEAIKSAPVESVAPTTTTYYISASDLYPQQTETYTMLQPASNESYVIEQVNHQQQHCQQQIQMSQQQHQRQHQQQQAQQQQQPIMILIQQPEIQQPVASASNPQQAPLHIYNAATSNDVHQMQHTQRQQIRQQYQHQQYQRLQQPQQTRVVQSHPVLGMPGATSISTKVTPIPVTAARGRPLTLKCRFCHNGPRFSSSLEYSRHIIDLHPAVAPFNCPHCPMAFAGRTKRSQHILSHHVVQQYQCGQCSHVFPAQKALDVHIQRFHMTLKTDPSGAVKVEDVQLQITSERRPRGRPYKPRLQLQQHQLQPQQKLQVQQHQQQQKALQQLPQAQHHQQQQQPQLQQEVLQQVQQLQVQVQPQQHQQHQQVLQVQQPQQQPLMQPQSPHPSTVEMQASPTTPRKILCCPDCEDCTSGHSHANEQFEELQTLQAPPTVLTPPSTIVSVPSPQPMVYSQHITMPSPEQSEPDSTTTLRQYRKRGVIVGPQGPLHLATPVASPSPSSSPSSSTVDHIPPASPATPASPAPPPSPAVASTVQVSELRTSHHCLYCEERFTNEISLKKHHQLAHGALTTMPYVCTICKRGYRMRTALHRHMESHDVEGRPYECNICRVRFPRPSQLTLHKITVHLLSKPHTCDECGKQFGTESALKTHIKFHGAHMKTHLPLGVFRNEDAASKSPSNNNSHASSDKLENPATPIEETPLTPMSSGGHLYHSPDEYPNSVESCAGNSVALESYATTP

SEQ ID NO: 31903 - DNA, 2404 bp, DROSOPHILA
ttgaaaaggaacagaagtacggaggagtgctcaagggcacactcatttcccgctttgagaagaacaagaccaaggacaccaaggatggactatttgccgaaagacagcccaagctgtatgcgcaggcggtaaaggagaagtgggccatgtacgggctgaaaggcggtctggagaacctacccaaaactatgcgaaagtacttaggtgagcgggatgtgaacgtgcagctaagcaacgaatgccggaacctgaccttcagcagctccggggttcgaatgaacatcaaggatgccgaagttccggtggagcatgtggtcagctccctgcccgcctacaaactcgcgcccctggtaaagcagcagcatccctcgctgagcgcccaacttttgagcattccgtacgtggatgtgctggtagtgaacatgcagttccccggcaagctactcaaacaagacggctttggattgctagtgccgccagtggaaaagttacctctgctcggcgtcatcttcgacagctgctgcttcgacatgggcgagaacactgtgcttaccgtgatgatgggtggccattggttcgaccagtggttcggtgatcgtccaagccccaagcagattcttgacttagccaccagccatgtgcagaaaatgctgcagatacgcgaggaacccaaattcagtcgagtgcacacgctgcacaagtgcatcccgcagtacactgtgggccacaagcggcgcgttgaagccattcggaactacatcaagacctacaaactgccactgtctgtctgtggagctgcatacgatggcgtgggcatcaacgatgttatcctatccgcccggcgacaagtggaagccatacccttgtcctaaatcaaccattcccttctagcacaccctcttttccattggtgattctgttgtatttgcgtaagctggttttgtgaatagtaaagtaggtcctttgtacatagaatttgagttctgttccttctgtgtttttacttgccgtggcctcccaggcacggcggactcttctccggctcctgctccggttcccactgcttgggtgtcttggcctcaatggacagggcgtgcataaactcgaagcctgcttccttcagcgcattttttaccgtgtcattaaccaatcgatgacgctaagggaaaataaacctcttaataaatagaacggaaatccacggatttaacataccttgatgagcgtcagatcgttgaacttctccgagacgacgaacacacggaagtgggactccgaccgcttggggacattgtgctggggcgattcgttaatgacctccagatataccggcttcagctccgtgtttagtgcttttcgcatggcagactcgatgggcggatactgtcccgcctcctgcgacatagtggctctggggaggatctgtcctaagctgctgattgtgggtgtcagttgattcaggtttcgtatggaaactccagtgagtcggcgaagagtgaaatttaacatgattccagtatgcttctcgcacagctgtttacaattacataaacaactggcagccagagttgccaagtgcgggatgaaaatcaacttatcgataacgccaacgataaccacttttcaaaagaatgtttgcaacggtgaaaacaaaatataatattaaaattagtttaatttgctgcagttaagcacaaaaaagggtaacatatcttttaaaaatcttatcaagtagggcataaaaaaatgttaaataaaaataaattaaatgtacaaaaaagttgtaacttcaatactatgcgctataaatattttattgggggcagaatcaacagtgagcgcaaaacacgctccagaaataaatcgtacatctatgtataaacaatcgagcgaatatcaaatgtataatcaagtgaatagaaaaacgtcttcttcacaacggttttgggatcaatagtcaaccagtttcttgagctttggcggggcggagatgacgacgcgtcctcgattcgaagaaccactgccgccatggccgtaatccgcctcccggtcgcgatcacgaccacgcaaccgttcgttctgctgctgatgctgttgcctgtactgttcccgctcgcgattccgctcaatgctgcggtcccgctgcctccgccgcctggactgactcctccggctgcgggaacggcgccgatcacggctgccactgcgccgtcgactgtgggaacgtcgcttccgctccacgcgacttccgcttcgggagcgcgaacgctgcctacgattgtactttggactgggcgtccttgtgcgtctcctcctttccgttcggctgctgctccgtctgctgtgctgtgtttccggcggtggcgaccgcctacgactctccgatctgctgcgactgcgacgc

SEQ ID NO: 31904 - DNA, 348 bp, DROSOPHILA
atgtcgcaggaggcgggacagtatccgcccatcgagtctgccatgcgaaaagcactaaacacggagctgaagccggtatatctggaggtcattaacgaatcgccccagcacaatgtccccaagcggtcggagtcccacttccgtgtgttcgtcgtctcggagaagttcaacgatctgacgctcatcaagcgtcatcgattggttaatgacacggtaaaaaatgcgctgaaggaagcaggcttcgagtttatgcacgccctgtccattgaggccaagacacccaagcagtgggaaccggagcaggagccggagaagagtccgccgtgcctgggaggccacggcaagtaa

SEQ ID NO: 31905 - protein, 115 aa, DROSOPHILA
MSQEAGQYPPIESAMRKALNTELKPVYLEVINESPQHNVPKRSESHFRVFVVSEKFNDLTLIKRHRLVNDTVKNALKEAGFEFMHALSIEAKTPKQWEPEQEPEKSPPCLGGHGK

SEQ ID NO: 31906 - DNA, 2819 bp, DROSOPHILA
tatatggcttatacgatattcacgcttcgctctcttcgaggaagtcaaatcgaaccacttaagccggacacttgagcggacttagcgtacattctacaagtgcacaggaactagtttttattgggtcaatatttggcaacatttggtgtgctgaaatcacaacagtcgaattcttgcacaaatgggaaaactaattttgggttaagcgaattggctaatcttatgggtggctaccgctaaattaaatgcacaatttggattaacgggcatcattaaaactggaagtccgtaaaataggtaattgggaaatcaaaaattttcagaaaaatccaaagatgaaatcttagttgcaagcatgtgtttatatatttaggattttcactttcattcctttttaaaaatgtataataacaatgcaaatcacaatgtatatattaactatcaaatcaaatcaaaaaaattataccttttgcttttgattctttaaattcgctctgcttcatcccatcaatctcttttgatcatttacaacactattctttgattgtaattctacgattgaactcatggtaccgaattcaagtttgttgcctaagtctttcgtttggccagcacatttttttgtccaactgggcttaggcatccacttgtatgcgtgtggacatgagtctgccagcaagtgtttggccaaaaataaacggcccaaggacctcgacatgtgtctatggaaactgttgcaattgttgttcaaatataaacaaacgatatgcgagtgcttagctgagccggctaacggtatatacatatggtatgatgattggtgataaagtaccagaccataagtgtggaaaccggttgtcgccagtagtctctcaacattcatcgggcacgcaatcagtttggggaatagaataatctgaaagataagtaattatcactgaaatcatcggaaaatctagacgcaatagtttccaaaatgcacaaatgctattgtggcgtaatgagatcgggaagtgagcggcagtcgcaacatcttgcgctcaatcgagatcatcatccacgtggcgatctcaggtcggtgacctcttcttccagacaaagcctacgacccacccaatttataaaacgtccgagcgtaaagaaccagcccagatttggcctaggccactccagcaccgagttggtcaatgacttcagtcgccggaactccacagccaccacggtgagtcactgctccagctgcagctgcagctcctcccagcaacgtcagcagagcagggccaaggttttgcgatggggctgggaacgaacaggaggtattgacacctcgaacacgaaccatcatgaaaggtacacggacaatcgtcgcctttacgagcagagcgcatgcgtcgccagtcgccagaggagccaaggtcagggtcaggtttacagtggcaactcgacgccatcgccacgcccagttcagtatcccaaacaacaggcgaacgatgagctgcagcaactgaaggccctgcagcacttccgcctgatgaacacaagcgaatgcttcagtgatgtccgccaggataagctgcgcctgcagcgggcatatgataaaatcattttcaacaactcggacaagtggaacaaagatcgcgccaatgagagcaggcaacaggaagtgacgaggagcagcagcagcagcaccaccaccacaccttatgccttaaggcagaagttgctccagctgaggctccaggaggatgagcgacatggcaggggcacgggtggcacatgtgctcctttgggaaagagttgctcactgcgatataactaaacacaaagtgctatacaaagtaaatttagtgcaatatattaagcaacataaagtaaagttataaataagattttaaagtcctcgaaatgctttagattgtaacaccaactatatagacaataaataatagatttgcttttttaaacaagaaactaacatgcatttcactcaagtaaaaacacatctcgaatttcatatttattgctagtatgtatttcaattttttttttaataaaacagtgctattttgttacaagtgcttcgtcattgtgttcattttgtttaatttgtatttttttgtttcattttttagctcttttttaaatgatttttttgtttgttatttttttattgtattttattttttttgcaatttacgctttgaatgcattataaatttaccccatctgtcttttctaatttccttcttggggtcaattacactttaattttacgatattacgttatagatttcttatgacttgtgttttttgggggttgaaaacagccgatgtcgtactggatcgcattattacaagtacatatatagtcgtaaatatacgttgaattcattacaacattgaacagagtactagagtgtgaaatagaagaggactcatgctttgcttttggttttgtttttttttttttgtccgtaggttacacgattgttgttagtaggttgcttggttgtcgggcggggattggattggattggattatacaaacgaaaccattttgggtaacttgcgtccggctgcatcgctccggatcgctgcctgcctgcctgggcataatacttgtaattgaatgtggcggcctttagcactagaatgttgcgacgttagtcgtagaatgcaaaatacacaaaagtgtacacttgtacgataaacagtgtttgtgtctgtgtttgttgcgctgctgtttacaaatattttattacttgcttatttttgtttcgatttttttttctatatttcgtgtgagtttcacatgcact

SEQ ID NO: 31907 - DNA, 819 bp, DROSOPHILA
atgagatcgggaagtgagcggcagtcgcaacatcttgcgctcaatcgagatcatcatccacgtggcgatctcaggtcggtgacctcttcttccagacaaagcctacgacccacccaatttataaaacgtccgagcgtaaagaaccagcccagatttggcctaggccactccagcaccgagttggtcaatgacttcagtcgccggaactccacagccaccacggtgagtcactgctccagctgcagctgcagctcctcccagcaacgtcagcagagcagggccaaggttttgcgatggggctgggaacgaacaggaggtattgacacctcgaacacgaaccatcatgaaaggtacacggacaatcgtcgcctttacgagcagagcgcatgcgtcgccagtcgccagaggagccaaggtcagggtcaggtttacagtggcaactcgacgccatcgccacgcccagttcagtatcccaaacaacaggcgaacgatgagctgcagcaactgaaggccctgcagcacttccgcctgatgaacacaagcgaatgcttcagtgatgtccgccaggataagctgcgcctgcagcgggcatatgataaaatcattttcaacaactcggacaagtggaacaaagatcgcgccaatgagagcaggcaacaggaagtgacgaggagcagcagcagcagcaccaccaccacaccttatgccttaaggcagaagttgctccagctgaggctccaggaggatgagcgacatggcaggggcacgggtggcacatgtgctcctttgggaaagagttgctcactgcgatataactaa

SEQ ID NO: 31908 - protein, 272 aa, DROSOPHILA
MRSGSERQSQHLALNRDHHPRGDLRSVTSSSRQSLRPTQFIKRPSVKNQPRFGLGHSSTELVNDFSRRNSTATTVSHCSSCSCSSSQQRQQSRAKVLRWGWERTGGIDTSNTNHHERYTDNRRLYEQSACVASRQRSQGQGQVYSGNSTPSPRPVQYPKQQANDELQQLKALQHFRLMNTSECFSDVRQDKLRLQRAYDKIIFNNSDKWNKDRANESRQQEVTRSSSSSTTTTPYALRQKLLQLRLQEDERHGRGTGGTCAPLGKSCSLRYN

SEQ ID NO: 31909 - DNA, 2738 bp, DROSOPHILA
gggggtagttttttggagacgccggttgctgctcggactctcgatgatcaggatggatgagtcgtcatcggacgatgcgtcatcctccttctcatcctctgcatcggtgctggcacatccacagctggttttccttttgcgcttgcccttgcaacagggtttgttacacccgctctccattcggttttctttgtcctccactatgggcgtttgtgttcccgccgaggcacgtccctccgcatttaaattcattgtgtttgtggtccgcaactcaacgctggctttagccgatcttttcaaggcctgcttgcgacaccttcggattttgtcgattctctcttgcctctgctgctcgatgcgttcgttctcctcctttgcggcgcgatgggcggcgcccacctggaaaatggccgaacggtagtcctggtgctttttgaccaaaacatgctcacgccacgcatttagctccctttgcttgacctgctctaatttgtggatttgacgcctcttttcggcagccacatcctcgcgtatctggcgtgccaggtggtttgacttctcccgcacctggttataaaattaagtggtcacgctttgtgttacaattactgcgcaatgggctcggaacccaagggacaagttacctgcttcaaacgggttatgcgacgctcactttcgagatctttgcgtacttgctctggatcgtccagtggtcctatggtcctcctcaggttggccccgaactttccatttactgttagctgcagagccatctgctctatcgatatatgtaataaattcgtatgtggggcagcatttacgcagtagaaatcgaaacaagtttgagcgtaaaatcaaacaacccaacgtctttaaaaattcctcccaagcggcagtgtgaccgtagatgaataattgaatgtactagaatttacatgcgtctaaaatataccagctggtaagtagcacgcactcaaggcacaatacaaattcggaaattaaatgatcgaaaaactacgtgtttttttttaaattataaaatttaatgaatgcaatttgaaagctacatgacaataaactcagtttgaaaacgaaaacatcacaacagcatgtacacaagcctagatggcccagttgggatgtatcgaactatcgacacctatcgttatcgtgcgaaatcagctgaaattgtttggattacgagatagtaaatagaaatattgaaattacattttttggctgtgaaatcgtaaaattatggcgttcctactgcgacaagtggccaggagcggattgcaaaggtgaaataagctaggaaaaattgcgtgacaaatcccacaataaatgcttgatcttccatagaaatctaatcctaatgcggcatgcaaccgcttccacatccgcgaatcccgaacttagtgtccaggtgagcgagagctgcttgaaacggctccgtgagatctgcgtggatggatctttcctgcgtgtgaccgtcgaaggaggcggatgctccggctttcagtacaaattcgatttggataagcagctgaacgaggatgaccgacagtttggcgaggctgaggccaaggtggtgatcgatacagtctcgctggagtactgcagcggcgccaccgtggactaccatagcgaactaatacgcgccggtttccggatggtggccaatccgctggcggaacagggctgctcctgcggctcctccttctcaatcaaattgtaaactttaaactttagagaattatttaatacacatagaatgttcagttatatacacgtcgagggtggacaataacaaaacagggtagagggggagcgggcgttcccagttagttattttacaacaatatacagtaaagcagctgggcgggatgcgcgccgctgtccatgctcatttgcaggcggccagctggtcactcaagctgatgacctgctccgtcagcacgctgatttgctcctcgtagttaatacgcgtcgtagtctaaggaaatccgagatgtcacttggttctaagagcacaaaactgcaggcacaactcaccaactcctcttcgagcatttgcagggctccacccaaactggccaactgatcgtccttggccttaagttcgtgcgttgcgttctccaggcagttttgcaggtgctgaacctccagctcgtaggatcgcaacttggattccgcttgcactttcagtcgcatcagatcctcgaacttcttgctgaacacactgtagatgagctgctccttggtgggcggttcggggggatcctgcagcgaatcccgcgcccgctggctgcctttcgcctccgactctgccggtcgaacggtgacgcccgccgccgccgtgctgcagctgcacgtgctgagatccttgctggggttcgagacaaatgcttgatgcagcttggccacttcgaattgagccctccaatgcgccgcctccttctcgagcagcgcaatgcgatcctcggaggtgagttggttgctattcgactgctgctggagattgtgtagaggagtagtatcgctgccggtggcgctcagtgcgtcctcgctgccaagctgaaagcacgcgaatctttgggtaaatatttaaagagagatctcaatattaccatgctggccgcatcaaccagctttgtttccagctcgctgttcctgtgctgcagcgtttccacctccttcctgagtcgcttctccagttcgttctgatcgccgatgcg

SEQ ID NO: 31910 - DNA, 677 bp, DROSOPHILA
aaatgatcgaaaaactacgtgtttttttttaaattataaaatttaatgaatgcaatttgaaagctacatgacaataaactcagtttgaaaacgaaaacatcacaacagcatgtacacaagcctagatggcccagttgggatgtatcgaactatcgacacctatcgttatcgtgcgaaatcagctgaaattgtttggattacgagatagtaaatagaaatattgaaattacattttttggctgtgaaatcgtaaaattatggcgttcctactgcgacaagtggccaggagcggattgcaaagaaatctaatcctaatgcggcatgcaaccgcttccacatccgcgaatcccgaacttagtgtccaggtgagcgagagctgcttgaaacggctccgtgagatctgcgtggatggatctttcctgcgtgtgaccgtcgaaggaggcggatgctccggctttcagtacaaattcgatttggataagcagctgaacgaggatgaccgacagtttggcgaggctgaggccaaggtggtgatcgatacagtctcgctggagtactgcagcggcgccaccgtggactaccatagcgaactaatacgcgccggtttccggatggtggccaatccgctggcggaacagggctgctcctgcggctcctccttctcaatcaaattgtaa

SEQ ID NO: 31911 - protein, 139 aa, DROSOPHILA
MAFLLRQVARSGLQRNLILMRHATASTSANPELSVQVSESCLKRLREICVDGSFLRVTVEGGGCSGFQYKFDLDKQLNEDDRQFGEAEAKVVIDTVSLEYCSGATVDYHSELIRAGFRMVANPLAEQGCSCGSSFSIKL

SEQ ID NO: 31912 - DNA, 4635 bp, DROSOPHILA
ccagtattgttttgatattttttctttcattttttttttgttttgctgttctattcgttgttttgatgggcaaaacaaaactgttgatgatttctctgactttttgctttcgaaaatttgttgttcaccaaatcagttgaaagtatagggtgtcgtcggtaggggaaaagaggggatcaggcctatcatttgttgtttttcctaccttttggctcgccttaaaatcggcgataaccataacaataacaaactttgaatagtgttgagttgcctttcggatttgcaaattcttcaggtttcaagagattacgtttatctgtttagttttcagtggtatacgaagttgttttgacttcagtttataagtcaaaagggataagataaatgatatgatgaatagggaaagtcacagttcctaagagagacgactaacttaatttaatcttatcatgattacttaatttactcatgtagccctgcccattccccatcacaactgatggagcatagctatggacaatatggcaatggacatatgacaaatatgtttttatttatattatctatgcaatcacgtgttggtgccgccaacttatggacacgtgagcccatcaattataatcttttcttgggttcggctttggctttggttccggctagatagcagctgcatatggggtgcttagcataaatgccaacaccatcggggaattgggctgaacttaaaatgacccattggaaaaccagtaactagccaatgagattggaagtgagaatgctggctaccatcaaggttgtctggtcaatattaaagtcataatatattcgtttaatgagctgccgtctctgctttcaatgcaactggtctgattcgcattcgtttttcttacctactttcagatactacaagataaagtcgggcctgggcgcccatctagagagggagaggaagaagtagctataatcccagaccacagcgggactgcccgccatagatacaatgacagagaatcagctgtatcccatgtcatcggagttctttgacaccggctcgaacagcagcagcaacacacttaaatacgatctgtattccctgggctccaccgttgtgggggcggcgctgcccacgttgacgatcaacacgggctacggcagcagcagcagcaacaataacaacactaataacaacaataacaacagcagtagtcacagcagcagcagcaactgctccaccagcaccacaaatacctgtaatgtaatgctaagtacaacggccataacaataccacgcagcagcaaccacaaccagatccatcatcatccgtatcagcagtccgatttgcagacaccgcgccatcatcccagtcctctacacacgttgcccagcatgacccatcagcaaaatcagcttcagcagcagcagcagcagcaacaccacaaccaacagcagcagctgcagcaatcgcatttggcactgggagagctttcagactttggactagatgcactggatgccgcttcgctatcgcccactctgctgcaggatgtgagcctgagtgctgtttctcctctaagcaccacactctacaatggcaacaccagtggagcaggcagcagcaacggaataggatccggcagtggtggctacttcacgcccgacatgtcgcacagcctcagcctgaatgtggtcagtgagcaggttctgctgcaggaagccacaaccccgaatgagttgctctacgagatgacacccaactcgaatgccatgtggagtgatatcagcagtgccattatccataccaaacacgagccattcagtctggacgatgactatatctttcccaacgataaggccgaaatacaggcagccgatttgtctgaccttaatggcggcgattttctggatgtgatcggaaatatagaggatttcttgccgcagaccgcagtcactcaaagtgtcaatttcctactgtcgccgcaagctcaaggacaggatgccctggtggcaccgcccatggaacttttgcaacagcaacaacagaatcaccagcagctgcaggtcggcagcctgccgcagttgcaaacgctgctcacgctttcccagcagcagcagtcgaacagttcctccactagtccgtatgagatctatcacagtacgccccaaaagccgcagcagcaacagctgtccgccagcttctcgcccggcagtcaggcatcccaatcgccattgaccccaccgccgccaccgcacgccaatcgaccccagtaccagatggttaagtcgcgcaacatgcaggaattgatcaagaagggctttcccatgtcctcgccgccagaacgctcgatcctaagtcagtccgccgccttgagtccgggtggtagcagtggttttggcagctcggcttctggcaacagtacaactaccagtaatcagacatccggatcagccgtgcgcaaatcgtttggctaccagagcgccgttgagaactcccagctgagtcgcctcagctcgtcggctccgacgcacttgggattggagcacatctggatgcggcgggagccacgacagcatttactctccaccggctcgctggccgaggccgagagcttctcttcactgagcacgggcagtgtcttgtccccggatggcattgacttctcgcaggacgatgaggatgacaattcgagtgagaatagcgataactacgacgattgtagcagcgacaatggactctctgaggatgaagatgaaacgcgtacctcgacaccaaaccatttgtccagtagcaagggcaaagagcgatttttctggcagtacaatgttcaggccaaaggacccaagggaaagagactggtctttcaatcgaagctcgaggatcctcatgtgctgaacgaggtgacagaccccgtcttcagtccaacgtgctccgtgcgaggcattaaggtgtacaaggtaaactgaatgataatatattttaaattgtttgtgctacaataatttcccttcttttaataaacagcacagtggcaaggcccgcaagggcgatggtaacgatttaactcccaatgccaggaagctgcacaatattggcaaggaactggacaagctaagccgcaccatcaatgacatgactcctgtttccgagctgccattcaatgtgcgccccaagtcgcgcaaggagaagaacaagctggcctcacgcgcctgtcgcctgaagaagaaggcgcagcacgaggccaacaaaattaagttgttcggccttgaaattgaacacagtgagttcaatgtgaaagctgtggaaatatcttataatccttcaattttcgttttatagagcgcctcatgaatggtatagccgagctaaagcaggccttggtcgtcaagcatcgcaccaagaacctgggcgaatccaccgaggaggtggaccaacaaattgcacgcatttacgctaccgcctcttgtatgtatagcttatcctactataatattcaattgtactaatgttatattaatcaaatttgcagctggaatccgcattgcgggtggttcaacggattttgtgaacaaggtgctggagaatatgcgcggcggcatgccgaatggaggcctcgaggagctgcgtaaatcgtcgtagaccaaacgaggacagaaatgtaaagctaacgaaccgcccatcaagccaactttttatccacaccaccaacaactgaaaccaattctacgacaggatgacaatttgattttggaatggaatcagtcgaaaaacaggaaacattttcttgagctcgcaattagtcgagaaaattctctattgaacctccttccctcctcaaaaacacaacgttctgttaaattgttctacataagtgatataatattgataaccaagatataactgtgattcaaagagcctgggctttatatgttttgtatggcagaaaattgaagaaaatatttttgactttttcgcgaccacgccgaaaccggaaagccagagccaaacaaacgtaaacaaaagaaaaacaaaattccttttgaaaatgcaacattaacaaatagaaagaaacaaaacaaaacaaacacgtaaagaaagaggccactacaaaactgaaaagaaaatgtgaaaaatacaaaatttcgtttagccattaagattgttaagaatcagagtgttagatgtagatgagcaagtgaattttgtagggctttgctaccagttttacctgcttaatgaataagggtaaaacattcatatgattggattggaagaatatatcgggaatgctaaaaattattggagtataagttaaatacaactgcgatttatctgtttaagttttaaatgctatattaacgatgtataactttggttcaatgttttagtcataggtttttacatttaactcaatgtggggagagagcttttaaatagatcatacgaacctacatattacatttatcggttattataattgttttggccctctcatccaatatatacatattttatggtcctaggttgtcttttttaagttttccattttgttaaagaaagttcgattgtttccaaatgagaatgttttgcgaaactttattaatttacttaaatgctataactatctatacatatacat

SEQ ID NO: 31913 - DNA, 2445 bp, DROSOPHILA
atgacagagaatcagctgtatcccatgtcatcggagttctttgacaccggctcgaacagcagcagcaacacacttaaatacgatctgtattccctgggctccaccgttgtgggggcggcgctgcccacgttgacgatcaacacgggctacggcagcagcagcagcaacaataacaacactaataacaacaataacaacagcagtagtcacagcagcagcagcaactgctccaccagcaccacaaatacctgtaatgtaatgctaagtacaacggccataacaataccacgcagcagcaaccacaaccagatccatcatcatccgtatcagcagtccgatttgcagacaccgcgccatcatcccagtcctctacacacgttgcccagcatgacccatcagcaaaatcagcttcagcagcagcagcagcagcaacaccacaaccaacagcagcagctgcagcaatcgcatttggcactgggagagctttcagactttggactagatgcactggatgccgcttcgctatcgcccactctgctgcaggatgtgagcctgagtgctgtttctcctctaagcaccacactctacaatggcaacaccagtggagcaggcagcagcaacggaataggatccggcagtggtggctacttcacgcccgacatgtcgcacagcctcagcctgaatgtggtcagtgagcaggttctgctgcaggaagccacaaccccgaatgagttgctctacgagatgacacccaactcgaatgccatgtggagtgatatcagcagtgccattatccataccaaacacgagccattcagtctggacgatgactatatctttcccaacgataaggccgaaatacaggcagccgatttgtctgaccttaatggcggcgattttctggatgtgatcggaaatatagaggatttcttgccgcagaccgcagtcactcaaagtgtcaatttcctactgtcgccgcaagctcaaggacaggatgccctggtggcaccgcccatggaacttttgcaacagcaacaacagaatcaccagcagctgcaggtcggcagcctgccgcagttgcaaacgctgctcacgctttcccagcagcagcagtcgaacagttcctccactagtccgtatgagatctatcacagtacgccccaaaagccgcagcagcaacagctgtccgccagcttctcgcccggcagtcaggcatcccaatcgccattgaccccaccgccgccaccgcacgccaatcgaccccagtaccagatggttaagtcgcgcaacatgcaggaattgatcaagaagggctttcccatgtcctcgccgccagaacgctcgatcctaagtcagtccgccgccttgagtccgggtggtagcagtggttttggcagctcggcttctggcaacagtacaactaccagtaatcagacatccggatcagccgtgcgcaaatcgtttggctaccagagcgccgttgagaactcccagctgagtcgcctcagctcgtcggctccgacgcacttgggattggagcacatctggatgcggcgggagccacgacagcatttactctccaccggctcgctggccgaggccgagagcttctcttcactgagcacgggcagtgtcttgtccccggatggcattgacttctcgcaggacgatgaggatgacaattcgagtgagaatagcgataactacgacgattgtagcagcgacaatggactctctgaggatgaagatgaaacgcgtacctcgacaccaaaccatttgtccagtagcaagggcaaagagcgatttttctggcagtacaatgttcaggccaaaggacccaagggaaagagactggtctttcaatcgaagctcgaggatcctcatgtgctgaacgaggtgacagaccccgtcttcagtccaacgtgctccgtgcgaggcattaaggtgtacaagcacagtggcaaggcccgcaagggcgatggtaacgatttaactcccaatgccaggaagctgcacaatattggcaaggaactggacaagctaagccgcaccatcaatgacatgactcctgtttccgagctgccattcaatgtgcgccccaagtcgcgcaaggagaagaacaagctggcctcacgcgcctgtcgcctgaagaagaaggcgcagcacgaggccaacaaaattaagttgttcggccttgaaattgaacacaagcgcctcatgaatggtatagccgagctaaagcaggccttggtcgtcaagcatcgcaccaagaacctgggcgaatccaccgaggaggtggaccaacaaattgcacgcatttacgctaccgcctcttctggaatccgcattgcgggtggttcaacggattttgtgaacaaggtgctggagaatatgcgcggcggcatgccgaatggaggcctcgaggagctgcgtaaatcgtcgtag

SEQ ID NO: 31914 - protein, 814 aa, DROSOPHILA
MTENQLYPMSSEFFDTGSNSSSNTLKYDLYSLGSTVVGAALPTLTINTGYGSSSSNNNNTNNNNNNSSSHSSSSNCSTSTTNTCNVMLSTTAITIPRSSNHNQIHHHPYQQSDLQTPRHHPSPLHTLPSMTHQQNQLQQQQQQQHHNQQQQLQQSHLALGELSDFGLDALDAASLSPTLLQDVSLSAVSPLSTTLYNGNTSGAGSSNGIGSGSGGYFTPDMSHSLSLNVVSEQVLLQEATTPNELLYEMTPNSNAMWSDISSAIIHTKHEPFSLDDDYIFPNDKAEIQAADLSDLNGGDFLDVIGNIEDFLPQTAVTQSVNFLLSPQAQGQDALVAPPMELLQQQQQNHQQLQVGSLPQLQTLLTLSQQQQSNSSSTSPYEIYHSTPQKPQQQQLSASFSPGSQASQSPLTPPPPPHANRPQYQMVKSRNMQELIKKGFPMSSPPERSILSQSAALSPGGSSGFGSSASGNSTTTSNQTSGSAVRKSFGYQSAVENSQLSRLSSSAPTHLGLEHIWMRREPRQHLLSTGSLAEAESFSSLSTGSVLSPDGIDFSQDDEDDNSSENSDNYDDCSSDNGLSEDEDETRTSTPNHLSSSKGKERFFWQYNVQAKGPKGKRLVFQSKLEDPHVLNEVTDPVFSPTCSVRGIKVYKHSGKARKGDGNDLTPNARKLHNIGKELDKLSRTINDMTPVSELPFNVRPKSRKEKNKLASRACRLKKKAQHEANKIKLFGLEIEHKRLMNGIAELKQALVVKHRTKNLGESTEEVDQQIARIYATASSGIRIAGGSTDFVNKVLENMRGGMPNGGLEELRKSS

SEQ ID NO: 31915 - DNA, 4017 bp, DROSOPHILA
gcacaaaatgcaacatcctggcagccatgtgatgccaatgccgattccctatgccgattccacacaaaaaggctgcagtaagagccctcgaggactttccacttagtctcctgaagagaacgcgccacttcagagttttcaggaagtaagacaaataattgccgtggctcgatttaatccgccatttaagcgcatttaagccgcttattcggctgcttagtacttacgttttctaggaaacagaaacattcacccgaagttaatccgccgccgataacgccgccgccagcaaaataaggccggcggcccaattaacaacgcccatgcaacacgataattaggtgcaacttttctcttcttcgatcacataacgaaagttaaatgtaaatgggctttggaattcacaaatttttacgaaattttcttttctatgcgtttcctgcgaaatttctctcagcggaaaacacgctgtggcgagtttgaaggcttcaccaggaatttgttgacttgtcagtgcgcctcgaagttagtgatgcgcaggcgaatggccgcaaaaataatcgcatgaatttgggcaaattggtaagcagagtgcactcgtctattgatgagcagcagttttattcaggcaattaggtgcattgaaaacttccaagtgtaaatatttaccttaattccataacataactgccttatcgaatgcttttggttaacagttagtcactatggcgcgcagaataattgatttaaaaatttgaagcgcaatattacgttttaagaatgtaatgatcaataaatggcaagaaatcaaatctacataataatatatgctatcatattgaagaatgtaatgaaaaacaagcttagtttatataattaattaaatgacaagtgcatacacgctggcgttgccagactgctgcacattgttaactgcgtgctgttaagcgcagcctaacagcactcaagcagtgcgtggcatttcgacacatactatgaacggtaacattgagcacataaaaaacgtaaacaattcattgtaaattacaatttcccgcttttattgcacaaaaatgtccatgcaaaaggccaaagtcatcgaccagaaggagtacctcaagaagtacctatccggcgacaaggagaagaagaagaaaaagaaggagaagaagcacaaaaagaattcggccaacaccaaagtgaaaatcatcgatgacgacgcctacgaaaatgataatctggaaatggacgaagatctactgctgggcggcgaggatgcgcctcaaattgtgggcgagtacatcgaagaggatcccaatgtgcgcagcaagtggcgcaacattgccgtcaaggatgaaatcaaagaagagcacgaggaatcctcgccagcaactggcattcgcatcaaacaggagcccttggatgaggagcaggagatgtggggacgcaaggcgacagttgttaaggttaaggatgaattctcaccatccagacgaagttcacccgtcagaattaagcaagaaaaacgcagcagctctagggatttaagcccagcgagatcgagtaagccagcaaagcgagaagagagtcctcaaagggggcgaagaagggcgggaagctcagatcagagtcccaccagacgagggcgagatggcgatcagtctccgccacgccaaaagcacagggattccgatcagagtccaccccgaaaggccaggaatggcaatcaatcgccagtcagaaaaaggcgggattccgaccaaagtccgccaagaaaacgaacgggaaaagcatcacccactcgaaggagaagggattccgatcaatcgccacccagacgccgcagaagtaactccgatcagagtccgccaaggcgacgtagagacaaggattcaactccgcccagaaggaggaaagattccgatcaaagcccacctcgaaggcgtaaagcagacgatcaatctccggtgcgaagggaaaggaaagactccgaccaaagtccgcctaggaaacggagagacaatgaccagtctccagtgcgaaggaggcgggattcagatcaaagcccgccccgaagacgcagagatgacaagcaaacgccgccaaggaggagaagaaactccgatcaaagcccgccaagaagacccaaggatgtagatcaatcgccaccgcgaagaaaacgagacttcgaccaaagtccaaccagaaaacgagacaaatcaccacgcagacgtcacgactccgaccaaagcccggccagaaatcacagaagtcgagagcgcagtccaccgcctcgtaatcgcttcaaggaagaaaggaaaagtcgctgggccaaggcatcgcccagcaaatcagcatctccacctccgacacacaagccgaaatccaccaagacactagatggcaagaaagctggactgcaggatgcgaaatcgctgaagaaggaaaccgacgaaaggcgtcgacaagaacatgaactattcgagaaaatgtccagcgaaatttccggtcgtgatggcgatgtgcaggtgcgcagtactcgcagaaagggacaccgagcacgagatgccgccaatgaggatcccgccgagcagggccgcaaagaggagcacgagaaaaagaagaaggaactgtacgatcgctggggcaaggggttgaagcaaatagaagatcacaagtcccgcctggaggagatggtccatgaggcctccaaaccggtggctcgctatgccaacgacgaggatctggacaggcatctgcgcgaacaggagcacgccgacgacccgatgctggagtacatgcgccagaagcgcaagaaacgcgaccagcaggacaacaagccggtgatgcccaagtacgagggcagctttccggagaaccgatttggcatccgaccaggatatcgctgggatggcgtcgatcgatccaacggctacgagcagcgttggttcgacaaacagaacgaacggcgggccgtgcaggatgaggcctacaagtacagcgtggaggatatgtgaatgttgcaagcgttgtttgctttcgtgttgcaataaagatgtaggcactgcctgtaaaaaagaaaagagcaattacattgatcgttttctttgttttattgaattattttggaaaataaagaatgtaaataggtaatataatatttaatatttatttacaaaaatttgattttcgaaatgcccgccactttcccgccaaatcgacgtgccacctgcaacactggtcgccagcgcaatgcaaccctgtgtgtagaatagcggagcaaaagcgaatggtaaatagtcttcatctacacctgcgacctgctcgtcgctcccaaaaaatcgtttcaaaaccacggaataaaccgtgtaactggggaaaacccattgtaattatcaagtttaaagtgtgccgcacattttggcttcaaaaccagaataggtaagtgacatcatctgctaaatagaagcattctaagatttttgctttgtaagcaatagagtatcgatgtgtgtgtgtgtatgtaaatggttctgcttttggttgctttgttgctgctttcgttacagcgaacaaagcgtaagcaactgtatatgtgtatcgagtgggacgccagtggtgtgtgtttgttgccccgcccccaataattagcataaaactctcttaaccacaacaaaaacaccacagtcgtgttggtttgtgcatttgtggattgggatttcggtggttttcctttttttttcagctgctttgcctgcccttcgccttcagccgcaattgtcggtcagccgatgaaaaaccagtttgtttgtttgttggcttgtagctgctgctgctgcggctgattgttgtgattttgttgttgctgctggtgctgctgcactgcaatttgcttggcgcaaaattggcgccaaaagcttttcagctgcagaaacgtgtggaaatgttgaaatgtgtacgtaccattccaatcaggcatttggcgcatgcacgcgcctgtcgctcgctgcagcttcc

SEQ ID NO: 31916 - DNA, 2017 bp, DROSOPHILA
cggtaacattgagcacataaaaaacgtaaacaattcattgtaaattacaatttcccgcttttattgcacaaaaatgtccatgcaaaaggccaaagtcatcgaccagaaggagtacctcaagaagtacctatccggcgacaaggagaagaagaagaaaaagaaggagaagaagcacaaaaagaattcggccaacaccaaagtgaaaatcatcgatgacgacgcctacgaaaatgataatctggaaatggacgaagatctactgctgggcggcgaggatgcgcctcaaattgtgggcgagtacatcgaagaggatcccaatgtgcgcagcaagtggcgcaacattgccgtcaaggatgaaatcaaagaagagcacgaggaatcctcgccagcaactggcattcgcatcaaacaggagcccttggatgaggagcaggagatgtggggacgcaaggcgacagttgttaaggttaaggatgaattctcaccatccagacgaagttcacccgtcagaattaagcaagaaaaacgcagcagctctagggatttaagcccagcgagatcgagtaagccagcaaagcgagaagagagtcctcaaagggggcgaagaagggcgggaagctcagatcagagtcccaccagacgagggcgagatggcgatcagtctccgccacgccaaaagcacagggattccgatcagagtccaccccgaaaggccaggaatggcaatcaatcgccagtcagaaaaaggcgggattccgaccaaagtccgccaagaaaacgaacgggaaaagcatcacccactcgaaggagaagggattccgatcaatcgccacccagacgccgcagaagtaactccgatcagagtccgccaaggcgacgtagagacaaggattcaactccgcccagaaggaggaaagattccgatcaaagcccacctcgaaggcgtaaagcagacgatcaatctccggtgcgaagggaaaggaaagactccgaccaaagtccgcctaggaaacggagagacaatgaccagtctccagtgcgaaggaggcgggattcagatcaaagcccgccccgaagacgcagagatgacaagcaaacgccgccaaggaggagaagaaactccgatcaaagcccgccaagaagacccaaggatgtagatcaatcgccaccgcgaagaaaacgagacttcgaccaaagtccaaccagaaaacgagacaaatcaccacgcagacgtcacgactccgaccaaagcccggccagaaatcacagaagtcgagagcgcagtccaccgcctcgtaatcgcttcaaggaagaaaggaaaagtcgctgggccaaggcatcgcccagcaaatcagcatctccacctccgacacacaagccgaaatccaccaagacactagatggcaagaaagctggactgcaggatgcgaaatcgctgaagaaggaaaccgacgaaaggcgtcgacaagaacatgaactattcgagaaaatgtccagcgaaatttccggtcgtgatggcgatgtgcaggtgcgcagtactcgcagaaagggacaccgagcacgagatgccgccaatgaggatcccgccgagcagggccgcaaagaggagcacgagaaaaagaagaaggaactgtacgatcgctggggcaaggggttgaagcaaatagaagatcacaagtcccgcctggaggagatggtccatgaggcctccaaaccggtggctcgctatgccaacgacgaggatctggacaggcatctgcgcgaacaggagcacgccgacgacccgatgctggagtacatgcgccagaagcgcaagaaacgcgaccagcaggacaacaagccggtgatgcccaagtacgagggcagctttccggagaaccgatttggcatccgaccaggatatcgctgggatggcgtcgatcgatccaacggctacgagcagcgttggttcgacaaacagaacgaacggcgggccgtgcaggatgaggcctacaagtacagcgtggaggatatgtga

SEQ ID NO: 31917 - protein, 647 aa, DROSOPHILA
MSMQKAKVIDQKEYLKKYLSGDKEKKKKKKEKKHKKNSANTKVKIIDDDAYENDNLEMDEDLLLGGEDAPQIVGEYIEEDPNVRSKWRNIAVKDEIKEEHEESSPATGIRIKQEPLDEEQEMWGRKATVVKVKDEFSPSRRSSPVRIKQEKRSSSRDLSPARSSKPAKREESPQRGRRRAGSSDQSPTRRGRDGDQSPPRQKHRDSDQSPPRKARNGNQSPVRKRRDSDQSPPRKRTGKASPTRRRRDSDQSPPRRRRSNSDQSPPRRRRDKDSTPPRRRKDSDQSPPRRRKADDQSPVRRERKDSDQSPPRKRRDNDQSPVRRRRDSDQSPPRRRRDDKQTPPRRRRNSDQSPPRRPKDVDQSPPRRKRDFDQSPTRKRDKSPRRRHDSDQSPARNHRSRERSPPPRNRFKEERKSRWAKASPSKSASPPPTHKPKSTKTLDGKKAGLQDAKSLKKETDERRRQEHELFEKMSSEISGRDGDVQVRSTRRKGHRARDAANEDPAEQGRKEEHEKKKKELYDRWGKGLKQIEDHKSRLEEMVHEASKPVARYANDEDLDRHLREQEHADDPMLEYMRQKRKKRDQQDNKPVMPKYEGSFPENRFGIRPGYRWDGVDRSNGYEQRWFDKQNERRAVQDEAYKYSVEDM

SEQ ID NO: 31918 - DNA, 3718 bp, DROSOPHILA
agctacatagcaaaaaaaaaaaaaaaatctaaatctgtgtatattcttccgatatgcacttttcaaatgaaatgttcaaaattcgttatcagtacttaaaatttctcactatgtacaagcttatctcgggatccttcccaaagaagataagccattgtttctcttgtcgacgtgtaactattggatccaccaaaaaacccaaagcacatggctcacccggaatttagagcgactttcttatagagtatatggtaaatacggtaaatgaagcgcaacgatatccatagcgacttttggacgcttaccttgcccgcaattcaaggtgaaatgacgacgaacaattgaagtcactgaaatgtgtatacattccgagcaaatgggcaattattattaataaatcgagctgaatggctgctatcggaattcaggggcttcgactgccgaccatgctcatgaatatgtggaagatgatgatgatgatgaggttcatccggtattggccaactttgcgagtgttttgcattcgcctggttaaattgttattgtttttgttacatatacacacatggagattatgaggaatccaaggaaactggttgctcacacacgcacaccaacgcactgcgacggagccactcacgcacactaccaaatggtcggctaactgcgcaaataatgcggcttctgtgtcggcctttgttactcactttacttaaccatttacatcggacactggacttcactgcgctgcgatttttcgacactttggaagcagaaaagtacgtattttgtttgtgctctgccaatggtgtgaccgtacaccgttgggcgaaaaatcacctataagtgtgggggtgaaaattcattagccaacactgaaatgcttatcgataacatttagctatttttagtattagctaactggtatatattaacggtcatcataaggtcacactgcaaacggttaaacgaacggccacattgtgttggaccgatgatgtggatttaaaagttaaatatttcaaacttagttatagcaaatagctatggacatcacccagagcttcaaggccagcgtaatgacggtgcgcctgcagcgcaaggccgagctggccggaaaggccaagcccgccacagtgccgacaaaaactggaccaattggcccaaaggatgacttcgccaagcaggccaaggaggtgtgcaacaagatcacttcgctgcgcaatgtgctgatcgagaaccgcaccgcctacatgcgcattggccagcacctcaagtccgccgcacacatgaccgacgcgcagcgggatctgattgatcgcgagtcggagaagttcgtcaccttttacacgcagcacctggccaagatgcgcagcgattggaagagcgccaagcggaagccgcaggagcgtcagcacatcgacgccgtgctggacctgctggtcagctatttgcacagcgtggaacagatctatctggaccaaaagaagtaccgtgtgcaacacgaactggaaacctataggctgctcaagctggcggcggacaaaaagaagataccagtgcgtccggcgggcagcaacagtggcaagctgggcaggcgccaggtcagcaacgatgacagcgaagccacgaagtcatcttcacaagcaaatggcaaccacgacgagtccgccgacaatgactggaataacgacgcctggggcgactgggatgaagacgaggaaggcgacgaggtggacgatcacgatggcgagaagggcaaggaagccaatcaggccaatcaacacaaaccgcgtacgcgcaaacgaagcaaagccaacagatcggatctgaacaactcatcctccaagatggctctggatgaggagctccagcagcagcaggaggccgacgatgacgatcccctaagcgccgaggatgtgcagctcttcgaggcggagaacgtacacatctacaactttctgcagggcgtctccgaggaggtggagcagatcgaaaagaacgtggtagacattgcccaactgcaggacattttcaccgaaaaggtaagatggcatgataacacaagtcccaaggaatccttgctgttcttaacaacgatatctttagtttaattttggtgagaacatattgctccatattgccaagaatacttagtgggtttaagtggctgcccatatgtttgtcgacttaatccttcaattaaaaatattaattggcttcgctaaaatccacatccttcgcgattacaatggatgtataagccgggctcttattagcatgcaattaattattaactagatccagatagatccacgtcctaatctcatttaatcctcttaaatttccctttcccttttgtaggtcgccatgcaacagcacaatatcgacaggatagttagtgccgtcgtgggcaccacggaaaacgtcaaggacgccaacgagcaaatccggcaggccactcaacgaaatgcaggactacgcgtgtggtcgctgttcttcctgctggtcatgtcgttctccctgctcttcttggactggtactacgattaagtgaagtccccaaatttatgtgtaacccacccaatttagggaatgataaatgcaaaaatgttttgttatcgtttgatcgcactaaaagcatattttgtttattacataatttataaataaaaggaaaatatttgtttaggctattcaactgccttgtttcaattcaatgaaacctcgtacaacaatatggaactaaaatcgatttgagcgccttgctcacacatgtctcagtagttaatttaaattctacaccaaaatgtgttttagtgtgttgcttggtacattgtttatatctaggtccttagtcatattattttcattaaacgctcttcaaaaaaatatatatatatatctaactgggaacggaaatcagcaataagtatgtatatgtatatatatgtctaaggcctaaagttaacctttgcgtatttctttcagttggtttcattacatgaatgtctagattctaactagcttaggtctaatattttgtagccttaagatttgtgtctgagggagtgtatccttggcttagtcgctaggtgttcttttgtttttagtgcaatatgggattgcattcaatgcagtctgctggttcttttgttttcttttcatattgtttagaataagagttaagagttacttaatgattggctctccaatgggataaatggaagctattccccacggagtgtggtaatagtgtaggaaggcgccgatattatttggctaggttttttgtgattacttataactatagcgttgtacactaaataataatccggccccgtgggttatggcgttgtggcataggattccagagccacactgttgccagcgcagctctccaccgaattggggtattcatctgggctgtggtacaagtggccgccactgctcatcggcgtcaaaggtgtctcctcgatgggcgtagctggattctccagcttgtcactgctggcgtggctattgttgttgctgggtgacttcgatgcggcatcctcgttgcggaatacgcccagcggcaaatgggttttcatgtgagctaatgtaaatttaaaaaataagttagttattacacgttttactagcttcaaaaacttcaattaagttgttgcatcttaacgtaggccatgcaagaagccggcatttgtaatttacctat

SEQ ID NO: 31919 - DNA, 1399 bp, DROSOPHILA
tggatttaaaagttaaatatttcaaacttagttatagcaaatagctatggacatcacccagagcttcaaggccagcgtaatgacggtgcgcctgcagcgcaaggccgagctggccggaaaggccaagcccgccacagtgccgacaaaaactggaccaattggcccaaaggatgacttcgccaagcaggccaaggaggtgtgcaacaagatcacttcgctgcgcaatgtgctgatcgagaaccgcaccgcctacatgcgcattggccagcacctcaagtccgccgcacacatgaccgacgcgcagcgggatctgattgatcgcgagtcggagaagttcgtcaccttttacacgcagcacctggccaagatgcgcagcgattggaagagcgccaagcggaagccgcaggagcgtcagcacatcgacgccgtgctggacctgctggtcagctatttgcacagcgtggaacagatctatctggaccaaaagaagtaccgtgtgcaacacgaactggaaacctataggctgctcaagctggcggcggacaaaaagaagataccagtgcgtccggcgggcagcaacagtggcaagctgggcaggcgccaggtcagcaacgatgacagcgaagccacgaagtcatcttcacaagcaaatggcaaccacgacgagtccgccgacaatgactggaataacgacgcctggggcgactgggatgaagacgaggaaggcgacgaggtggacgatcacgatggcgagaagggcaaggaagccaatcaggccaatcaacacaaaccgcgtacgcgcaaacgaagcaaagccaacagatcggatctgaacaactcatcctccaagatggctctggatgaggagctccagcagcagcaggaggccgacgatgacgatcccctaagcgccgaggatgtgcagctcttcgaggcggagaacgtacacatctacaactttctgcagggcgtctccgaggaggtggagcagatcgaaaagaacgtggtagacattgcccaactgcaggacattttcaccgaaaaggtcgccatgcaacagcacaatatcgacaggatagttagtgccgtcgtgggcaccacggaaaacgtcaaggacgccaacgagcaaatccggcaggccactcaacgaaatgcaggactacgcgtgtggtcgctgttcttcctgctggtcatgtcgttctccctgctcttcttggactggtactacgattaagtgaagtccccaaatttatgtgtaacccacccaatttagggaatgataaatgcaaaaatgttttgttatcgtttgatcgcactaaaagcatattttgtttattacataatttataaataaaaggaaaatatttgtttaggctattcaactgccttgtttcaattc

SEQ ID NO: 31920 - protein, 395 aa, DROSOPHILA
MDITQSFKASVMTVRLQRKAELAGKAKPATVPTKTGPIGPKDDFAKQAKEVCNKITSLRNVLIENRTAYMRIGQHLKSAAHMTDAQRDLIDRESEKFVTFYTQHLAKMRSDWKSAKRKPQERQHIDAVLDLLVSYLHSVEQIYLDQKKYRVQHELETYRLLKLAADKKKIPVRPAGSNSGKLGRRQVSNDDSEATKSSSQANGNHDESADNDWNNDAWGDWDEDEEGDEVDDHDGEKGKEANQANQHKPRTRKRSKANRSDLNNSSSKMALDEELQQQQEADDDDPLSAEDVQLFEAENVHIYNFLQGVSEEVEQIEKNVVDIAQLQDIFTEKVAMQQHNIDRIVSAVVGTTENVKDANEQIRQATQRNAGLRVWSLFFLLVMSFSLLFLDWYYD

SEQ ID NO: 31921 - DNA, 6499 bp, DROSOPHILA
caattattggggagcgtttcataagcatgtctcattatcatcgaagggcctttggtatatgtacatccgaaatgtgaagcctatcatacggaatccattggttatggaaattgcatccattcgtttttgggacacatctgaattaagttacattaccatcaaatatcgcttaaaatacagctcaagcttttctacgaaacccttagcccccaattgagctgacttccgtacaaaaactaattcgaaaaagctttcacgcattcctttgagtcttcgacgagtttagccagatatttaatgcagttaaatatgagtttaaaattattggaaaaatattggcaacatcttaaaaagtatgaaaatgttataataatatcttattattcccaaaatattgtttggttccgctttaaaatgtttgctattttccccactgtgcctgccgcatttcgtaatttcaatcggtggctctgctcctgtttgctgccccagcaaaaaaaaagacttaaaaagtggggccaacaggtgacagacggcggcattggggggccatctcttgatcatgtgcgcctggtccgcattgctttttaaggtaaagagcgagtgctgacttgcgacgacaacaagttcgctgcttaagtcttttgtttggcgccgtctctttcgctcctttctttcgccggccaagaacagtcaatgggaaaacactttcgttgcgattaatcggccacttgctggcaattcatgtagctgctggtcgcgtgctgcgctttatccactgcaaactagttttatttgttggctttttatttattttatttttttttttttgtatttcattcggcgccagagtcaagaaaatccgaccactttcttcagtgcgcacttccaatgcgagtcgtcactccattccagtggaactccagcggatgggcacatggtttttgtccgccaccagcgaccaactaacagtcagttgtcttcgcgacttgaacaggtgcggacgtcgctgctcctcgaatttatattcgaaactctttacaaatcttttgtgcgtgcagtttaagatcgaagaaagcgccgcggcgctcgttgacatgaagttaattgacgtgattatatacctaattgccattttgatcttcatctatttgctgctggagtagcagaagaagccaaaagttgctcgacatttgccccagagctttctacagtctaccagatccatcagccagctacccgacaataaaacaacgaaaatctctagcaaatccgaaagaagatgagggtaagtgattcacgcgggtattgtgagtttgttggccacaattagcggttattaaaaagtctctcactgcgcacagcataacacaataatggattggctttaatttctattgcaaattcaatggcatttcttcttctcatcggcgatcaacgacttcagactgagattggcattcaaatttggtatcaccttcaccttcgccagcaaagccagcaaattgcaatcgctgcacaatgaagctgtagcttcttcaattgaattgaagtcgtcggaatatttgtcaaattgcaaggtggccggcaaagcgagcactttcatttgcaatgggagcacttgatgcgccaagtttcgccaagatccagacaatggatggctttacgtgcaccaattgcatcgcacactgtgagttgcaagctgcaaactgtgaggcacaggcggctgcctcaatgtgcagcgggcttgaaaataaaatgcttgccgctaaaataaaagttgcatttcgagttgcaatttgggttaaccacaccgttgtttatggtcgacgctgtggcgacagcccgctgatcaatagttccgcctaggccgttggcaaaaatcctttgtcaggttcaatggcactgccggccaagcccaaaaggaaacccgaaattatgcgaattccatttggactttcgttgaacgggttatccgccgtcgccgtgggccattccctgccagacttttcagtgtttggcatcgggcacccgtctcctggcagcagttcattcaccagcaggccgcccctggtatttgcatatgattatgatgcatgttgcaatggcgacaaactaactaacttactaactaaccactccataaacaataagccaccaattttgtggcaattaccccgatcaccgccgctgcagtcagtttcagttgcaatcggcaatccgtttaagcaaacgcagcacgtaatcaataactatacgtattggactcgcctaggcatttcacctcttgattgacgtctggctaacggcacaccgtattgccattgtcattgccgccgctccggtggctccagtggctctgctggtgcgctgcccaggtgaaatttcaatgtccagtggccgcctcaaattacccacttccccttccatcgacgagactaaagagacccatgccagccgcgctgaagaggcacatactcattcttttcaaggaataacatgcatttcattttaatggttcctatatatgtttctataaaaatctgacattttacgccttaataaatttattagatgcatgatatgtatttctttcttcgttattgtgttatacctaaactaatagagccattccctttaacctatataaaatgcatgaaaaatccaaaatactcgtatataacgtataaggtaggctgtaagtttctaaagccaatttcaatgaaagtgtcaccaaatgagtcagtgatgcattatacccgccgaattgtaaacaatgcgacagtaaaatttatagaacgaagacatttcgatgacggacttttcactttcattctatggcattgtggacagaaagtttaatcagccatcgaagcggggaaaatgggcaaagtattatggcatacccgtataaatatatatgtatgtatatttataaatgcgaagctactttgtttggctcgtttgcttaagcagctttggttaagtagccaatggcaggcgacgtgataaaattttagaaaaccgccaatttgttcaaattaaggccattacagttttgttgctgtccagcgattacaagaccctcctccttcctcaccgcccctttttttcttcttcgcctttgccgggcttagaaagtttttatttctttcggcgttttgttcgatgtctgtatgtacgagtaattatgtttttgatttaatggtctttgacattgtcccatcccatcctcgccagccatttctgctgttcgcactgctcctggcgctggctaactgcgagcagcgtccactggttttcaccaactggccaccgaagagctccaagcagctgagtcgtcccgccattggagctggaggtcctggatccgctggagcgcctggaaagcagcgcacgctggtcgtccaaatacgcagcgatcaaccggtgcccttggtactgaagggtcgtcctggacatggagcgcacagccatgccgcccatctggcccatccgcattccgtgcatcctgcacatgtcctgtcgcacgcccattcacatgcccatctacactcgcatccgctgatccatgtgccacatcagtaccagcatcagcacctacgcggaccacctcgtcccatgaagctgagtggtccgtcgcccgtgtacctgaaaccagctggatctctaaggaaaccactgaagatcaaactgaacaatgtgaagcccaagacgaaacccacattcggatacgacaagccctttaagtacgagaagcccactgctgtgagctacagcgagctgcagaatctgccggtaagtggagtccattgaaaatgtcctgctcttaagatatccttatactgcacatgccccccactcccctgaacatataacataactccattcatgctgatcccccacagctggacacgcacaacaacttcaacaccgagcactttgcacccatttacacggtacccgcaccgaacctggccgacaatcacctggacgtggaggagggtcatcttgacacctcctacctgtacaagcctccttcccagacccagatccaaacaccatcctcctcagcccgtccccagacatatttgccaccgaagtacagtgtgcatgaggacgagaccaatgaccaaaccattcgtgatcccatttcgggttcgcagaaactctttgccccagatccggatccctcgctgcccaccaccaagattcgccccgccaccgaatctttcaatacgcccagcaacaacaaaccgctgcccgccgacgtccagagtaaccatctgccagcccagccattggttcagattgtgggagcccagacggcagcccaaacggcgccagagatctatcccattcagtatgcccagccggcggttcactcccagtcctttatcgccgccattccggctgcccacattcccatctataatcccacctacctggtgacgcagtccaaccaactgtactcggcccacaagcagcagcttttcaagcccagctcggaaccggtggtggaaacgggttacgtgaacgccgatctcacccaggaggtagccagcaatggacagatactgcaggcagccaaggatccacatcacaacatccatcctgtacttgattcggcgccacaatatgctgctcttattgccgctccggcactgggtgatcccaatgagggtgcctacgagacggcctccttccacctgcccaatgtggcgtcagcggtcactgcctccgttccggaaggtggcttcgtggtgtccaacttctatggccatgcccacgactcttcccaattgctgcaggcctacgcagaggaggaggcacgtcgacagcaactggaaacagagcaagccgccattgagctgcaaaagcagcagcagttgcatctggaggagcttaaggcgcaggcccaggagcaacagcagcagcatcagctgcatctggaggagctgagggctcaggcgcagtaccagcagcagcaacagcagcagttcgaggaactgcaggcacaggcacaggagcaacacttgcagcagcaacaccagcagcatcagttgcagctcttgcaattgcagcagcagcaacagcagttgcagcaaccagtgcagcaccatccgccgcagcagctgcaacagcagcagcagcagcaggtggctcaggatccagcagcaagtgcattcgaggagcaccagcgattggtgcagcagcaacttggcgccaacacgccacttcgcatctttgtgcccgacgaggaggccgccgaatcggtaggtaaaattagacaagaaattcttccgtatgctaacatttgagactttccttgtatagcgactgcaaaagagatcggatgatgtgaaaaagggcacggtggaggatgtgtccagtgcgggtcggaacgacggcgacagcgaggagtcagccaaagatttgttcgaggtatccacctccgtcgaagtggccggcgagcatctcacggccagcagtaattagttaacgcacttttagtcttcgacgctgttcaaaaatatttatttacacactcatttgtaaaaaacgcattcatgtagcgagcagtcggtagttaataaaaataaccattaatttattcaaatattcgttagcgttctttttgaatggatataagtttttgtgttatcgatacattgtaatgctggtgagataaaaatacaactgcactctggtcacactcatgacaagtaaaaacacattttaccaaaaacattgttgtgattgcacatttttcgtgatttaactaagaattagagcctgatctacaaaatgattattccaatccgttgtttcacctgcggcaaggtcattggcaacaagtgggagtcgtatttgggtctcctgcaagcggaatacaccgaagggtaagtcacgcgggaaagtctcctttccacgccgcatttcatcatataatatatatatattatatcttacaatccaatcccagagatgccctggatgctttgggtctaaagaggtactgctgccgtcgcatgctcctgggccacgtggatcttatcgaaaaactgctcaactatgctcctctggagaagtgaacggcacaatggaaaccatccaaactggacttgggaataaaaactctagattttattgtaaaattacaaattaaagcttgatcgatagccctagaagttatgtattagcccaagttggtcgaccctcacatcttgtccatgaaccacggctgtccgttgttctcgcgacgcttggtgagaatctcgcatccggtttcgttgaccagcagtgtctgctcaaactgggcggagtacaggccatcggcggtcacagcagtccagtcatctggccaggtttcagccttctggacgccaacggagatcatgggctcgatggtgaagcagtggccaggggccattactcctacggcagagttttctgcaaagtaaggacattaataatattcaaagtacttttagccagc

SEQ ID NO: 31922 - DNA, 2376 bp, DROSOPHILA
cggacgtcgctgctcctcgaatttatattcgaaactctttacaaatcttttgtgcgtgcagtttaagatcgaagaaagcgccgcggcgctcgttgacatgaagttaattgacgtgattatatacctaattgccattttgatcttcatctatttgctgctggagtagcagaagaagccaaaagttgctcgacatttgccccagagctttctacagtctaccagatccatcagccagctacccgacaataaaacaacgaaaatctctagcaaatccgaaagaagatgaggccatttctgctgttcgcactgctcctggcgctggctaactgcgagcagcgtccactggttttcaccaactggccaccgaagagctccaagcagctgagtcgtcccgccattggagctggaggtcctggatccgctggagcgcctggaaagcagcgcacgctggtcgtccaaatacgcagcgatcaaccggtgcccttggtactgaagggtcgtcctggacatggagcgcacagccatgccgcccatctggcccatccgcattccgtgcatcctgcacatgtcctgtcgcacgcccattcacatgcccatctacactcgcatccgctgatccatgtgccacatcagtaccagcatcagcacctacgcggaccacctcgtcccatgaagctgagtggtccgtcgcccgtgtacctgaaaccagctggatctctaaggaaaccactgaagatcaaactgaacaatgtgaagcccaagacgaaacccacattcggatacgacaagccctttaagtacgagaagcccactgctgtgagctacagcgagctgcagaatctgccgctggacacgcacaacaacttcaacaccgagcactttgcacccatttacacggtacccgcaccgaacctggccgacaatcacctggacgtggaggagggtcatcttgacacctcctacctgtacaagcctccttcccagacccagatccaaacaccatcctcctcagcccgtccccagacatatttgccaccgaagtacagtgtgcatgaggacgagaccaatgaccaaaccattcgtgatcccatttcgggttcgcagaaactctttgccccagatccggatccctcgctgcccaccaccaagattcgccccgccaccgaatctttcaatacgcccagcaacaacaaaccgctgcccgccgacgtccagagtaaccatctgccagcccagccattggttcagattgtgggagcccagacggcagcccaaacggcgccagagatctatcccattcagtatgcccagccggcggttcactcccagtcctttatcgccgccattccggctgcccacattcccatctataatcccacctacctggtgacgcagtccaaccaactgtactcggcccacaagcagcagcttttcaagcccagctcggaaccggtggtggaaacgggttacgtgaacgccgatctcacccaggaggtagccagcaatggacagatactgcaggcagccaaggatccacatcacaacatccatcctgtacttgattcggcgccacaatatgctgctcttattgccgctccggcactgggtgatcccaatgagggtgcctacgagacggcctccttccacctgcccaatgtggcgtcagcggtcactgcctccgttccggaaggtggcttcgtggtgtccaacttctatggccatgcccacgactcttcccaattgctgcaggcctacgcagaggaggaggcacgtcgacagcaactggaaacagagcaagccgccattgagctgcaaaagcagcagcagttgcatctggaggagcttaaggcgcaggcccaggagcaacagcagcagcatcagctgcatctggaggagctgagggctcaggcgcagtaccagcagcagcaacagcagcagttcgaggaactgcaggcacaggcacaggagcaacacttgcagcagcaacaccagcagcatcagttgcagctcttgcaattgcagcagcagcaacagcagttgcagcaaccagtgcagcaccatccgccgcagcagctgcaacagcagcagcagcagcaggtggctcaggatccagcagcaagtgcattcgaggagcaccagcgattggtgcagcagcaacttggcgccaacacgccacttcgcatctttgtgcccgacgaggaggccgccgaatcgcgactgcaaaagagatcggatgatgtgaaaaagggcacggtggaggatgtgtccagtgcgggtcggaacgacggcgacagcgaggagtcagccaaagatttgttcgaggtatccacctccgtcgaagtggccggcgagcatctcacggccagcagtaattag

SEQ ID NO: 31923 - protein, 697 aa, DROSOPHILA
MRPFLLFALLLALANCEQRPLVFTNWPPKSSKQLSRPAIGAGGPGSAGAPGKQRTLVVQIRSDQPVPLVLKGRPGHGAHSHAAHLAHPHSVHPAHVLSHAHSHAHLHSHPLIHVPHQYQHQHLRGPPRPMKLSGPSPVYLKPAGSLRKPLKIKLNNVKPKTKPTFGYDKPFKYEKPTAVSYSELQNLPLDTHNNFNTEHFAPIYTVPAPNLADNHLDVEEGHLDTSYLYKPPSQTQIQTPSSSARPQTYLPPKYSVHEDETNDQTIRDPISGSQKLFAPDPDPSLPTTKIRPATESFNTPSNNKPLPADVQSNHLPAQPLVQIVGAQTAAQTAPEIYPIQYAQPAVHSQSFIAAIPAAHIPIYNPTYLVTQSNQLYSAHKQQLFKPSSEPVVETGYVNADLTQEVASNGQILQAAKDPHHNIHPVLDSAPQYAALIAAPALGDPNEGAYETASFHLPNVASAVTASVPEGGFVVSNFYGHAHDSSQLLQAYAEEEARRQQLETEQAAIELQKQQQLHLEELKAQAQEQQQQHQLHLEELRAQAQYQQQQQQQFEELQAQAQEQHLQQQHQQHQLQLLQLQQQQQQLQQPVQHHPPQQLQQQQQQQVAQDPAASAFEEHQRLVQQQLGANTPLRIFVPDEEAAESRLQKRSDDVKKGTVEDVSSAGRNDGDSEESAKDLFEVSTSVEVAGEHLTASSN

SEQ ID NO: 31924 - DNA, 2287 bp, DROSOPHILA
caggcctacgcagaggaggaggcacgtcgacagcaactggaaacagagcaagccgccattgagctgcaaaagcagcagcagttgcatctggaggagcttaaggcgcaggcccaggagcaacagcagcagcatcagctgcatctggaggagctgagggctcaggcgcagtaccagcagcagcaacagcagcagttcgaggaactgcaggcacaggcacaggagcaacacttgcagcagcaacaccagcagcatcagttgcagctcttgcaattgcagcagcagcaacagcagttgcagcaaccagtgcagcaccatccgccgcagcagctgcaacagcagcagcagcagcaggtggctcaggatccagcagcaagtgcattcgaggagcaccagcgattggtgcagcagcaacttggcgccaacacgccacttcgcatctttgtgcccgacgaggaggccgccgaatcggtaggtaaaattagacaagaaattcttccgtatgctaacatttgagactttccttgtatagcgactgcaaaagagatcggatgatgtgaaaaagggcacggtggaggatgtgtccagtgcgggtcggaacgacggcgacagcgaggagtcagccaaagatttgttcgaggtatccacctccgtcgaagtggccggcgagcatctcacggccagcagtaattagttaacgcacttttagtcttcgacgctgttcaaaaatatttatttacacactcatttgtaaaaaacgcattcatgtagcgagcagtcggtagttaataaaaataaccattaatttattcaaatattcgttagcgttctttttgaatggatataagtttttgtgttatcgatacattgtaatgctggtgagataaaaatacaactgcactctggtcacactcatgacaagtaaaaacacattttaccaaaaacattgttgtgattgcacatttttcgtgatttaactaagaattagagcctgatctacaaaatgattattccaatccgttgtttcacctgcggcaaggtcattggcaacaagtgggagtcgtatttgggtctcctgcaagcggaatacaccgaagggtaagtcacgcgggaaagtctcctttccacgccgcatttcatcatataatatatatatattatatcttacaatccaatcccagagatgccctggatgctttgggtctaaagaggtactgctgccgtcgcatgctcctgggccacgtggatcttatcgaaaaactgctcaactatgctcctctggagaagtgaacggcacaatggaaaccatccaaactggacttgggaataaaaactctagattttattgtaaaattacaaattaaagcttgatcgatagccctagaagttatgtattagcccaagttggtcgaccctcacatcttgtccatgaaccacggctgtccgttgttctcgcgacgcttggtgagaatctcgcatccggtttcgttgaccagcagtgtctgctcaaactgggcggagtacaggccatcggcggtcacagcagtccagtcatctggccaggtttcagccttctggacgccaacggagatcatgggctcgatggtgaagcagtggccaggggccattactcctacggcagagttttctgcaaagtaaggacattaataatattcaaagtacttttagccagctcgaaaacttactggcatagtgaggcacattgggagctgtgtggaaaacacggtgaatgccatgaccgcaatagctgcgcaccacgctgaatccatgtggtgccacatacttttggatcacgttgccaatatcgcgatacttttcacccggacgcacgaactcaatggccttgctgagcgcctcgtgggtgacctgcaccagtttcttgtgcttctccgagacattgcccacaaagaaggtctcgttgagatcaccatggaagccgcgatgatagacggtcacatcgatgttacatagatctccatcctgtagaggacgctgatcggggatgccgtggcaaatcacctcgttgaccgatgtgcaacaggacttggggaagttgtagtagttgaggggcgacggatagcactcccgttcgatggcggcctcgtggaccaaacgatccagttcgtcggtggtgatgcccacctccacggctttggcaccctcatccaagcattctcgacccaatctgccggccactcgcatgccctcgatctcctcgtcgtccagcaccttaatcttggtgccccgcagtgcttcctccgagagtgaa

SEQ ID NO: 31925 - DNA, 204 bp, DROSOPHILA
atgattattccaatccgttgtttcacctgcggcaaggtcattggcaacaagtgggagtcgtatttgggtctcctgcaagcggaatacaccgaaggagatgccctggatgctttgggtctaaagaggtactgctgccgtcgcatgctcctgggccacgtggatcttatcgaaaaactgctcaactatgctcctctggagaagtga

SEQ ID NO: 31926 - protein, 67 aa, DROSOPHILA
MIIPIRCFTCGKVIGNKWESYLGLLQAEYTEGDALDALGLKRYCCRRMLLGHVDLIEKLLNYAPLEK

SEQ ID NO: 31927 - DNA, 3252 bp, DROSOPHILA
ttggcgccaacacgccacttcgcatctttgtgcccgacgaggaggccgccgaatcggtaggtaaaattagacaagaaattcttccgtatgctaacatttgagactttccttgtatagcgactgcaaaagagatcggatgatgtgaaaaagggcacggtggaggatgtgtccagtgcgggtcggaacgacggcgacagcgaggagtcagccaaagatttgttcgaggtatccacctccgtcgaagtggccggcgagcatctcacggccagcagtaattagttaacgcacttttagtcttcgacgctgttcaaaaatatttatttacacactcatttgtaaaaaacgcattcatgtagcgagcagtcggtagttaataaaaataaccattaatttattcaaatattcgttagcgttctttttgaatggatataagtttttgtgttatcgatacattgtaatgctggtgagataaaaatacaactgcactctggtcacactcatgacaagtaaaaacacattttaccaaaaacattgttgtgattgcacatttttcgtgatttaactaagaattagagcctgatctacaaaatgattattccaatccgttgtttcacctgcggcaaggtcattggcaacaagtgggagtcgtatttgggtctcctgcaagcggaatacaccgaagggtaagtcacgcgggaaagtctcctttccacgccgcatttcatcatataatatatatatattatatcttacaatccaatcccagagatgccctggatgctttgggtctaaagaggtactgctgccgtcgcatgctcctgggccacgtggatcttatcgaaaaactgctcaactatgctcctctggagaagtgaacggcacaatggaaaccatccaaactggacttgggaataaaaactctagattttattgtaaaattacaaattaaagcttgatcgatagccctagaagttatgtattagcccaagttggtcgaccctcacatcttgtccatgaaccacggctgtccgttgttctcgcgacgcttggtgagaatctcgcatccggtttcgttgaccagcagtgtctgctcaaactgggcggagtacaggccatcggcggtcacagcagtccagtcatctggccaggtttcagccttctggacgccaacggagatcatgggctcgatggtgaagcagtggccaggggccattactcctacggcagagttttctgcaaagtaaggacattaataatattcaaagtacttttagccagctcgaaaacttactggcatagtgaggcacattgggagctgtgtggaaaacacggtgaatgccatgaccgcaatagctgcgcaccacgctgaatccatgtggtgccacatacttttggatcacgttgccaatatcgcgatacttttcacccggacgcacgaactcaatggccttgctgagcgcctcgtgggtgacctgcaccagtttcttgtgcttctccgagacattgcccacaaagaaggtctcgttgagatcaccatggaagccgcgatgatagacggtcacatcgatgttacatagatctccatcctgtagaggacgctgatcggggatgccgtggcaaatcacctcgttgaccgatgtgcaacaggacttggggaagttgtagtagttgaggggcgacggatagcactcccgttcgatggcggcctcgtggaccaaacgatccagttcgtcggtggtgatgcccacctccacggctttggcaccctcatccaagcattctcgacccaatctgccggccactcgcatgccctcgatctcctcgtcgtccagcaccttaatcttggtgccccgcagtgcttcctccgagagtgaacgtcctgctggatgatcggcgtaatctggacgttgtatggcgttcggaactgttcgcttgggagtctgtgggaacgggcggagcttgccggtgaagcggaaatgtggccatggattgtaggctccatcctgttcggcagagttcgaggcaccggctgagtcaagagaattatatggtttcattgcaatccaactcattaggaacaagactttctaaaactgacctgctaaagcatgaatcgccttgtgctccttccagaatcctttgaagcacggctgcgagcagaaaaatgagcccttgatgcccaactttaggcaggtgggacactgcagggtcgcatccttgccgcagttggttgtctcgcacttttgagtcattctatttcaacaattaatgcgagaaaaatttccgtgcctgccaaaaatagtttaacacagcgtgaccgcaccgataacgatagaaaatacctggaagctttaaaataaatacctttttataccattatatgacaatatataagcaatatggctttttgggaaatttgccttacgcttcaagcaaaatcataattctattggtttgatattaaatactgttttctgattaaacattaaaaaagttgatattaaataaataccaaatcaatgtttaagaatggcgctacatcgatatccgatgttttccaagcaccgatagcctgggaccagttctgttcttatcgatacgtttgtgccagggttgttcgtcgccggctgtaacgggcattagtttaaaattggaaataacttgataaccattttatgtgtatttaaccatttaaaatgttactattatggtaagtgattcgtaaatagtattcatatgataattaacataagaaaagagttaataagggctttccttacaaatggtttaaaatcgttcgaaatttgaaagtaaacaaattaaatatgtaagttcttcgcggagatctttgatctggctaagggacactggccccgtgaattcgtggcctttgttttcgtccgtcggggcggcagttcaaacgcagccgcctgttgggcacttttccgcagttgttctcggcgcatgctcttggtgggaacagtttggacttggactcggtttatctgtctgctctgtttatgttctcaaatcgcgagcaacttcggtcgtgaacggacgtgctttcgctgtaaactcggaatcggtgtcgcgaaacaaaagaatattggcaacaaacttgtttgagtcaaatggccaaacgcaaatatccgcaaagggcagcaggataaatttattggccagtgaagtgagtgagtgtcttgtttcgaattggtttggccaaaaaaaaaagaggacccctttaatatttct

SEQ ID NO: 31928 - DNA, 1125 bp, DROSOPHILA
atgactcaaaagtgcgagacaaccaactgcggcaaggatgcgaccctgcagtgtcccacctgcctaaagttgggcatcaagggctcatttttctgctcgcagccgtgcttcaaaggattctggaaggagcacaaggcgattcatgctttagcagccggtgcctcgaactctgccgaacaggatggagcctacaatccatggccacatttccgcttcaccggcaagctccgcccgttcccacagactcccaagcgaacagttccgaacgccatacaacgtccagattacgccgatcatccagcaggacgttcactctcggaggaagcactgcggggcaccaagattaaggtgctggacgacgaggagatcgagggcatgcgagtggccggcagattgggtcgagaatgcttggatgagggtgccaaagccgtggaggtgggcatcaccaccgacgaactggatcgtttggtccacgaggccgccatcgaacgggagtgctatccgtcgcccctcaactactacaacttccccaagtcctgttgcacatcggtcaacgaggtgatttgccacggcatccccgatcagcgtcctctacaggatggagatctatgtaacatcgatgtgaccgtctatcatcgcggcttccatggtgatctcaacgagaccttctttgtgggcaatgtctcggagaagcacaagaaactggtgcaggtcacccacgaggcgctcagcaaggccattgagttcgtgcgtccgggtgaaaagtatcgcgatattggcaacgtgatccaaaagtatgtggcaccacatggattcagcgtggtgcgcagctattgcggtcatggcattcaccgtgttttccacacagctcccaatgtgcctcactatgccaaaaactctgccgtaggagtaatggcccctggccactgcttcaccatcgagcccatgatctccgttggcgtccagaaggctgaaacctggccagatgactggactgctgtgaccgccgatggcctgtactccgcccagtttgagcagacactgctggtcaacgaaaccggatgcgagattctcaccaagcgtcgcgagaacaacggacagccgtggttcatggacaagatgtga

SEQ ID NO: 31929 - protein, 374 aa, DROSOPHILA
MTQKCETTNCGKDATLQCPTCLKLGIKGSFFCSQPCFKGFWKEHKAIHALAAGASNSAEQDGAYNPWPHFRFTGKLRPFPQTPKRTVPNAIQRPDYADHPAGRSLSEEALRGTKIKVLDDEEIEGMRVAGRLGRECLDEGAKAVEVGITTDELDRLVHEAAIERECYPSPLNYYNFPKSCCTSVNEVICHGIPDQRPLQDGDLCNIDVTVYHRGFHGDLNETFFVGNVSEKHKKLVQVTHEALSKAIEFVRPGEKYRDIGNVIQKYVAPHGFSVVRSYCGHGIHRVFHTAPNVPHYAKNSAVGVMAPGHCFTIEPMISVGVQKAETWPDDWTAVTADGLYSAQFEQTLLVNETGCEILTKRRENNGQPWFMDKM

SEQ ID NO: 31930 - DNA, 2252 bp, DROSOPHILA
ttgctgccgctgctggctgctgacgtttgttgttgtatttgttgttattgttgttgcgagcgtgcctgtggaattcgcaaattgttatgagtaaaactacaacaaaaacaaagctccaccgaaagagaaataagacaaaaataaagaaatacatacaaaggcgacgtaaagattacacaagcgcagcgtcgtcaatttgagagcgggtgagagggggctgtggatggggagagtgaaggggcattagaaacaacacaacactcctcgctgcaatcaagaaagctctcccaaaagcagcgactgcgactgcggcacaggcagaagcagaagcagcggctgcacagagagagccacgatcagctgcagatggtacactgggaaattaatattagtgaataaagaagtctatatcataagctccatatggaaagtatgaatgccttagctcaacaatcctgtacccgctataggacgccaaaaagtatgctttataaactcaaacatattcaaaattcttttaacgacatccgcacactttacatatatatttggaacctccaatggattctgttcctaaaaatccacacacatatgctggaattttatctttttttcggtgtagagaaatttatcatttcactgcagcacagccgctgcaacagagacgtcggcagcaagctctcgctgtttcaacagctgctgatcgcagtgctctcttgttttgacagctctctctctgctcatcgctgccggcgtcgacgttggcaccgctgccactgcctctgccgagcgaggcctggccacaaaaacaacaccacagcttttcgaaattagttctagtgagtctgtgaaagtgtgagcgactgcgaggcgcgatcaattggcaaacaaccgcaagcggatcaactgctccacacgccacgccacgccgaaaatcgctcaataaatatataaaagcggactagccaccaataacaaaaatatccacatcacgtgcaacatgtcgcatcagtgcagctgcggtcgcgacctcaacaacaactacgtctcgtacaccaacgcctacgccaatgcgaatgcatctctggaccgcgaggcggccaccagcggcaagtccggcggtccgccccgcgcccagctgacggccaaggtgatgttcggtacggtgggcgccatcaaggagctgcgcgacaaggagcagcagcaacagcagcagcggcaggcggcacgagcgggcgagaggcgcaactgagaggctgcacgaggaagggggcggggcgggacggggcgggacgaacggtcgcaggagcggtcgagtgctgtgctgtgggttgtcggcgggggatctctggctgatcggaggaaggataacacggagatatggatttggatatgacacaaagaattcgcgccacttcaaggacctaaagaattcaagttcgcgtagttcccaagattccaatgggtaatccaaatagttcgattcgtatgacccgaatgggtgatccccggatcacgttagaggcttcaaagtgttggcaggggacagggcaatctgtgtaacgacattccttctcaacaataactatcaaaaaaaaaaaaaaatagaaaactacaaaaaaaggaaacaccagtgcatcacatatttatacacacaattttttttgtctgccacactatctctaattctctccatctcctgtaagcttcagcagaactcaatgaatcaatgtaaattgtttattgcatatacatatttatatacatatacacacaacatagtgcaatactttagctatacacgaaacacaaaaaacacacgcctagctgtaagtttgttttattttgtaagtgcacacgcatacacactcactcatcttacaatgttgtttaaatttgttttgttgttcacgagccccgtgatttttgggctgcaagtgagtagtctggatacttccagataactctccagatgcctccaggtgcagcttaaaacgcagggcacgtagcccacacacactacacacacccccacaccatgtaaaccatataaacataactatgcctatgcgtaatctttaatatctatactactgttactactctaataatcatattgtatgtgccgcacgaggagagggaactcaaaattgtgcccccaaatgggtggtggatggtgtttgctcaagtgattcgtactaaaatggcagcgggaatgcgattaatcgcagagtgagaagtgctgtaagtgg

SEQ ID NO: 31931 - DNA, 252 bp, DROSOPHILA
atgtcgcatcagtgcagctgcggtcgcgacctcaacaacaactacgtctcgtacaccaacgcctacgccaatgcgaatgcatctctggaccgcgaggcggccaccagcggcaagtccggcggtccgccccgcgcccagctgacggccaaggtgatgttcggtacggtgggcgccatcaaggagctgcgcgacaaggagcagcagcaacagcagcagcggcaggcggcacgagcgggcgagaggcgcaactga

SEQ ID NO: 31932 - protein, 83 aa, DROSOPHILA
MSHQCSCGRDLNNNYVSYTNAYANANASLDREAATSGKSGGPPRAQLTAKVMFGTVGAIKELRDKEQQQQQQRQAARAGERRN

SEQ ID NO: 31933 - DNA, 2492 bp, DROSOPHILA
gttatgcggtcattgaagcatataaagtacttcgcattgcagccaaataagtaaagtaatcaaattaaaaaaaaaaaaaacaaaaaaaaaacagaatagccagacaatgaaatggcataacaaacataaatagagttattaacttttaatgcgatagttggaaaaaatgcaaagaattaaaagcttttcgtggccttcgcttatttgaatacacaactgttaaaaaatacttattttcgtttaaaaatttggcaccacataaaataattttaaaacccaataaactcaatcaactgtcgactgtaaagtgtattcaaataaataccatctcgaaaatcactcggccaaaaaaaaatgaaataaacaaaactgcacaaaaagtgaagtgcaacaaaaagcgcaggaaaagtgaataaaacggttaggcgataataagttgcagttgaagtgcagtttttattattgtaattagctgtgggcagcttaaaaagtcaaaattaaataatagcaagcttttcgctgttatttaattactatttcgctgttttactagtaagttgttgccattgctgatgtaatcgcatcgctgaaatcgcaaaatatattgatattaatattgaccaccaaaagccacgtaactttattgataattatgcttaattcatccttatcgagcttaattagtttttgttgcaaccctttgccctttagctagagttgaccaattaacataatatttatgtgtttgaaaaacatttaaaaagaatactgttcagtgccatctggttatatgcttcattaccttgggttaatattccttaattttgaatcatttgaaaaatgaaaatccgtggagcctacaatctaactgaagaatacgtatgacttatgtaccccaaacccaatggcaacatgctgctcctccttggagattccttgtgccacctcttcttccactgaacttgacagcgaataaaccattccagaagtcgccgctggaatgttgcagccatcacttctggtggcgttgctgctcctgctggtgcacttggagaatgccagcggcaagccgcccaccaaggagctaccccgtccgctgatcccgctgcacgaccaggaccaggaggaggagctgcagccggaactggaggctaaggcgacattccagagcacacggaatggacgctcgcgacgtcccactttgatggatgtggccttgcagcagagtgtgcgacagggtctcgatgccatgaccgagctgtacggtcggattcagccggagatgctgcgcaatggtgggtacttcttctccagtgccacttttccctaaccttgaatcaaaacctcgaattccacggaaggccaaaccctgcaggacaaccatccggccgcgatgctttcccgcttcaatgcccccaccacggactcggaacgcagggagatggccgcctatgccaccatcgccgcagccaaggcctttcgcaaaaagtaagttccacggacttgtgggcgggtgtgtatatgggcgtgggctggatacgtggattgtggcgagtcataagttcatcagccgcaaatatgtggctatgacatatgaaaaaagttattggcaaagccaatgcgcgtgattaaaaaccaaagtggactcgagggtgggtcaagtagttggggtcattgaggtcaacttattatactcaccctaagaataatcaaaataatgtagttcttgtgaagtacagtctttataattgccttattagcttatcgacgtaagagccaaacataaagattacttttacaaaaccttcttattaaaaaaacattttttttttaaatattttattatcttaaaaaacaaaaaaacatacgaggcgaagaaacaaggtactacatttcttatgctttgaatatagttatcttcaaatggtatgtagcgaatattgattgattgctgtgaagagtgattcgtggaaaaatgcttaaccaacttttctaacaaaaaaatcaaagcacccctcgccgcccgatcagacccaataagtgggcatggccactctcgagtttgtgaccccgggcaatctaatgcaaaaatatccacaactttgtgtgcaacaaaaaatggtggtgaagacaaaaggcagaaaagtaagcaatatttgttgagttgaggaccaccgccccgccgcccgaatgcccctgcctcacccactccagtgccaacaattaccaccggcaactttctcgcttgattaacgagttctacggcatccatggcagcagctccacagccagcagagctaatgagtcggagctgggaatccgaatggcctggaagttggctgaagtggaagtggacacaccgatgccgtccagtgcccccttgcaaataccgaatcgtagccaaaaacgatgggagtccaactgcgattgctcatgactaagagtcaactttcactttgacattgaaatgccgcataattggcagacaagag

SEQ ID NO: 31934 - DNA, 426 bp, DROSOPHILA
atgttgcagccatcacttctggtggcgttgctgctcctgctggtgcacttggagaatgccagcggcaagccgcccaccaaggagctaccccgtccgctgatcccgctgcacgaccaggaccaggaggaggagctgcagccggaactggaggctaaggcgacattccagagcacacggaatggacgctcgcgacgtcccactttgatggatgtggccttgcagcagagtgtgcgacagggtctcgatgccatgaccgagctgtacggtcggattcagccggagatgctgcgcaatggccaaaccctgcaggacaaccatccggccgcgatgctttcccgcttcaatgcccccaccacggactcggaacgcagggagatggccgcctatgccaccatcgccgcagccaaggcctttcgcaaaaagtaa

SEQ ID NO: 31935 - protein, 141 aa, DROSOPHILA
MLQPSLLVALLLLLVHLENASGKPPTKELPRPLIPLHDQDQEEELQPELEAKATFQSTRNGRSRRPTLMDVALQQSVRQGLDAMTELYGRIQPEMLRNGQTLQDNHPAAMLSRFNAPTTDSERREMAAYATIAAAKAFRKK

SEQ ID NO: 31936 - DNA, 2517 bp, DROSOPHILA
tttaatgttaaaaccattctgtgttgtgttttaaaatagtcacataaattcttagaccatgctagttttttggagacaattagaaatagtttaagataatctaagaccgtcttaacaatgtaaaataattaagtattaagttaacatgtatatgctgcaaacgaaaaatgtaactaatattttagaatgaaaactaagtgcattgtttttataggaaaccacaaaagaaactgaagaataaagacaattgaaagtcaaattcaagtgtatttgctaacgcagacttgctgcgcctatgtttattcgggtaggtatgcatgtattcacaaaacaattacatatttgtaattatatagttaaattagtaatcactttgtcaaacacttagttacaccgatattagtatgcagtagtttacccactattcgtgctcctccgccgacgaccacaacgaatgccactcgtgtcgctctttctgagagagattgccccaagtatataagtttaaatccgcgtgtatattaattaatgcccctttaaaatgtacatatatggagtactgtaaattggattgaatatgcatatataatagattcgtataacattatatgtatttcttccttgataattgcacacgccagtttcattctcattcagtttttttttttttttttgattttttcgccatttgtcatagtatataatttagagggtgccgttaaacgcatcgatttgaagaacttaacataaataccattggctctagcgattcatacaataaatatttgtgggacgaggggcgtgcaaagaattcgtttggattcgcagacatttagatttagattgcctcccgaatgtgtgacttaagtttggagaagagtctgagagcttttgcaagtgctttttcgataacattagttaggatgagctcctagtcaaatggcgcacggctggatttgaataagtgcgccatccggggagagtggtggccagcattgacttaacgtcggcccaggccaaagttgaagggttgcggacgcgtcgttcgcttgttctgtcggccaggtcgcactgcaagcccaaggattaaaaggatgcgtgtgtgataaaggaaggaacacagtagacttaccagcacgctcggctgccaagtagttcgctggcggcactctgtagtcgatctcgttgtcctggtcgtagtcgtagtcgctgcgtttgcccagtccgaaggagtagggacgagacctcttgcccagaccgaagttatagaccggcaggcgcttcatgcccggtccgccgttcgtgtacatataggcccgtcgtcccagaccgaaggcgtaccgctccacccgcttgtcgatgttgtcgccaccgttgtcggccatctcgtcggcggccagcaggacatcggcatcgctgtctccgctgcgctgatcctggccaattaccggggagctggcgatgtagccgacgcagcaaactgccagcagtaggaggtgggcgtgaagggagttcattgtgatgctatgggcacgggatggggcacgtctggctgctgctgctgctactgctgctgcgaaaaagtcagcgaagacaaagtgagcaagcgacgaatagaattttaagcactcgctccccaattctctgtgtgtcaaagcgttgcatattttgcggcgacagttgtcgcctttcgtaaacaaggatactggggaattagggtggaccacaacggcagtaaaataaaaggacataaaaggacataaaaggacattgcatacatttaagaaaataacttccgaattaaaaagttaatagcaaacaagtgctaactaataccatttctataatttctatagtatggaatataaacccaccctaatgcgtaccttctagcgaatatttatgcaaaataaagaaacaaacaatcgacgtggaatttcggcccaaacacaaaatatgtcaacgacaaacaaatgccgacgcgttgacagcccggcaaaatggcaacagaaatttggcagtggcaaacagaagcaaacagtcaacgaaaccaagaaaaacgaacgtttaaaaatggcctgcagaacgctgaaaaatgtggccaaaagtttgatgccaccgccggcagtcatgcggaaggtccttggtccttgatccttggtgcttggtgcttggtgcttggccaactccaaatgcagcagacgcgacgggtttttctgctagccttgcaggtcgcgtcgtaaaagttattatttgatccgcacgatgagatgaaatgagtggcttaattcccgcagcagatgccacaattagccaagaacaattacccaaaaaatataaccgcgaccggaccagtgaactatcctggctgggggaatccttctcgctggaaggattccgccattagcggaatagcagtgtcagtcaatggcagtcgtcaacgctttgtggagatgtcagtgccatcaatttaaagtgcacgtcgtgaatgaaggaaccactggcagtaacatggct

SEQ ID NO: 31937 - DNA, 456 bp, DROSOPHILA
atgaactcccttcacgcccacctcctactgctggcagtttgctgcgtcggctacatcgccagctccccggtaattggccaggatcagcgcagcggagacagcgatgccgatgtcctgctggccgccgacgagatggccgacaacggtggcgacaacatcgacaagcgggtggagcggtacgccttcggtctgggacgacgggcctatatgtacacgaacggcggaccgggcatgaagcgcctgccggtctataacttcggtctgggcaagaggtctcgtccctactccttcggactgggcaaacgcagcgactacgactacgaccaggacaacgagatcgactacagagtgccgccagcgaactacttggcagccgagcgtgctgtgcgacctggccgacagaacaagcgaacgacgcgtccgcaacccttcaactttggcctgggccgacgttaa

SEQ ID NO: 31938 - protein, 151 aa, DROSOPHILA
MNSLHAHLLLLAVCCVGYIASSPVIGQDQRSGDSDADVLLAADEMADNGGDNIDKRVERYAFGLGRRAYMYTNGGPGMKRLPVYNFGLGKRSRPYSFGLGKRSDYDYDQDNEIDYRVPPANYLAAERAVRPGRQNKRTTRPQPFNFGLGRR

SEQ ID NO: 31939 - DNA, 3441 bp, DROSOPHILA
gatgagaatgaaaaaattgttttaagagagattttcgggaatgccagtgtggccagagtagtcggaggcatgcacatgaatgagccaaaagtcgtggtatagaactttgagggcatagcttggactcgaaccggaaatcaaagaaattttgtttccaataagaatataaaacatattttaaaattgttcagaactttaaataaaataaatacaaactctttaggtaatgcagctatcaagccaatttggatatccgtttgtttatgtaattaatgcgcttatcaaatttgttttagagtgaagcatatgcacatcattaatttcaaaccttatttattttgtagttaattttagtttatactttagacttaatgaatattttatttattaaaacaagctttaggattttaaaataatttttaacctatatgttaaagattatttcaaatatttggcttctagccttgcattcctttatttcaatttgaaagctaatcaaaccactttctgaaaattttgtaatattttctcctaattaccgccccgcagccaagccattggtctttcccctttaaagtgaattaaccaatcggcgggcagcggaggcgtgacgcggctgcgtagtgcatcctggccagctttcaggagcatcaacccccgaacggtgactccggccgcattgcctggcatcctatccaggtgccctcgaccagtcacaacggaaactcagaaccaactgcacgaaggcaacggaatgcgcgctgatcaccatcaacgtcaagtgaaagccatcgaactctgaataattgaggagtattgatgagcagcagccaggtgaaatcctattagtgaaaatccaacaagttcaagagtgcatccggaccaccgatcgatccatggatacggccaagttggtaagattcgcttaaagcttttattttcaaccgcatcggacgtacataaatagggcttaaactaggagtccttcgaggtggtggtcttagccatagctcagggtgtagcccatgttctccatgagggtctccttgatggccggctggagcgcccgctgcatgtaggtggtcagcaagccacggacgcccatggagaagagcttctccagctcgtgagacatggcctcgcccaccagctcctcacgatctccggtgggactggagccactgccgctgaatatatctgcaaaggctctggcatccggctccaccagctgctgcagctgctcatcctcgaagtgcagcacatcctcgctgaagttcacctggtcctcgaagttctctttggcgtagcgccgccggcgtctcctctttttgctgaactgccgccggtagaagttgtccccgttcacatcgatgaactcacccgagtcctgggcctggctatcgctgcccagctccaggctgtactccttagttctttgcggcacctgaccctggcggatatcataacccgcctgctgatggtatttgccccacctttgtggtctcttgctgcccagtatcacgtgcggttcgcccagttccacttccggagcactaccgaatctccgcttggagttctggcgcagacggattccagtgggtccctggcatccgtgagcaaagaccgatataaatccgggctcagcgaaatgagagtccgtgcgcaccgaggcggctcccaatctccgggactgctcgtagttggaggcgtgtcctgatcccagtggaaccgttcgaaactcgatgcccgcgtgtcgcagtctcagaatcatgtgacactttccgcccatcggctgcatcaccaccttgccgctgagagtaagatccggaaagatcaggcgggtgtccagcgtggagttctcagtgctgaatttgcacttgtcgatctcaacccaccggttggcggacttcgccggcggcactcgcaccttgagatcctccacatccacccgggaaattgtcagtttgtgtggttgtctgtgctgctggctctgctgattcaccgccagcaaatcctccagctctagtgcactgcttgaatcggagaagggattggcttgtccatttcgatgcagcaacttggcgtgatagccacgtccgctgctgtaggcacccacattgtagaagtcatcctccggatcactgtgctgtccgtagaaactgtggtacaactggtagggactctgcggtggcggctcccacatggcgcgcgatgcggaggagctcttggtctgcacactgcgtcgacgcatgtgctccagtgcattctccagccggttggagcatcggtggggcaactggtacggctgacagagggtcactaaagagcgtgtgttagcagaattgtctacgatgcagtggtggtaacttacccgccagcagagaacacatggccagcagaaagtacagccaattgaaatcccggctcacgtatcctgacatggcggtattccaaacatggagtggggtaatcttttttactcaggctgtaagtccttagaatccttgttttttaggcttttgaaatctgttagttctcactggattttaaactttttattcacaaaatcacaagacacattaatgtttttcaaaaatatttattatcaaatggtaatgcgtttcttcttttatataaagaacgtttgtcgattatatttcagttcgttcgttaataaaatttaaactgcaatttatgttagctacttttccagaacttggattgtaatatcttaatagtacaatgttgttgggttatcttttgaaagaatccttaagttggccagaaaacacctccgaactcgcccgcagctgaaccgaaaatgcgactcccaagaccaagcggagcgagaaactggctcggtcgcgcttccattgccaccaaaaccaaaaagacacccacaagaagacggagaagagcatagccatagccatcgtgatggtgacgaccgtgtcactgcctcatcatgtgcagtgaaagtgttttccacgacggatccatagccagagttaaaaaagagacagagattcggagtcccagtcatccaagtcgagccacacacacagaaaaacgaaaaaaaaaaacagaagaaaaaagacgccagctaaaacaatttggaaaaagaaaagcattgtcttctgcgagcccatgggtctcagtccaccacccaccgctcccttgggcggctgcaaactagatcagtacatataccttatatgtatataatagcataccataccaaaccatacgataccataccgaaaggtaaacacacgactggagtttcgtaatgtcagttgcgggcgcgcatgcgtcgtaatctctgcgagtatgtgcaccattgttcgccagggttcaaagttgatcaatccgtcggatgagtcagtcacccagcgccacagtttgttttcccaattgcacttgtaattggcaccaattgcg

SEQ ID NO: 31940 - DNA, 1389 bp, DROSOPHILA
atgtcaggatacgtgagccgggatttcaattggctgtactttctgctggccatgtgttctctgctggcggtgaccctctgtcagccgtaccagttgccccaccgatgctccaaccggctggagaatgcactggagcacatgcgtcgacgcagtgtgcagaccaagagctcctccgcatcgcgcgccatgtgggagccgccaccgcagagtccctaccagttgtaccacagtttctacggacagcacagtgatccggaggatgacttctacaatgtgggtgcctacagcagcggacgtggctatcacgccaagttgctgcatcgaaatggacaagccaatcccttctccgattcaagcagtgcactagagctggaggatttgctggcggtgaatcagcagagccagcagcacagacaaccacacaaactgacaatttcccgggtggatgtggaggatctcaaggtgcgagtgccgccggcgaagtccgccaaccggtgggttgagatcgacaagtgcaaattcagcactgagaactccacgctggacacccgcctgatctttccggatcttactctcagcggcaaggtggtgatgcagccgatgggcggaaagtgtcacatgattctgagactgcgacacgcgggcatcgagtttcgaacggttccactgggatcaggacacgcctccaactacgagcagtcccggagattgggagccgcctcggtgcgcacggactctcatttcgctgagcccggatttatatcggtctttgctcacggatgccagggacccactggaatccgtctgcgccagaactccaagcggagattcggtagtgctccggaagtggaactgggcgaaccgcacgtgatactgggcagcaagagaccacaaaggtggggcaaataccatcagcaggcgggttatgatatccgccagggtcaggtgccgcaaagaactaaggagtacagcctggagctgggcagcgatagccaggcccaggactcgggtgagttcatcgatgtgaacggggacaacttctaccggcggcagttcagcaaaaagaggagacgccggcggcgctacgccaaagagaacttcgaggaccaggtgaacttcagcgaggatgtgctgcacttcgaggatgagcagctgcagcagctggtggagccggatgccagagcctttgcagatatattcagcggcagtggctccagtcccaccggagatcgtgaggagctggtgggcgaggccatgtctcacgagctggagaagctcttctccatgggcgtccgtggcttgctgaccacctacatgcagcgggcgctccagccggccatcaaggagaccctcatggagaacatgggctacaccctgagctatggctaa

SEQ ID NO: 31941 - protein, 462 aa, DROSOPHILA
MSGYVSRDFNWLYFLLAMCSLLAVTLCQPYQLPHRCSNRLENALEHMRRRSVQTKSSSASRAMWEPPPQSPYQLYHSFYGQHSDPEDDFYNVGAYSSGRGYHAKLLHRNGQANPFSDSSSALELEDLLAVNQQSQQHRQPHKLTISRVDVEDLKVRVPPAKSANRWVEIDKCKFSTENSTLDTRLIFPDLTLSGKVVMQPMGGKCHMILRLRHAGIEFRTVPLGSGHASNYEQSRRLGAASVRTDSHFAEPGFISVFAHGCQGPTGIRLRQNSKRRFGSAPEVELGEPHVILGSKRPQRWGKYHQQAGYDIRQGQVPQRTKEYSLELGSDSQAQDSGEFIDVNGDNFYRRQFSKKRRRRRRYAKENFEDQVNFSEDVLHFEDEQLQQLVEPDARAFADIFSGSGSSPTGDREELVGEAMSHELEKLFSMGVRGLLTTYMQRALQPAIKETLMENMGYTLSYG

SEQ ID NO: 31942 - DNA, 4631 bp, DROSOPHILA
ctaaaattaatgttttatcattttgtgggaagctcattgctgccaatttttgtgtgcgtcagcagaatcgtttcccataacgcataaaaacctgtattgtttaacttgatattcagttgtatatattttaccatatatattatgagttatttttttaagaatgaaatatgaagctgttgtttttaacaaaccagaacttcacttccaattgtagagtatagacttctgttaaaattacacatgtaacataagtacataactatatggtatctcaacttccaatttactaaaataaatacaagtatattatgtattgttattatacaaagtattaaagaagatttgctgagtgggaacttaagtatgatataagggtatctggaagacgactatcattcgccgccaatgtggcaaaggggttctatgcctggctgagcaggtgagcggactgcgggggcggtgggtggctagctggcgaggagcactcagatgggtagcagatggtggcaggtgggaggtggaaggtggcgccggtgtgcgcgagcgccaagtagccaccagcagcgacatcgcagcaacttaaggtccgtgtgcgccgcgaattcttcacttgcatttcgagcgcgcaggcgactggttggagctacccgtccgaagaccccaagtggaagttgcgactatagcgagtgccccaaagtattggagattttttggagtgacgcctctcgtgcggttttgttttgcttcggactttctggcggagcggaaacgatttcggtgtgaaaatttgcataaaattgtgcccgcgaaaccgacatagaaacgaaaaaagcgttaagtaaaccaatttaaagcctttgggccgtttttcaagctcgcaaagtgcgtgtgcaacccgttgcggtcctgtggaatttatataagacccgaaaaaggacttctttccgacttcttcaagtcctggtctcgactcaaaactcgattagttaccgattccaaaatgcagcccctgaagcgcttcacacaatgcggcagtctgaccatgctcttcggcatcttcatcatcctcttcggggtcagctccacggctctgaccacttttggcaagaccaacaatcagccgcctcccacgcacgtcccaattggtaagagaacccccggggttggtaacgaaaaggcccatcaaagtcgctggcaaggtcaagaggagtttcttgtcaagattgggcgagggattaaaagtggttcgagtttaaaagtaatcgtgcagtaattttgctataactcgtactccagcattagccgataagtgaatatgactactattactataacaatattcatataagattattctttaagaaaaataccaaacaaagagatacattaacttctgttttaaaaaactgattttgagttagaagttaactattttaatgcacttaacttgactctcattataatgtgatatatacgttgtcttagaccttcccgataaagccccacatcacttaagttcgattaaccgctaattaagacacctggtcgttagccaaacaaatagccaaccatccagtttgtctgatccaatcatttgtcattcgattgacttggtagtcgctcataaataaatggaataataattatggcacagagccagcacagattgaacgacacgacacagaacacagaacattgctaacacaaatcgaatcgagaattgatcaaacaagtcactcaagtgcaatgacaacccacgctccacgaatccctgacattaggagcgggggcggtaatatccctgtgattggagttggtaaaccgaaacggatagagtagatatagataggcggacaagcggtgatttgtgttggctcaagttggtacccaaataatcacacaattagtgggcaattagctaggcaaactggctagttaagtgtccttttttaacttggattcctatcattaattgcagttaaaggacgagagtgcagtgcccacgatgattgcacggcgatagatcgcaccagctgcgtcaaggatcccaatgactacaagctgcgttgcctatgcggcgacgactcgcctccttcggctggcagctgtccagatgtcctgaaaggtaatgtatcacctatatagaaaagtacttacccatattccccaaggatataaatatacaagttgtaatctagagaaaccactgacacttaaacagcattcctaaaaataaatttttcgcggctgatatgctttagttactagtcagttagttactatttatttatgttaaaaaaattaaaaaatcattgatgttaaatattaatcataatgttctgtatctccgctcctttgaccgcccgcctttgcagaatcctttagctcgtttcccgaaatagaacagccaacaaaaagtcagctaattgctaagacatgcacattacatttattatttaagaggccgctgctttcttggaggcctcctccgtgatgagccagtgcctcaagtggcatgtgaggtgatgcgtccaaggcgccacctaaatgagaattaaacaaagaagcatccttccagaatggccacccccaaagcccactttcacctttcttcgctatttgcctgcttatttatttagttttccgtgcgcgattcacacttgccttctcggcatccttgggtcatgtgcccgccattgttggccctacagtcccttggttctttggtcctttggtcttgggtcctctagtttcccagttctccagccctcctccagctccactccagttcttggcggggccagaggtggaccgctttatggcggcgcaatgtcgatgtcggatttatgttaggatgtcgtgactcctccgatggggcaactcaaacgaggccccaaacgagaggcaaatggtaatgggaatcgccgcagtgccaatttgtgacatgcacagcccagaagaaatgttatacgcgatttttgcatgcacgtttccccagtttttggcattgggagttgttctccgtgttggagatctactttctggcggggatacattgtaatacaccagagtatagaatttccagactattataggtctgcataatagcgttattataataaaatggctgctaaatgataccggtgtattgagtcggtttaaatttagttataagcatggagtatagctaattccactggcggtatgctaatatcttaataatatttgcgcattttgcaggcctgcgtcacaagtgcaacagcaacaacgactgcgaggatggaatggtgtgccagtacgagaacagcaaccgcaccatcggagtggccaagttcatgtccagcaagaccaagctgtgtctctgcgacaacgacaacggatatgtggaggacatcctgcacgacatctgcagtggaggtgagaggtttctcatccaatacattccataactattataactattgtcatagtattacaaatatagtacacacaaaaataggatgtatcatggttcctaatccatcttctttgcctttcagctaatcttcagggcctggtcagcttcttggtctcgatctgctcacttctggcgccctttttggtatccgcccacatgcgaaagcatttctagaaggcgatcgtcgaaagcggaaccggaagacgtagtttggcgtttatctaccccagtgatccatcaaatgtgcctcagtgaaaccaacagaaacaaaagatcatcctacccctaccactaacccctcacatataaaaaaatacgaaaagtaaatcttgaaaagcgaaaaaaataagagaaaatacgtggaaatgaaattaagaaagttagatactcgtcgccattagcctaaaagtcgttctattgtataagtttcatatgtaccaccgtcaagtttattcgcttctcacgaaaagttgcgttatatacaatatacataattatattatctgataaacgttttccatagatccccaatcgaacttagtccgtactccctacactagacagaccgaagtaactttagatcaaatgttaggcaccattttattgtaattttatatgagtgtacgtgtgtgtccaggaataatcactaaaaatcgagagaaattatctagtgataggcaacttttcagcagcactgtgaattcagatcgcttacatcgcaattacaaatgtgaaacatttttaatttttgtatgtattcaatataaatagctttacgagctcacagcccataatcgaatggaataataataataataataataataaaatatgggagacgataaaagttaataatattttcatgtccaagttgcaggtccagataagaatttcacccattaaaaccgttttcttcgtagctgttatctatactatttaataaaaacctttaaaaacccaaacgaatagtacttttccatcaataatgacagaaatatatcttggttaccacacggtacttttcattggcaatccaataggtctgaaacatgtagtttcctgtgggaaagggcagagtttttggtagtcgggaattaatagtctcagaggtaagtttctccattataatgtcgtgctaaaaaacgtgggaatgattagttggaatagggaacac

SEQ ID NO: 31943 - DNA, 720 bp, DROSOPHILA
atgcagcccctgaagcgcttcacacaatgcggcagtctgaccatgctcttcggcatcttcatcatcctcttcggggtcagctccacggctctgaccacttttggcaagaccaacaatcagccgcctcccacgcacgtcccaattgttaaaggacgagagtgcagtgcccacgatgattgcacggcgatagatcgcaccagctgcgtcaaggatcccaatgactacaagctgcgttgcctatgcggcgacgactcgcctccttcggctggcagctgtccagatgtcctgaaagaggccgctgctttcttggaggcctcctccgtgatgagccagtgcctcaagtggcatgtgagtttcccagttctccagccctcctccagctccactccagttcttggcggggccagaggtggaccgctttatggcggcgcaatgtcgatgtcggatttatgcctgcgtcacaagtgcaacagcaacaacgactgcgaggatggaatggtgtgccagtacgagaacagcaaccgcaccatcggagtggccaagttcatgtccagcaagaccaagctgtgtctctgcgacaacgacaacggatatgtggaggacatcctgcacgacatctgcagtggagctaatcttcagggcctggtcagcttcttggtctcgatctgctcacttctggcgccctttttggtatccgcccacatgcgaaagcatttctag

SEQ ID NO: 31944 - protein, 239 aa, DROSOPHILA
MQPLKRFTQCGSLTMLFGIFIILFGVSSTALTTFGKTNNQPPPTHVPIVKGRECSAHDDCTAIDRTSCVKDPNDYKLRCLCGDDSPPSAGSCPDVLKEAAAFLEASSVMSQCLKWHVSFPVLQPSSSSTPVLGGARGGPLYGGAMSMSDLCLRHKCNSNNDCEDGMVCQYENSNRTIGVAKFMSSKTKLCLCDNDNGYVEDILHDICSGANLQGLVSFLVSICSLLAPFLVSAHMRKHF

SEQ ID NO: 31945 - DNA, 4866 bp, DROSOPHILA
aagagagagagggatcacaacgatagcattcgtaagaaacgatagcattcgtcgtgatccctgactatcagatacccgttactcagctgggcggtttgaaaaaaaagttcgatagaaattttttttgtctacgtctctgaaatctgcgggcccaatctttctagcttatatagttcctgagatcttgaagtttatacgggcaaaaagacaaacggacataaccagattgactcgtttattgatcaataatatcaacatggtccgaatagtttctttctgcctattatatacttttcaacgaatgtagtacacccttttagtctagtagtaacgggtatgattacgcaaaacacttattcgtactggcaaaaaaaaatttttcatgtacatactgtattccccatgtctggccgattggcataacagttgatatatatttaacaggaggacgactccgaagatgagaacttgagcaacgaccattctgagcgatagaaagaatctagtcattggtgccttgaaaaacaaggtttatattgtattttatatgtaaataaaaatgttgatataaataagttgatagaaacaagaggtcaattagggaagtctcaaagtgataatattatttggaaaaaacacaattcccccatggcacatagacgtaatttcatttcttacgagtataaatgtgtttatatttagcattacattataattattggaatcgagacaatatgcatgtatattcgactgttatgtatttgctggaatatgctaaaatatttatgctatcttctcttggactaaaaatgcacaaactgaatgcttcacttccatcaggaatgcaatgcaggcagcccagtcccttaactggtttgcatctaaaaggtggcccgttcgcgaagttggccacaatgctacaacgctcaatagctttggacaacttgctcaggttctgcggtttgcggttgcggtcgcatcgtaatccatcgctgagtatttagcaggtgcagcgattctcgccggaaaggctgcccagactgaaggttcctaggccattggagccgggtgatttcttgtctttgctctcatcgttatcaaagttgtccccctgggagaaatgtgaaggatttacctattaaatattgggttattttaaagcatcttacccgccgctccctttgctcgcggattttacgggccagggacaggaaggcatcttcgatattgatgttggacttgcaagacacttcaaagaagggcatatcgaagttttcggcaatctggagagagcataggatggtgttattggtgtcgatgctgcacttcctgcagtcacttaccttttcgcccctctccttgtccaccatgcgctgggtggcggagcactcgcatttgttgcccgccagcacctttaccacgtccggcgaggcgttctcctggatgttgcgtaaccagtaggacaggttgttgtagctctccaagttggtcacgtcgtacatgagtaggatgcccatggcgccccgatagtacgccgtggtcaatgttcggaatctctcctggccagccgtgtcccagatttgcagctttatgggtactccatcgaggttaatcagcttctgcttgaagtcaatgcctgggagataaaatgtgatgctagtgggttactgcacataacagccgaggtagaaataatagttttcaaaacaaatggaaaacgttaggatttaaaaattcaaaatcaatcaaaatcaaacaagtgtccgatttcgaaaatagtaaataaaaaaatttattttcaaatttgaaaatagtattttggggtctctactctactctctactcacctatcgtagagatgtatgtgtcgtagtacttttcatcgcaatatctgtgaacgatgcaggtcttgcccacattggagtcgcccagcaccagaactttataggtggccacaaagtccagtgccatgttgacggagctggcggagttttcgttaggaattataatatcaactgcggaggttttcggttacagatgggttgacgttgttgttattggtagttgggtggtgcaagtggtggtggtggttcggttttggctacgaggggtagtagcgggctgcagcttgtgcttgtttatgtatccgctggcctggcttgtttgttgctgctcgcagctgttccagatcgagttgcagcggcgtcacacggatttgttgtaaattttcacagtttccacaacagaatcagctcggagctcatgctaattgacaagtagcttctggcataagtcgtacgatttaacctttatttcatttgtattttaatgtaatatataagtggtgttagttgtgcatagtgtgccacttcggaggcggagtcgaattacgccgtatgcgtgaatcaacctcgaagcactgactgcgaaacaaaccagcccgtggatgcggagtggagtcaaataatcaatagacctgcgcacgcgcagcagcagcagcattcagttgccgaataatcgaaatcggaattcaaatcgagggtgttcgcgggttctctagcttatcaatagtaataatattagacatacaatagatatgaagttacatgttcaaaaatagagttgttcattgcttaacttagtgcggttgggtaggaagagggcgtcgaatccagtgccgcttacatcacaaagaccttttcgaccttggggttggagaacttcgtattggtcaccggacaggtgacggtaccgtcgtctttggtgatgtccggcagagccatctgaccaaagatctgtccgttgggcagcatcatcggctgattgtgctcgttgagcggcagccctgtgacccggcatataagacggctctgcacacagtgcgagtatggcaacttgagagcgatgcggttgagatcctcctgacacaccgggcagttaaggttacggcaggtctgagcatagcagtggggcgtcttcagggccgacagaccggcctgcacggctgccgagaagacggacgtgctggatagctggaagaggcggtagttctcttgacggaagtccaacaccaacttttgccaccgctgcggatccatgtacttgcggtagtgctcggcttgggcatcggccggataggccagcagggccatcacgtggcagatctcattcagctgagtcttctcgtatgcggggaagtagcgacgcgaatgcttcacagcctcaaaacgctgattttgacgcacgagctcgatgaactcttgcaccctcaggctgaattcaatggtcgagttgatcttgcggagcttagacttattgtctatgcaccaaagcacgcatttggtggtgctgtgactggccaagtcatcctcgacctcgcgcgacgtctgaaaaatgtccaggttggtcaggtggcgcacatcggacttggcggccagctcctcggccgtttcatagtatcccatgcgcagcaggtgctcgatgaccaggcggtctagtcggatccgcttccattggtccacggaaccctgccacaggtcgcctgtaacgctgcttggcggtgtaatgccctttaggtggtccagcttgcgcttgcagatctgtgtgacgctcagctcatcattgatgctctcctcggccttgcgcttgagcacctgcaatttctgcgctacgttatccaccagcttggtgacctcggccagaatgggaccctcctctgcttctagggccttttccacctgacgcgatacattgatcacctggtccacctccctgtcgatgatcttctgtgccgaacggaagcgcttgttcagcatctcgtatggcacttttagggtggcgtgctccaacgccttgatctcggacatttttgcgtttcggttgcgatgcaatttggttttatcctctttttagagacgcaattgcgttttcttttccttctttgaattgctttgttttgcttctgtgggctaagagttgccagactgtcagcagtcagcttaatgagcaaaaggtgctgttcagttaactattttctaacgctaattatatgattactaatagatgtatatgaatatgatatataaacaaaagtgcgtatattaaaatcttattgatggtgtccttctagtgccgggatgcatagcaaccgatttcataatgttttagaagttctataatatttaaataaatttagctatacttctgtgtgttttcccgttaaacttctaggcagctctagcaaagtgtacagcgctgttgccgcactgttaactaataacagctgattgaagcccagtaaacataaacaaatgtttttctaaacatttttctaacgaattaaagataataaatatacataatctccttgggattacataaagactaacttggcaaagtaagtaattgaaactattaccttacctatatggcaaatgaaaactaattttagatggttaaagcaactaccagaggtgcgacttccaaagcaacgaaagctggatcaaagggagcaacgaagggaaccaaggataactccaagcgatatcgtgacaaaatcaaaaaggatccgattaagtatcaggaataccgagccagagaaaccgagcgaagtaggatttatcgcagcaaactgaaggaagtggttaaaaagaacaaaaaagttttaaaaacaaagcgagaaaccgaccgacttagacagcaaagatatcgggagaaaaagaaggaggagctcgccaatcaacgatcattggaggaaatgctgaagaagctggaaaagtcactcccagccaagatgtcccgaaagattgaagtgatcaagctattgtatagcaaatacgttgagcctgaagtcaaggaatcctaaat

SEQ ID NO: 31946 - DNA, 1833 bp, DROSOPHILA
atgtccgagatcaaggcgttggagcacgccaccctaaaagtgccatacgagatgctgaacaagcgcttccgttcggcacagaagatcatcgacagggaggtggaccaggtgatcaatgtatcgcgtcaggtggaaaaggccctagaagcagaggagggtcccattctggccgaggtcaccaagctggtggataacgtagcgcagaaattgcaggtgctcaagcgcaaggccgaggagagcatcaatgatgagctgagcgtcacacagatctgcaagcgcaagctggaccacctaaagggcattacaccgccaagcagcgttacaggcgacctgtggcagggttccgtggaccaatggaagcggatccgactagaccgcctggtcatcgagcacctgctgcgcatgggatactatgaaacggccgaggagctggccgccaagtccgatgtgcgccacctgaccaacctggacatttttcagacgtcgcgcgaggtcgaggatgacttggccagtcacagcaccaccaaatgcgtgctttggtgcatagacaataagtctaagctccgcaagatcaactcgaccattgaattcagcctgagggtgcaagagttcatcgagctcgtgcgtcaaaatcagcgttttgaggctgtgaagcattcgcgtcgctacttccccgcatacgagaagactcagctgaatgagatctgccacgtgatggccctgctggcctatccggccgatgcccaagccgagcactaccgcaagtacatggatccgcagcggtggcaaaagttggtgttggacttccgtcaagagaactaccgcctcttccagctatccagcacgtccgtcttctcggcagccgtgcaggccggtctgtcggccctgaagacgccccactgctatgctcagacctgccgtaaccttaactgcccggtgtgtcaggaggatctcaaccgcatcgctctcaagttgccatactcgcactgtgtgcagagccgtcttatatgccgggtcacagggctgccgctcaacgagcacaatcagccgatgatgctgcccaacggacagatctttggtcagatggctctgccggacatcaccaaagacgacggtaccgtcacctgtccggtgaccaatacgaagttctccaaccccaaggtcgaaaaggtctttgtgatctccgtcaacatggcactggactttgtggccacctataaagttctggtgctgggcgactccaatgtgggcaagacctgcatcgttcacagatattgcgatgaaaagtactacgacacatacatctctacgataggcattgacttcaagcagaagctgattaacctcgatggagtacccataaagctgcaaatctgggacacggctggccaggagagattccgaacattgaccacggcgtactatcggggcgccatgggcatcctactcatgtacgacgtgaccaacttggagagctacaacaacctgtcctactggttacgcaacatccaggagaacgcctcgccggacgtggtaaaggtgctggcgggcaacaaatgcgagtgctccgccacccagcgcatggtggacaaggagaggggcgaaaagattgccgaaaacttcgatatgcccttctttgaagtgtcttgcaagtccaacatcaatatcgaagatgccttcctgtccctggcccgtaaaatccgcgagcaaagggagcggcggggggacaactttgataacgatgagagcaaagacaagaaatcacccggctccaatggcctaggaaccttcagtctgggcagcctttccggcgagaatcgctgcacctgctaa

SEQ ID NO: 31947 - protein, 610 aa, DROSOPHILA
MSEIKALEHATLKVPYEMLNKRFRSAQKIIDREVDQVINVSRQVEKALEAEEGPILAEVTKLVDNVAQKLQVLKRKAEESINDELSVTQICKRKLDHLKGITPPSSVTGDLWQGSVDQWKRIRLDRLVIEHLLRMGYYETAEELAAKSDVRHLTNLDIFQTSREVEDDLASHSTTKCVLWCIDNKSKLRKINSTIEFSLRVQEFIELVRQNQRFEAVKHSRRYFPAYEKTQLNEICHVMALLAYPADAQAEHYRKYMDPQRWQKLVLDFRQENYRLFQLSSTSVFSAAVQAGLSALKTPHCYAQTCRNLNCPVCQEDLNRIALKLPYSHCVQSRLICRVTGLPLNEHNQPMMLPNGQIFGQMALPDITKDDGTVTCPVTNTKFSNPKVEKVFVISVNMALDFVATYKVLVLGDSNVGKTCIVHRYCDEKYYDTYISTIGIDFKQKLINLDGVPIKLQIWDTAGQERFRTLTTAYYRGAMGILLMYDVTNLESYNNLSYWLRNIQENASPDVVKVLAGNKCECSATQRMVDKERGEKIAENFDMPFFEVSCKSNINIEDAFLSLARKIREQRERRGDNFDNDESKDKKSPGSNGLGTFSLGSLSGENRCTC

SEQ ID NO: 31948 - DNA, 2210 bp, DROSOPHILA
ctcgcggaagaaccttaggcgctctagaaagtattccactgggcgaattacaggactgtttaacctcctaacaataaatataacaacaaaaatttaagtacacaaatatttatttcaataattttagcctcacaattcttcagcatattggataactgcctggcgagagatgcgattgttggggcagatggaaacagccgggaatggcacattctccactggaaaaagaggatccttcagattggtcacaaaggattgggccacgaactgctcccatgttagcgagagcaccacaatcagggagacggtggtggccatgtgtaccagcaaccaaatcaatctattaaaatatgactatgccggcttacgttgcgtatgagtaatatttgggaaaacttttgtacctttgtcccaaggtcaagtccggtgacaaaagcttattgtaaccctgtagggatatgtttctaaccagatccgccatatccaagcagaaggctgagcccaaggactccttgcgtttacctttggaattatgttccccggctgccttgggattcttaatccaccaaatggcattggatgttgatgccagcttgaccatatttctgaggtctttatttactccaatcctttccgagctactgtttgttgaactctgactggtaactaagagtttgtatagcttacaagtgttcattgatgaataaaagtatcacgaaataggcgtgactagctaatgcgtttccttcattaatgcggttaattatgattagtttagggggaactttagaagttaaagcagaaaggttgtactttatgacatttttaattgccatagtattccattggaatagtctttgacacactgttcatgttactaatcttaagcttaatcctattaaatattttcctgtacaagatgtagcagttcattgtctagctaaagctgagtcaagtctttaatgtatgtttatatgaagttaaccatgctagtccagtcctatcccattggccagaagggctggccaggataaatgcgggatccgggaaaggcgtactggttgggattgaccactcgggcgatatccgtgtagctgcgaccgtcacgcttcggtgtttgatggtatccacgggccggggagccagacacgacgatcagaagaaggagcagggcgaccataaggcaatggatggctccttggacggacatggcttgcaagaattgatatgtgagtgctccgcttccagtactgaactgcactgatgccggtgaccagcctatttatatggatatcgtcggctgatcggttcttggcgttctcagacgcttggcttatcaatcaggttttcgcaaacgactgaagcccccaagagaattgctttgccgctcacgtagatctcgtctctttgtgtgaaatggatttttatgatcactttgttttctcaatatttactgacacggtgcccagcgccaagtcattcacaccgcagcccgttatttcatccgatcggcagtgagttggcatatacatatgaacatccaacacctgatcttgactctaattgcactgtgaatgatctagccatatgtaggcaactcgacccagcctctcagcataagtgctcgctcgtacgtatttaaattgtaattagcgactctgtcggggtattggagtaatgacgtaggtgcgccatctgaggcggcgtattagcacattcttgcataaacaattgccatgttcggcgcgattagttgccactgacttgggcaccgaagtcttccttcctgtactgcgatctggtttctggtttcacttcctcaatgccggtcgtcggtgctccggggggaagtcctagctgaccagctgcatctcggcgtgaatcacttgcttactcgtgcgcaagtacctcgatgggatcgttaaaagactatatataccacagttgtgagccatgataagtccagtcggatgatgacttgggtcattaacggatcgaagaatttctggcaactatgtctgttgaggttttagcaggttattaaatgattttggcattaagcttcttccggcaatacttacggctttacaaaggttgatgtaataagaaaactataaaaataattgagctattcatttgccaattttccagttatgcgaaactcattatttaggggatatttagtcaatgattcgttcgatcaactacaa

SEQ ID NO: 31949 - DNA, 210 bp, DROSOPHILA
atgtccgtccaaggagccatccattgccttatggtcgccctgctccttcttctgatcgtcgtgtctggctccccggcccgtggataccatcaaacaccgaagcgtgacggtcgcagctacacggatatcgcccgagtggtcaatcccaaccagtacgcctttcccggatcccgcatttatcctggccagcccttctggccaatgggatag

SEQ ID NO: 31950 - protein, 69 aa, DROSOPHILA
MSVQGAIHCLMVALLLLLIVVSGSPARGYHQTPKRDGRSYTDIARVVNPNQYAFPGSRIYPGQPFWPMG

SEQ ID NO: 31951 - DNA, 2399 bp, DROSOPHILA
gctcgctcgtacgtatttaaattgtaattagcgactctgtcggggtattggagtaatgacgtaggtgcgccatctgaggcggcgtattagcacattcttgcataaacaattgccatgttcggcgcgattagttgccactgacttgggcaccgaagtcttccttcctgtactgcgatctggtttctggtttcacttcctcaatgccggtcgtcggtgctccggggggaagtcctagctgaccagctgcatctcggcgtgaatcacttgcttactcgtgcgcaagtacctcgatgggatcgttaaaagactatatataccacagttgtgagccatgataagtccagtcggatgatgacttgggtcattaacggatcgaagaatttctggcaactatgtctgttgaggttttagcaggttattaaatgattttggcattaagcttcttccggcaatacttacggctttacaaaggttgatgtaataagaaaactataaaaataattgagctattcatttgccaattttccagttatgcgaaactcattatttaggggatatttagtcaatgattcgttcgatcaactacaattattagtcgcttattaaaatatttgtcagccatgagaatacagaatcagaatattctgtcgtgcataacagatatggttaggtattaccccaaagaaatcccttggtgtgagatcccagtcagggaccttacccactaccccactgtcccaatccccacatgaaacgatgtcgcgcctccatttcattacaattaccatcacgttccggcgatccactggacgcgactactccgcaaatgcgggctgatgatcataaatcagttgatcgtagattaatatacacgtacgcacatgtagcgggcttaaagtgcttaaaataattaacagcttgtggttagatgtaactttcgctgattttattttaatggctaatactgctgacaacaatgcgagttcagacggtcgaatcgttaaccccaaagggcggaatatggagtacggggcaggaagcgactgcctccaggaccgatgtatggatcgggatttataactcttcgaatgtccgagtaagtgcgtcctttgcggtttccagaaggcttgcgtcctcctttggagtatgagtaagaggagtggcctgagtaagctgggtaagagtaggaattatatgcgggatagttgtaaccatatcctccagcatagcttccatagccgtagtttccctgaccgtagcctccatagtcttgtactccactatatccagtatatccttttcccgtcttccaggacttgaagaacagagcgccactcgaatccaggcagcacgcaatcagcaatgttaggatagtcaatcgggaatcgcgggatctcatcttgcttcgatttcgaatcacttccagttctgacagttcatctacgcagttccctctatttatacccttgtggattggagttgggcacattgtgatggtgacacattgtggtctagctcatttcaattctttttttttacgacttcttattcccataaacacagtcggaatctctggaagattagcgtggccaatgggcaagcgacttaatgcattatgctggatttattatagcacgcggattggcacgatcagcatgcggagcacgcttcatccgctggaagactgagctatcgcagatggtagatggtcagtatacaacggacatctcataccccaaccattatataaacttccatataaatacacactgctgagatcgtatgagtgtacttcaaataagaatttgaattaattaaaatataacactaacatacagagatctgtaaagactggacggatactactagtaagtcccttccatttattcctctattatggatttttcatcacttgaagtatctctttcatcgcctgtatctcttattcttttatacttcaatctgtatactacatactatatatgtatctcaatttttgttttcaagcttcaggtgtttgtttacttttcgtctgattattattatgatcatctctctgagacctattttggagagcggttaagatctctctggttgcggacactgattttcatcatgctctcactgatcgccggacaggttttcaatgtttaatcaagcatcaacgattatcgcataggcggagcgtaaaagttccccctcagttagagtccgccttttgtggtgatcactgctcgaacacccgaacatgacgcgatcttcgccagcttggtgtgctggccaggcctggctcgtctggcttttggcatccatctggatacgcacgtgtctcgcgcaatttgcagtctcctcgtcctccgccggcggagctgttgcctccgccggtggcgtcactgtgg

SEQ ID NO: 31952 - DNA, 399 bp, DROSOPHILA
atgagatcccgcgattcccgattgactatcctaacattgctgattgcgtgctgcctggattcgagtggcgctctgttcttcaagtcctggaagacgggaaaaggatatactggatatagtggagtacaagactatggaggctacggtcagggaaactacggctatggaagctatgctggaggatatggttacaactatcccgcatataattcctactcttacccagcttactcaggccactcctcttactcatactccaaaggaggacgcaagccttctggaaaccgcaaaggacgcacttactcggacattcgaagagttataaatcccgatccatacatcggtcctggaggcagtcgcttcctgccccgtactccatattccgccctttggggttaa

SEQ ID NO: 31953 - protein, 132 aa, DROSOPHILA
MRSRDSRLTILTLLIACCLDSSGALFFKSWKTGKGYTGYSGVQDYGGYGQGNYGYGSYAGGYGYNYPAYNSYSYPAYSGHSSYSYSKGGRKPSGNRKGRTYSDIRRVINPDPYIGPGGSRFLPRTPYSALWG

SEQ ID NO: 31954 - DNA, 2429 bp, DROSOPHILA
ggatttgcaccacccaaccgtcagcaaccgacgcctcctggctggccacccggctggcagtggggagccggtggaaatcagaatcaacccggatttgactgggttcaaacaggatttgcaccaggctggaatggaggtggagggcaaggaccaggatggaatggtccaggatggaacggaggcggtggaagaggacctccaccaagaccaggttttaacggcggcggaccaccgccgccaagaccaggatggaacggcggcgggccaccaccaccgatgccaggctggaatggaggagggccaccgccaccaaggccaggatggaatggcggaggacctccgccaccaaggccaggctggaatggagggatggaacaggaatgggataactatccacgcctccccgatcagccggatcccaatgatccaaacacgaattggaatccagataatgagtctagcaccactccacaaacgccaataccaggacccatctttccaacgacaacacctaagccagagcccacctttcccacgatccagccacgtccaaccgctcagccaacgaaggatacgctcataataggaaccaatcgaccgccgttggtgccgccccataatccggatccacccacgcccacttttcccacttggatcgtgccggagccattgccaaaaccattggacgaactctccgaaaatcgtgctattatattccccagctctagcaaatatatccatgtgccaaacccggaggttccctcaattcccattgatgtgagacgaagatgaatcttctaagagggagttccccgattcacacttgttgtatatatattcgtagaccattgttcaattgctccacccgagatcgtctttgtcataagttcaaaacaggttctaaaagctcgttggaaataaacgaaattttaataaattacacataaacaaatgagacagcacatgattggatgagactggggtatctgacggatgaacgttagtaaccccgctgcttgtaaccacctccacctccgtaaagatcctgattcttgtgcggataatggacactggcaggatgagacggctgagagtagtatccaggcgaaggacgcactgaccaaggtggtggatagtagtcatttgctgccggaaccggtcgtggtgggtaataggcatagccacctggatgcgtctgctggtggctaccaccgtagccgtagcctccaccatagtgatagtcgtagccctgctcgtagccctcctggatgagtggacctggtccaggatgtagctgtggatcaactggccttgctggcggataatgatttgggtcgccgaacagaagctccgcaatcttatcgaaagtgggtctaccgtgggccaagctggccaggattagcactagaatcgcagccaacaactgcatcttgggatatgtagagcaattttgctgatagtcccaatgtccatgcggcttttatagccagcagcagcacatggcgataagaaagatgaatggaatcgagtggaagaaccttgggtaatggaacaaatgctatatgtacatatgtacttataatactaatctattgactggtaaacaaggttgactgggaaagctttcgttctctatataaagggaggatcataactcatgatcatcatctatgcaaagatgagttatgaattgcttgggaaatccctaaaccaaaaatgcgtctcaacttatctattacttggctttaggccgcaaatttatacattgcaagaaatttatatataacatttatatttataaatttgtatatgggtatttctttaaaaaattcatttatttgttcaaatttatggctagtatctatgcatatgcacattgttgtgttatattttcaacttttgctttcagtgtagactctctcattcaatttactagaaagaacactcaatgagacttaaactacatatctgggcattgagcccctgatgataaccccaaaaatagacactcagctaagctctcgtgtcatcagatctcaccatgaaatacacgcgccgtgagcttctgggctttagtgtacccaaagacgccatgttaagcaggagggtcatcgcattcgccgctctggccctcatccagatagccagcggtcaggcctcgcaattcagcagggacgaaagtcaggaggatcagaagacggagtttaacctggcctccactctgacgggaggcattaccagcagtcgccatcgccagcgggccaatctcaattcgcaactttatcctggccttggtcagctgggatcgggttatgcgggcgcaactggatccatcgacgatgcccatggccatgagcagggtggctctggcgtacgagtggccagtacgaactccgttgtttttcctggcaaccagtcaccaaatccgg

SEQ ID NO: 31955 - DNA, 429 bp, DROSOPHILA
atgcagttgttggctgcgattctagtgctaatcctggccagcttggcccacggtagacccactttcgataagattgcggagcttctgttcggcgacccaaatcattatccgccagcaaggccagttgatccacagctacatcctggaccaggtccactcatccaggagggctacgagcagggctacgactatcactatggtggaggctacggctacggtggtagccaccagcagacgcatccaggtggctatgcctattacccaccacgaccggttccggcagcaaatgactactatccaccaccttggtcagtgcgtccttcgcctggatactactctcagccgtctcatcctgccagtgtccattatccgcacaagaatcaggatctttacggaggtggaggtggttacaagcagcggggttactaa

SEQ ID NO: 31956 - protein, 142 aa, DROSOPHILA
MQLLAAILVLILASLAHGRPTFDKIAELLFGDPNHYPPARPVDPQLHPGPGPLIQEGYEQGYDYHYGGGYGYGGSHQQTHPGGYAYYPPRPVPAANDYYPPPWSVRPSPGYYSQPSHPASVHYPHKNQDLYGGGGGYKQRGY

SEQ ID NO: 31957 - DNA, 2782 bp, DROSOPHILA
gccagctgctggcgcagtcgtcgctgctgattctggatcaggtgaccagcaacatggatatctttgacacattcttcctggtggagtacctgcgccagtggtgcagcggtggtcgcattgtgatcatgacgcttcagcctcccacctttgagattctatccatgtgttccggcgttctgctgctctccggcggaaggaccgtcttctccggcagtcgagcggatctaccacgacacatgggcgagctgggctatccatgtccgccattcaagaacccagcggactattactgtaagtaactagtgattgagtgcagctcgaatgggtaatcatttgttcttctctagtggatttggtcaccctggatgacctttcagcggccgccatgctggagtcctcggcccgcattgaatcgctggccaacgcctgggatcagattaactcggagcccccattagctgcaccgcccgcctcattgcccaatttcacaatgaaggctggcttctttggtcagatcagcgccctgatcaaaagatttgccggctacaagcagccgggatcactgctcacctggatcagcaagctgatcgccgccgcagtcctctcccttttcattggctgcatcttctgggatgtacccgcttccgatccacagctgagctaccacgatcgcttgggataccatcattgcgtcatggtgctagtctactggccactggtcatgctcaccattcgcgacacgcaggaggatcgccgccatgcggagcgagacatacgcctgggactctatacgcgcagtctttatatcattgtacaggtatgatacgattagatatgatataatatgtaaccagttttcatgtatcataattaaatccattatattgtatttggtctgtttttagagtctcctgggcctgtttcccagcctctgcatctggctcgcctacttgcttcctgcccacagcatggcgggactttacacatattccaacagcagcgatacgggcatatacctgtatatgggtaagctatcttggacaccacctcccactttcccctggttaatactcccattgattcataggctacatgctgctctacttgacgctcattcagacattggcactgttctgtgcccacctgctgccctgcaaggtctcggcgagcattgtcaacgggctcatcagcctggcagtggcggcagtgggtggctacctggtgcatccccagaacctggcccagttctggtcctggttgcaattcgtttcgccagaacgttggctgctgcccgttctggtgcaggatgagtacagtgccgagacgttgtctaactccgcaggactgcagttgtgccgaaataagcaggttggtgtgctcccttctaagggattctcatggccatgacaaaaattaaactcatataattgcccaatttcaggtgcagcaccaggagattattgtgcaacagccctgcccgccgcccaacggcacccaagtgctagtcgacttcgagctgctgccccagcagcacgtgctggatcccacgcccacctatgaccagaccacctcggtggctttggttctgggttcggtgctcgtcttttgcgtcaccttcatcgtctttttgtgcaattgtcgcggcgcctgtcgaaggaagcgtagccgttaggcagataccgtgactgggaggggagctggccaggatctggagtttagatggcacaggctaccgaactgtacattccatagaaactaattcttgaaataaatagtgtttagtcgaggcagtgttcgtttaactaactaaaggcaagtggttttattgagcttggaatggtcataaggcagtttgatggggtttgattaacagggtgtttctataaaaatacttaaaacgctacaaatgttatcaaaaatatttcaaatacaactacaattatttcagatatgtaattttgctacatatttaaaaatgcctttctacgtaggttatagatttcagtttagaacgtaaatcaaattaactgaattgagaattatttacaattctcttatgtattcgacttgagaagttgggatttaaagttgaactttatggaaatcaaagaaagagcttaaaaactgggaatgaatcgtatactcaagagtgtgttgaacctaatggtggaacaatcgcagattggtatgggccatgatgataccgtgctcatcgcaggcggcaatgacaccagcatcattggtggatcctgcgggactggctatgtaggagacgccgctctgaaagaatatttgggcaatttaaaaaaagaagctcaaaaatactagctaactaactcaccaggctagcgcgatcgatattatcacggaaggggaagaaggcatcggatcccaaggccacgccactcagctgctttaaccattccactttttgctcactggtcagttgggctggtgccttatcgaacctatatagagaagagtgtggttagggtctgcaaatatgtgaaaaatctctacaacttacattccctcgaactgcgacaaaggcatgtccttgcccacagttccgtttacgtaattgtcgattgcattagagatctccgcccgcttcacaccagccttgaacttcatgccggccacgctgggatgctgacgcagccaccagttgtccgccttctcgcccgccaagcgggtgcagtgaatcctcgactgctggccggcaccgatgcccacgacctggccatcgcgggcgtagcacacggagttgctctgagtgtac

SEQ ID NO: 31958 - DNA, 648 bp, DROSOPHILA
cgatacgggcatatacctgtatatgggctacatgctgctctacttgacgctcattcagacattggcactgttctgtgcccacctgctgccctgcaaggtctcggcgagcattgtcaacgggctcatcagcctggcagtggcggcagtgggtggctacctggtgcatccccagaacctggcccagttctggtcctggttgcaattcgtttcgccagaacgttggctgctgcccgttctggtgcaggatgagtacagtgccgagacgttgtctaactccgcaggactgcagttgtgccgaaataagcaggtgcagcaccaggagattattgtgcaacagccctgcccgccgcccaacggcacccaagtgctagtcgacttcgagctgctgccccagcagcacgtgctggatcccacgcccacctatgaccagaccacctcggtggctttggttctgggttcggtgctcgtcttttgcgtcaccttcatcgtctttttgtgcaattgtcgcggcgcctgtcgaaggaagcgtagccgttaggcagataccgtgactgggaggggagctggccaggatctggagtttagatggcacaggctaccgaactgtacattccatagaaactaattcttgaaataaatagtgtttag

SEQ ID NO: 31959 - protein, 171 aa, DROSOPHILA
MGYMLLYLTLIQTLALFCAHLLPCKVSASIVNGLISLAVAAVGGYLVHPQNLAQFWSWLQFVSPERWLLPVLVQDEYSAETLSNSAGLQLCRNKQVQHQEIIVQQPCPPPNGTQVLVDFELLPQQHVLDPTPTYDQTTSVALVLGSVLVFCVTFIVFLCNCRGACRRKRSR

SEQ ID NO: 31960 - DNA, 4876 bp, DROSOPHILA
caaactggcattggagttggacgagggagtgggagccggtgtcaccgggtcgtcttttccctccggtggatctgcgtagttgattatcaccgtcctgctcccgttgcccattagttgattgagtagccttgtcagtcgaatgttatagtaccgtatgtgcgtcttcgggctgttggccagtacctggaacaaactgataagcgtgtccaggggcgtgtccgattcgagtggcggcgaatcctccgtcagttgctgcaggtggaccagctgcagtctaccgcaacatttccgcaactgatcgccattcgtctgcttcacatggacggtgaagatcaggtgtgggcaatcgccgccctcagccaccttgtccatgaccctcgcgatataggcgtgtaccccgtgggacgtggccacaaagtgatctcgggtcgtccggcgattgcaacccttgaggttcaccaccaggtcgttcgtctccccgttcagttggacgtaacgcaccgaaacgtgaacttccatgttcgtctccaactcgtagatgcgggtgaagagctcgttcaaaatgcggctgaccacatccgacggatcggctccatggttaaatggtatcctgccacagctgaagactgtgctgatgcgtccaccgaggacctgatcaagcacttcgctgattgcctccgcgcttacttccagttgcaagtcagtgggagatgtcaagagtttgcggaacagatagaccctcatctcaccgggatgagggcactttatctccgggctgcataacataaaaggaaaaggaacaatcaaacggaataagataaacgagttttgtgcgcggctgtgatgtgtatgtttttactatttttttttttaagatagaatggacgctagcctgtcaattagcctactgttcacagtactggcaccgtagatccatcgagaaccagatcgagaacgttcacttctcgctgcctgcgacgcttccctgcggccaagccaaatgccaagtgccaagtggaaatgccaaagtttgcggcaggccaccgatcgcttctggttactgtggcattcaagtcgcctcacaaggaagccactgattggatatgtgcatctacactgctgatcaataaaagaaacttttcaattaatttgttactatttcagcgggttacagtatgtcaacgtctctgaaattggaaaacgtaaagttttttatgatttattggtatctttagtgctgttgaaatatttcttatttttatatcaatgattcttttttttcaattgcaatgttttcgagttttggcccagtttagactgacttggtttaaagttaacaagctgcagctgctgcctagttcttggccttaatgctttattttttggcttaatcgaattcactttaacattgaattttgcatgttgctctgccaatctaatggtgctgtttttggtgcttttgatgctttcgctgtattttgcgcagctccttcatcgaagagctaatccgtttgtccaacaggtgcaggactatcgattcctctgtcccaacacaacggccttcgaccaggagctgcaaatctgcgccaattggttggatgtggactgcgacaaggcaacctccttctacgacaatggccacctcaacgatctatatcgcaacggagacgagagcaaatctgccaacgaagaggaggcaaccttccaccttcaacgcgccgaaacgggtaagtgctagatttataccaaacaaaaattaagttaaataggtatcgaatagtatagtattattcgacggaaatgacagccatgactcgaggttattttataaagagatatctttaattgcaggcgatatacgtcgctctaaggagaaccacaataataacaatattaacaacaatcgtggagcggaccaaaaaccacgccatcgccacaattatgcccagacaggtggcagctctagttccagctccagtcccaaattggagatcacgcaatccaccaagcgacccatttccacctattacacgccgaccactttgggcagcaccaccacatccactacatcgaccacaaccacgacggaacgcagctattacaacaataattacaacaacaattacagcaacaatgacgactcgaagcgtaagaaacaatatggtcttgggttgcagtgcccaaaaattaatcacgatcccatccacagaagatttagacgatatcttcaagggttcacacagctcgcacttcttctccaaccgccacgggggtcgggaatacgacgaggaacccagccggcccaagcccaacgacttttcggattaccagcgcaagacgacccgggtcacgcccacgcgcggtgttcaacgtccaacttccggttcgagtagtccgattccatccagcaccgctgctcccagcacgaccaagtccctgaagaagatcaccctgcatgccaccttcaacacggacttcctggatagctcttcgcataccaagagtccatcttacagcgcggtcaccactccgcggcccagcagcagcatcaccagtcgcttcagcttcggttccaatgacttttccacccaggaaaggattcagccgaccacctataatcccaataacggtgcctatcgcttcaagaccacctcgccacccgccagttccacaaaggtgacgggtaagggagtccaggactttgagaagcgtagcaagcctacatcggcggctgtgcggaaacagaagctgggtccccaggagtccaacttcatcaaccaaaacgagtttgtggatttatcgaaaagcaccaagctgcagcagccacaacccttccaggtggcccagactaagcccaaccaattggaaccacattaccagcgacacaagccacaggtgacccgagttggtggccaggagccagctcccttctccgcaccaagttccaagccgcgttccttcaccagccgtggaagcatcacctacaaggccaccaccgagcgttatgttgaccaagagctgtactatcccaccaccagttccacaaccagggccaaggaggcctacacacccacaaccttccggcctaccacctataagaaaccgtacgagcagagctatcagagtcagcaaacccatcgacccacccaggcggccaccaaaaaggcggcacattcggtgacctcagctccacccactaccaccaatccgcatgccaatgtggatgaggacgatggacagtaccatccggagctgtacgaaaacgacttccctcgcaatcgcatccggttcctgcgcaaccgatccaccagctcgactacctcgaccacaagtgctccggtggtttccagcagacaaccacatggctttcagcaggcacatcatcatctgaagagccaacagcaatccgtctaccaaaaggagcgtgagcgggaacgggaacgtgagcgggaatcagacctcagcgacgaggatgagctcttcaagaccgctcagtcactgaactttggagcggccagcattaacaaattgagggcggacatctacaaggcggagaagacctcacagcagtacaactcgcagtacagtccgcagctggcatctagtccgcaggccagcagtagcagcagcagcagcactagcaccaccagtaccacaactagcaccaccacgaccaccactcgacgtcctccgaccactgtcagaaccaccactaccacctttacaacaagtgcaccacccgtggagaccaagaagtcggttaagagcaaaaaggagcagcagcagctggagaagaaggaccgtccagctggcaagaggccaccgcatgcagacgaggacaccagctacgattacgcctactacgacacggactgagcggcaatcctgcccaggactcgcactaactacttgcataaccacacccgatagcccatttccggaccacacataatcccccaaatatataggtgccacagtattttaaagagaaatccttccaagaatagcatgctcatcagaattccacactccatttgcgtatatatcttacttacgaaccgcttgacacccattaacactcgcgtacattcattcaatccgtttcagatgcgttctaatgaatttccatgcgtgtatctagttatttaaataaaaagaatatattgttaaattgaagcgaattggcagcgaaaaccgtatcgaggaccggctggggaatgttttcagaaattccattgaactattttatacaatattcaatgaattcactacgaaattatattagtcttaagttttcttgtaaataaaatgatatgtaattcgtaaacaaaattgtttgatattttttggtaccctaaagtaaacttcgatgcaaaaacaaatgtttatacttttaaatagatacaatgagaagtttttattttattaaattaaagttaaatctagtgaaaacttggaaacatgatatctgaatccttagtccttgaacttctggcgaacacatctaggcattgggaataggtaaaccagcatgttaaaggcggccaagcccacagcaaaagcgcaggaagcggccacatcgatggtttcctgtaaaataaataatataataatccgataagctaccatattatcatcccacttacatcgggatccggcaatcccagtcgctcgtgcatgaaatccgcgggtttgggacagatcacggaggcggtgggagtacagttgagtttcctcgactggaaggcgatgctgtgcagcaatgaggatgcgtagcgtgtgtgagtgcccttcgtgttgtcctgcagccaaggttgaagtcccttgaaggagctattggtacagacacctcaagtaactcaaactatagtatgaa

SEQ ID NO: 31961 - DNA, 2310 bp, DROSOPHILA
atgccaagtgccaagtggaaatgccaaagtttgcggcaggccaccgatcgcttctggttactgtggcattcaagtcgcctcacaaggaagccactgattggatatctccttcatcgaagagctaatccgtttgtccaacaggtgcaggactatcgattcctctgtcccaacacaacggccttcgaccaggagctgcaaatctgcgccaattggttggatgtggactgcgacaaggcaacctccttctacgacaatggccacctcaacgatctatatcgcaacggagacgagagcaaatctgccaacgaagaggaggcaaccttccaccttcaacgcgccgaaacgggcgatatacgtcgctctaaggagaaccacaataataacaatattaacaacaatcgtggagcggaccaaaaaccacgccatcgccacaattatgcccagacaggtggcagctctagttccagctccagtcccaaattggagatcacgcaatccaccaagcgacccatttccacctattacacgccgaccactttgggcagcaccaccacatccactacatcgaccacaaccacgacggaacgcagctattacaacaataattacaacaacaattacagcaacaatgacgactcgaagcaagatttagacgatatcttcaagggttcacacagctcgcacttcttctccaaccgccacgggggtcgggaatacgacgaggaacccagccggcccaagcccaacgacttttcggattaccagcgcaagacgacccgggtcacgcccacgcgcggtgttcaacgtccaacttccggttcgagtagtccgattccatccagcaccgctgctcccagcacgaccaagtccctgaagaagatcaccctgcatgccaccttcaacacggacttcctggatagctcttcgcataccaagagtccatcttacagcgcggtcaccactccgcggcccagcagcagcatcaccagtcgcttcagcttcggttccaatgacttttccacccaggaaaggattcagccgaccacctataatcccaataacggtgcctatcgcttcaagaccacctcgccacccgccagttccacaaaggtgacgggtaagggagtccaggactttgagaagcgtagcaagcctacatcggcggctgtgcggaaacagaagctgggtccccaggagtccaacttcatcaaccaaaacgagtttgtggatttatcgaaaagcaccaagctgcagcagccacaacccttccaggtggcccagactaagcccaaccaattggaaccacattaccagcgacacaagccacaggtgacccgagttggtggccaggagccagctcccttctccgcaccaagttccaagccgcgttccttcaccagccgtggaagcatcacctacaaggccaccaccgagcgttatgttgaccaagagctgtactatcccaccaccagttccacaaccagggccaaggaggcctacacacccacaaccttccggcctaccacctataagaaaccgtacgagcagagctatcagagtcagcaaacccatcgacccacccaggcggccaccaaaaaggcggcacattcggtgacctcagctccacccactaccaccaatccgcatgccaatgtggatgaggacgatggacagtaccatccggagctgtacgaaaacgacttccctcgcaatcgcatccggttcctgcgcaaccgatccaccagctcgactacctcgaccacaagtgctccggtggtttccagcagacaaccacatggctttcagcaggcacatcatcatctgaagagccaacagcaatccgtctaccaaaaggagcgtgagcgggaacgggaacgtgagcgggaatcagacctcagcgacgaggatgagctcttcaagaccgctcagtcactgaactttggagcggccagcattaacaaattgagggcggacatctacaaggcggagaagacctcacagcagtacaactcgcagtacagtccgcagctggcatctagtccgcaggccagcagtagcagcagcagcagcactagcaccaccagtaccacaactagcaccaccacgaccaccactcgacgtcctccgaccactgtcagaaccaccactaccacctttacaacaagtgcaccacccgtggagaccaagaagtcggttaagagcaaaaaggagcagcagcagctggagaagaaggaccgtccagctggcaagaggccaccgcatgcagacgaggacaccagctacgattacgcctactacgacacggactga

SEQ ID NO: 31962 - protein, 769 aa, DROSOPHILA
MPSAKWKCQSLRQATDRFWLLWHSSRLTRKPLIGYLLHRRANPFVQQVQDYRFLCPNTTAFDQELQICANWLDVDCDKATSFYDNGHLNDLYRNGDESKSANEEEATFHLQRAETGDIRRSKENHNNNNINNNRGADQKPRHRHNYAQTGGSSSSSSSPKLEITQSTKRPISTYYTPTTLGSTTTSTTSTTTTTERSYYNNNYNNNYSNNDDSKQDLDDIFKGSHSSHFFSNRHGGREYDEEPSRPKPNDFSDYQRKTTRVTPTRGVQRPTSGSSSPIPSSTAAPSTTKSLKKITLHATFNTDFLDSSSHTKSPSYSAVTTPRPSSSITSRFSFGSNDFSTQERIQPTTYNPNNGAYRFKTTSPPASSTKVTGKGVQDFEKRSKPTSAAVRKQKLGPQESNFINQNEFVDLSKSTKLQQPQPFQVAQTKPNQLEPHYQRHKPQVTRVGGQEPAPFSAPSSKPRSFTSRGSITYKATTERYVDQELYYPTTSSTTRAKEAYTPTTFRPTTYKKPYEQSYQSQQTHRPTQAATKKAAHSVTSAPPTTTNPHANVDEDDGQYHPELYENDFPRNRIRFLRNRSTSSTTSTTSAPVVSSRQPHGFQQAHHHLKSQQQSVYQKERERERERERESDLSDEDELFKTAQSLNFGAASINKLRADIYKAEKTSQQYNSQYSPQLASSPQASSSSSSSTSTTSTTTSTTTTTTRRPPTTVRTTTTTFTTSAPPVETKKSVKSKKEQQQLEKKDRPAGKRPPHADEDTSYDYAYYDTD

SEQ ID NO: 31963 - DNA, 2475 bp, DROSOPHILA
agagcttgagtgggacaacgcccagcacagtggcttgaggggatttgaactgcgtgagagcttaggtcggcccaaagttttgaccaatttgtaggttcagctcagcaaccaagcaattgaaatcgaaatcgaacaatctacaatggatgggggtaacaaaagagctgcctgggatgcctttgccagtgccccatgccatctgcccagtcatagttcactgccaaacaataggctgctttgctggggtggaaagttgggtttgaaattcacttgaattaaatgcgaatcagagtcgagtttcggccacagcgtctttctttcttcgaactgtgctggatggcttgttttctctttgttttgcattttgggtttcctttaccaattttttttttttttttttttggcatgataaatgggggcgcactgggggattatgcaacctgcgactgcaatttgcagccgtagaagaggagctttgttctgcagtttgccatgacaattacacttgccttaattgcagcgaaaccatcttccgctgtctgcagaacagaagcttcgaagaataaaaaaatatatgcaaaaaaaaaaagatatgtctaaatgtatataaaaagccatagacaacaatgatacattgttcaatctcagggtaattaggcagacccctgagtctgttttgcttttaatgcccaatgtacacatgtccgacaagcgtaatccgtaaatttgattgacttggcattttaattgagcgacccctatgtgcccagtagatccagtggatccgtttgtgaccacagcgatcgcatatcgttcggctggccaaaatgttaatgatgtcgctcgccatcgcaaataccaatcgatgctccgaaaaagtaaataaaaagcggtcccaagcactcacagaaccgagttagtagctccacagccttggaccgcagcaagtgctccggcacacataaatcacgagctcgtctcgcagttgtaagcgaaagtgatgcggcccgaaggtcacttgaccaccagggcaccaggcaccatcaccagcagcatcgtctcgatcggcaccagcatctgttcccactaaatacccattcgactcgattctggccccacttgaggtgccgtttgaagagcagacctaaccggatcacgatttctgacttctttatattgtttccactcttgcagcaacgacactttgcagtggatacggatacgcgcaggcccagttgctcgacgaggacgacgacctggccttcggaaggccctggcccacctacagcctacagaacatgcccaagacgcagttcacctgccacgacaagatcctgggtggctactatgccgatccggagacccagtgccagatgttccacgtctgcgtcaagctgcccggagtgggggtgagtaatgttgtgcccaggtgcaagtgcttctggttgagatcaaggcagcagtggctcatgtagcaaacgacattggcatagaaatgatatatttaatatgggtactaaatactacctttttttgacaataatattttctacagaatcaaaatgaaaatactttacaaatttcaatatatggtttattgatcaaaaattaccacctaaatgacaaacttacattaacctacaattttaagattttataaagagatacgcacagattaagcagacaatatagaatttttgatgtaggcaaatttgatagtgcgaattttttgatgcaacctatcacagcgtaaaactggcgggaaaaacgaaagacttaggcaacaaacttgccgacagccattggctcggttccgtcgcgccagctaaatggcaaagtggcacagtcagatgcgatgcactgcggaatgtgtgagatggctccaaatggttcgtgactggtccggatagccggatggctttggtgctggcaaaacctgaagaagaagacggttgactggctgacctttaagcgggggtttcgctgggagccgagtgcaaagtactacaaactagggtcttccaccggattcgtctgcgaatggagctcatctgcatccttctgcggaagacgcgatgttttccggtgcaaccatcgttgagttgcctggcatagggaatcgaacaatttggtcagctggcgaagctgtctttgctcattatactggatatccaacctttgacgttcccacatttcctggaacttgtccgtgtactcggcgattttgtcctggaattttcgcgtttgatctctcaattccatgtgaatggatagcatgagattgctctgcatattcagttgactgttcttttggtcaagttgctgctccaagtggcagtttctctccgtcaaataatctatgtccatctgaaggccctttagctttttaatggacatttctgcttctgagcgaattgccagcattttctgttcaactttttgctcaaaatctccatccgaaatgtcctcctcaga

SEQ ID NO: 31964 - DNA, 294 bp, DROSOPHILA
atgcggcccgaagcaacgacactttgcagtggatacggatacgcgcaggcccagttgctcgacgaggacgacgacctggccttcggaaggccctggcccacctacagcctacagaacatgcccaagacgcagttcacctgccacgacaagatcctgggtggctactatgccgatccggagacccagtgccagatgttccacgtctgcgtcaagctgcccggagtgggggtgagtaatgttgtgcccaggtgcaagtgcttctggttgagatcaaggcagcagtggctcatgtag

SEQ ID NO: 31965 - protein, 97 aa, DROSOPHILA
MRPEATTLCSGYGYAQAQLLDEDDDLAFGRPWPTYSLQNMPKTQFTCHDKILGGYYADPETQCQMFHVCVKLPGVGVSNVVPRCKCFWLRSRQQWLM

SEQ ID NO: 31966 - DNA, 2756 bp, DROSOPHILA
tttattgtctgttcttcaccttctattattgaaataattctaaaagtagaagtatagcagcataatttattatttacatgataatgcggttttaaaaagaaatatatattttatcggtctccccgacggggaattgaaccccggtctcccgcgtgacaggcggggatactaaccactatactatcgaggattacgaatgctttcgaatacttttaatgcccaatgaaaccctttccttaaaatttcaaggactaagctaaaattactctagtaaattaaagattagttagctaaactaataatgctgttttaacacctcctagcttccaacaaaatcgcccagctcctgcacgccaagatcctgcagacgtatcgcataaatcaaattttaagtaccgatgagcggatgggcgccaagtcggaagctccgcaaccagcctacgatgtgattgtctctgtcctgaatccgaaaccgagactcacccatgccaagtggaacatagcaatggctgtgaagagtaagtattgaaaaaccacaaaaagtcttcacttacttatgccaatttacattttcaatagcttacattgagccctggttggctaaggtgtccggtgtttccaattacacggtgcgatcgcagtggaagtaccgggtggccatcgaggctgatctcaagcaggtgcgcgaccagagcaaattggggcgacactacgccctccaggaaaccgctctgcctcatctgctgacatcgattgcccagaatctaagcgccagcaccaccgacaagccggccatcaacctggtggtgtacattccaccgtgccacatcgctccgcttcacatctacaacagcaaggatcagcggctgacgcggaacgacgtggatgccttcatttcgccaccctggggtggcttcatcattgctaatccgccagagcatgtgtgccttgcggccatgagcgatcaggaggcagttccctaccatgtcagcaccacggacaacatgcaggtgatgctggaccagctgcacaagctgctcgacatcagcagtgagcttcagatggagggcgttaaggtggtggatatcgagcaactggagccacgtcgctgggagtatgaagcatacctaagacgcagtgccattcgacacatatccacagcaagcagcacgctccagagcctcatcaaactgttgggtacgtttttaaagataccaatgaaggatgtttagtcaacatttttattattcctatttctgatattatacaaaactcagggctcttcgacaattaaaaatgaactatttgcaatttccgctttataattaagtagcttttaaaatggttgacgctatttttattgaatctgtactgcttgagaagtttaataaccaccttaattggacaatattatttaataatcgcttcctcctctcgtttagatcaaatcagctacattgtgatagacgacgaggtgggtgccgccattacaaattcctatgccgacatcttggctgccaaggctgctcttttggagcaccgactggcggacgcttcggtgctggccaagcgtgcgttcgtggcctcggagcgcggattctttgacgccagcctgctggcgcagttgtacttcccggacgagcagaagtacgccatctacattccactcttcttgcccatcatggtgcctgtactgagttccttcaacatgctgcgtggtgtgctgcaggccagacggaaggagaagcagtcgtaaacgaaccataaccaaatagtatcatccctcattaaaacaatattttctttataagctgttactggtgcgatttattggttcacttcggttttacgtagaacatgtcatcgtcagggcctcgcggtcgattagatttgccagttctatagtattccagcatattcaaactgtagactgccgcgcataacaagtaggtagaaattattcgtgccaacattttggtctatgagatcttaaagaaacctggtggaaatggatttaaaactcaaaaattttgatctgtcatagagagttgaatgctttgaaaacaagtccacgtgccactaatctttcccaaagttttcaacgttgggagtgctgtattttgatgccttggctgctggcggaccagcacggtccgctcagcgtgtgaacggcgcgtataggtcaggttcagcggcgagatcgctgccggatgaatgtcagacgtggcaggaggccagccagacacgcagtcggtgggtgagtcatatattgccaataagtcttgtttccgactgatttcaaaatatcacttaccgattataattacttgcttaaaggaatgcttattctattagctcatcattttcattagttagtgatcaataggtagaatttaatggtttttctgtttacctccttaaatttattgttaatttgaaagtatgtagagttggaattttttttaacagtttctcacaaatatttggaatttgtgggtattcttgaatgtgaggtatatctttttaaactagacaaagccatcgcaattgcatgccattgcaaatgcgcagatgaaggcaaacgaaaaagctacaaaaatgcggctgtcaaaactcgttaaacatggaattcaattggcaatgggcccccaaaaagcagatggaggggctgagggcggaagaccctaaaaaaaagggggcggggccggggtcggcgtcaaactttgcgcattaaaagtaaacagttaatttttaat

SEQ ID NO: 31967 - DNA, 1044 bp, DROSOPHILA
atgggcgccaagtcggaagctccgcaaccagcctacgatgtgattgtctctgtcctgaatccgaaaccgagactcacccatgccaagtggaacatagcaatggctgtgaagacttacattgagccctggttggctaaggtgtccggtgtttccaattacacggtgcgatcgcagtggaagtaccgggtggccatcgaggctgatctcaagcaggtgcgcgaccagagcaaattggggcgacactacgccctccaggaaaccgctctgcctcatctgctgacatcgattgcccagaatctaagcgccagcaccaccgacaagccggccatcaacctggtggtgtacattccaccgtgccacatcgctccgcttcacatctacaacagcaaggatcagcggctgacgcggaacgacgtggatgccttcatttcgccaccctggggtggcttcatcattgctaatccgccagagcatgtgtgccttgcggccatgagcgatcaggaggcagttccctaccatgtcagcaccacggacaacatgcaggtgatgctggaccagctgcacaagctgctcgacatcagcagtgagcttcagatggagggcgttaaggtggtggatatcgagcaactggagccacgtcgctgggagtatgaagcatacctaagacgcagtgccattcgacacatatccacagcaagcagcacgctccagagcctcatcaaactgttggatcaaatcagctacattgtgatagacgacgaggtgggtgccgccattacaaattcctatgccgacatcttggctgccaaggctgctcttttggagcaccgactggcggacgcttcggtgctggccaagcgtgcgttcgtggcctcggagcgcggattctttgacgccagcctgctggcgcagttgtacttcccggacgagcagaagtacgccatctacattccactcttcttgcccatcatggtgcctgtactgagttccttcaacatgctgcgtggtgtgctgcaggccagacggaaggagaagcagtcgtaa

SEQ ID NO: 31968 - protein, 347 aa, DROSOPHILA
MGAKSEAPQPAYDVIVSVLNPKPRLTHAKWNIAMAVKTYIEPWLAKVSGVSNYTVRSQWKYRVAIEADLKQVRDQSKLGRHYALQETALPHLLTSIAQNLSASTTDKPAINLVVYIPPCHIAPLHIYNSKDQRLTRNDVDAFISPPWGGFIIANPPEHVCLAAMSDQEAVPYHVSTTDNMQVMLDQLHKLLDISSELQMEGVKVVDIEQLEPRRWEYEAYLRRSAIRHISTASSTLQSLIKLLDQISYIVIDDEVGAAITNSYADILAAKAALLEHRLADASVLAKRAFVASERGFFDASLLAQLYFPDEQKYAIYIPLFLPIMVPVLSSFNMLRGVLQARRKEKQS

SEQ ID NO: 31969 - DNA, 4888 bp, DROSOPHILA
ttatacaccctgtatacggcggatttccccatagactacaatctaacaacctccacgttcgctgatgataccgcgatactcagtcgctcgaaatgcccaataaaagccacggcactcctatcccgacacttaacatctgtagaacgatggcttgcctgactggagaatttcaataaatgttcaaaaatgcaagcaggttacctttaccttaaacaaacaaacatgcccaccactggtcttgaataacatatgcattccacaagccgacgaggtaacatatctgggagttcatctggacaggcggctcacttggcgcaaacatatagaagccaaatcgaaacatcttaaacttaaagcaaggaacctccactggctcataaatgctcgctctccacttagtctggagttcaaagctcttctatacaactccgtcttaaaacctatctggacttatggctccgagctgtggggcaacgcatccagaagtaacatagacattattcagcgagcacagtcaagaattctgagaattatcactggagcgccgtggtaccttcggaacgaaaacatacacagagacctaaaaatcaaattagtaatcgaagtaatagctgagaaaaaaacgaagtataacgaaaagctgaccacccatacaaatcccctcgcaagaaaactaatccgagtatgcagtcaaagccggctgcaccgcaacgacctcccagcccagcaataaacttattagggcattaatgaaaaaaaaaaaactatcactaagtgaaagttaattaagttagattaagatttgaacacttattgttagtctcttaacacaaagggaagattcaataaataataaaaattaaaaaaaaaaaaaaaaaaaaaaagagaagtcacagattaggatagattggattcagtgactgcagtaaagtgtgattttcgcatcactgccggctccaccgctgatggtggcaaccctggccgctgtcacttgctttttggtccaggcgtgttgtgtaaacgctggcccccatttcagaatcccaaattccggcgcaaactgtccggaattgtacatatctggattaacgacttcacctaggacatgctaaatctcctacgaaggcgcccaacgtcggtgcccctcatccgggccgcgcttagcgctccgctgcactcaacggaaaaccggccgggttacatagtgctgtaagtacgaaaattacccggattcaacatgtggagtcactaaacctatccccgcagggtaccggagatcggtgaggagggaccgctaggcgagggcgtgctcaagccggacggacttcccgccttcagtgacatcaccatcgagatgtgcttgggcgccattggtcagcaggcatcggcggtggagaactcggtgaaggcgctggagagcgacctgcacagtggcaagcagctaaatgccgccagcatctttcgggagctggacaccgtgacgggtccactggagacgacatggggtgtggccaaggctctgtacctgggcaattctaccctgatacccaccaaatcctacatgaacatccacgaacgagcgcgtaacgctcgggcagcgaagttctgcaatcaaacggtgtataaggcactcaaggatgcttcgtccgattcgggtccagatgagcagaggatgcgacagaagttcctgctcgagggcaagctgaacgggctcacgctggacaaagataagcaggatggactgaaagagctgcttacccatttgggtcgagagagagccaacttcaagaacaaggtcaacatggcagtgcactcgtttggacagattattacggacttcaatcttgtaagagatttcccgccttcgcttcttgaggcaacagcccgcgatcccggacaacctatgacgggtccttggaagataaccctacagcctcaagtggtcgatggttttctaaagcactgcccagagcgaatgcagcgttggaacgtctggagggccagtgtgctgaaggcatcctcgcagcaggaaaaatccctggagaacagcacacacatcgaaaaaatacgcggtttgcgcaagcgacaggcaaatctgttgggctatgaaagctttgcagacatgtccatgcagaccaaaatggtgggcagtgtggacaaccttaagcagatctttgccaagcttctcaagttcgccggccctgctcaaagtgtggagctggagaaactacagggcttcgctcaggacagtggctgtgaatacaagctggaagcctacgacgttgcctactggcggcgcaagcaactggcggcggagcacggtctccaagatcagaagctccgcgagtttttcccactgccccgcgttctttccggcttgtttgcgctgagtgaaaagctcttcggcatcaaaatagttgagcagcccaatgcggaggtgtggcatccggcagttaagttctacgatgtgttcgatgctgattccgtcaatagctccaccccggtgggtggcttttatgtggactgctattccaaggagcacaagttcggcagaaacaatggttggatggtgggcatacggaacagcaataagtctgccgggctgacgcctctctgtgcgctgatatttaacttttcggagccacaaagtccggatgccaagcccccgcttcttggatacgatgatctgcagatgctcttcaagacttttggaagcggactccaacacctgctcacccaagcggggtacagcgatttggcgggactctcaaacatcgagtgggatgcctctcaagtgtccggtcatgtgatgagcaacttcctcgacgatcccacagtgattcgaagcctatccggacactttagcagcggtgagcccttggaggctgagctttcacagaagatgcgattgctgaagactcagttggctggctataatctgtgccaggacctctacctggcggatctcgacgtggagctgcaccgctcgaatgccttctggctggaggtggttcgcaagctgtggccggtttatcaatgcatgccgctggacaagaaggacgcacatccgtgctccctgaccgacatttttgccggagattgggcggccgcccagttcagtcacttgtattcccgcctcatagccgccgacatttcgagcagctttgctgagcagcgaagcgaagagaactacgcggtcgttggccggcgctacaagcagaccttcctcagctgcggcggatctgtgcccacggcggaagtgttccgtcgcttccagggtcgcgacccgtcggccgaggcacttctaaagtcgctggacatatttgaaccctcccagaccacagataacaactgagggtcgccctctgttccgctaaaacgttatctattgtgtgtagtcaacaaatgctgatcgatggcagcctgtggaggcccgacgagtggcaaccttataggaaagtaagcattggagtattggaaaatattttaaaatagttttgaaatgtattctgttaaatatttgtttattggtcaagatcccacttgtacttatttaaaagaaagtatagccgtaattgaatgaccccagccaggaaactgaaaaccaaaaacgattgataagggctttataaattttggaagtgtaactattaaaacaagaattctatactttacgcctccacgatttattagtcggcaattcgatctacaccctaattggcagccggatgtgatagcgatcgcgtgagtcaggcgggatcttatcgcaggtgtgcaggtggtgtcgccaggcgacatcgtcagttaccccagttgaacacacatacacacacacgttgttgctttatttaaataatactttaataataaattgcataaatttataacatttaacatattctctcgcttcttgctcggttctctcgattcggttcgatatatttatatacacaacaaaggcgaagtatgcattcagcggaaaggaaaaagacatctaggggtttggatggaaaccgaggattaagagctatcatctgtcttggccttctgttggaaagccactagaaatggttaaccggtagtcaggaagaaataatcaaagtacatttcgacgcaggggtatggattaaactggttagttacaggaattaatttatatatatatatatatataaatatgctctagatcaaagtgtggtactacaatatgcgtatgtgctgctccgaaatcagtcggagcgtgtcccgctgtggtgtgttagttgtgtgtggaggctggatatctgaaaactttagaatattcgctaaggctgctatgtgtggtagtggctgcagttgctcccttggctgctccgttggctactgctgtctagtatatgtccggacagccttcgaagttctgagccgccttggcctcccagtaagtgttcttgaaaacgtgcacatattcctcgcttccctcctccttttcgcgcttgaaccacatgggctcataggctggatatggcctaccctctgcggcggcctcctccgcctcgttttcccgccggcggcgttctgtgcgctgcttctcctccaggcgcaatttctccttattcgactcgtcccagtcgccctgctccatcagcctttggtcgggacgaaggcgtgagtccgtcggcgccacgccctcctcctcttcgttgagctggcaggctagtgtagtgaagttataaaacttgtccgaatccggaggagcaggacgacggcgccaggccagcttaaactcgcccgtggtgtacgttggactgctgaccgatcccgatgtcttgagcaccggtgcaatctcgatcttcatgtcccacgtaccacgcaccacccacttgacctcgttgtctttgttcattac

SEQ ID NO: 31970 - DNA, 2831 bp, DROSOPHILA
ggtccaggcgtgttgtgtaaacgctggcccccatttcagaatcccaaattccggcgcaaactgtccggaattgtacatatctggattaacgacttcacctaggacatgctaaatctcctacgaaggcgcccaacgtcggtgcccctcatccgggccgcgcttagcgctccgctgcactcaacggaaaaccggccgggttacatagtgctggtaccggagatcggtgaggagggaccgctaggcgagggcgtgctcaagccggacggacttcccgccttcagtgacatcaccatcgagatgtgcttgggcgccattggtcagcaggcatcggcggtggagaactcggtgaaggcgctggagagcgacctgcacagtggcaagcagctaaatgccgccagcatctttcgggagctggacaccgtgacgggtccactggagacgacatggggtgtggccaaggctctgtacctgggcaattctaccctgatacccaccaaatcctacatgaacatccacgaacgagcgcgtaacgctcgggcagcgaagttctgcaatcaaacggtgtataaggcactcaaggatgcttcgtccgattcgggtccagatgagcagaggatgcgacagaagttcctgctcgagggcaagctgaacgggctcacgctggacaaagataagcaggatggactgaaagagctgcttacccatttgggtcgagagagagccaacttcaagaacaaggtcaacatggcagtgcactcgtttggacagattattacggacttcaatcttgtaagagatttcccgccttcgcttcttgaggcaacagcccgcgatcccggacaacctatgacgggtccttggaagataaccctacagcctcaagtggtcgatggttttctaaagcactgcccagagcgaatgcagcgttggaacgtctggagggccagtgtgctgaaggcatcctcgcagcaggaaaaatccctggagaacagcacacacatcgaaaaaatacgcggtttgcgcaagcgacaggcaaatctgttgggctatgaaagctttgcagacatgtccatgcagaccaaaatggtgggcagtgtggacaaccttaagcagatctttgccaagcttctcaagttcgccggccctgctcaaagtgtggagctggagaaactacagggcttcgctcaggacagtggctgtgaatacaagctggaagcctacgacgttgcctactggcggcgcaagcaactggcggcggagcacggtctccaagatcagaagctccgcgagtttttcccactgccccgcgttctttccggcttgtttgcgctgagtgaaaagctcttcggcatcaaaatagttgagcagcccaatgcggaggtgtggcatccggcagttaagttctacgatgtgttcgatgctgattccgtcaatagctccaccccggtgggtggcttttatgtggactgctattccaaggagcacaagttcggcagaaacaatggttggatggtgggcatacggaacagcaataagtctgccgggctgacgcctctctgtgcgctgatatttaacttttcggagccacaaagtccggatgccaagcccccgcttcttggatacgatgatctgcagatgctcttcaagacttttggaagcggactccaacacctgctcacccaagcggggtacagcgatttggcgggactctcaaacatcgagtgggatgcctctcaagtgtccggtcatgtgatgagcaacttcctcgacgatcccacagtgattcgaagcctatccggacactttagcagcggtgagcccttggaggctgagctttcacagaagatgcgattgctgaagactcagttggctggctataatctgtgccaggacctctacctggcggatctcgacgtggagctgcaccgctcgaatgccttctggctggaggtggttcgcaagctgtggccggtttatcaatgcatgccgctggacaagaaggacgcacatccgtgctccctgaccgacatttttgccggagattgggcggccgcccagttcagtcacttgtattcccgcctcatagccgccgacatttcgagcagctttgctgagcagcgaagcgaagagaactacgcggtcgttggccggcgctacaagcagaccttcctcagctgcggcggatctgtgcccacggcggaagtgttccgtcgcttccagggtcgcgacccgtcggccgaggcacttctaaagtcgctggacatatttgaaccctcccagaccacagataacaactgagggtcgccctctgttccgctaaaacgttatctattgtgtgtagtcaacaaatgctgatcgatggcagcctgtggaggcccgacgagtggcaaccttataggaaagtaagcattggagtattggaaaatattttaaaatagttttgaaatgtattctgttaaatatttgtttattggtcaagatcccacttgtacttatttaaaagaaagtatagccgtaattgaatgaccccagccaggaaactgaaaaccaaaaacgattgataagggctttataaattttggaagtgtaactattaaaacaagaattctatactttacgcctccacgatttattagtcggcaattcgatctacaccctaattggcagccggatgtgatagcgatcgcgtgagtcaggcgggatcttatcgcaggtgtgcaggtggtgtcgccaggcgacatcgtcagttaccccagttgaacacacatacacacacacgttgttgctttatttaaataatactttaataataaattgcataaatttataac

SEQ ID NO: 31971 - protein, 730 aa, DROSOPHILA
MLNLLRRRPTSVPLIRAALSAPLHSTENRPGYIVLVPEIGEEGPLGEGVLKPDGLPAFSDITIEMCLGAIGQQASAVENSVKALESDLHSGKQLNAASIFRELDTVTGPLETTWGVAKALYLGNSTLIPTKSYMNIHERARNARAAKFCNQTVYKALKDASSDSGPDEQRMRQKFLLEGKLNGLTLDKDKQDGLKELLTHLGRERANFKNKVNMAVHSFGQIITDFNLVRDFPPSLLEATARDPGQPMTGPWKITLQPQVVDGFLKHCPERMQRWNVWRASVLKASSQQEKSLENSTHIEKIRGLRKRQANLLGYESFADMSMQTKMVGSVDNLKQIFAKLLKFAGPAQSVELEKLQGFAQDSGCEYKLEAYDVAYWRRKQLAAEHGLQDQKLREFFPLPRVLSGLFALSEKLFGIKIVEQPNAEVWHPAVKFYDVFDADSVNSSTPVGGFYVDCYSKEHKFGRNNGWMVGIRNSNKSAGLTPLCALIFNFSEPQSPDAKPPLLGYDDLQMLFKTFGSGLQHLLTQAGYSDLAGLSNIEWDASQVSGHVMSNFLDDPTVIRSLSGHFSSGEPLEAELSQKMRLLKTQLAGYNLCQDLYLADLDVELHRSNAFWLEVVRKLWPVYQCMPLDKKDAHPCSLTDIFAGDWAAAQFSHLYSRLIAADISSSFAEQRSEENYAVVGRRYKQTFLSCGGSVPTAEVFRRFQGRDPSAEALLKSLDIFEPSQTTDNN

SEQ ID NO: 31972 - DNA, 4077 bp, DROSOPHILA
cctgcccgtaattggctctcctggcagagtgggggtgaccaaaacaaagcacacacgcatacgcacacgcgaaaaccatcaagtctcctctcaccgaattcgagcaggagcccgccacactgggagagcgctgcaccgtcaccagcgccatttgttgttgccgtggtcgtggacgtcgtcgtcgtcgccgcagccgctcctccacctcctgctcctcctcccccgccgacgcctcttgaccctcgtgttccacctggcgcagatgatggcgatgctgcagcggtgtcccttgcaatcctctcctgcttcggctccttctgctccacctccttttccctgtgtgtgagtgtgcgcgagagtgtgtggtgtgtgtgcaagtgttgtgggctaaggctacaaatgcattttcatatcgctgcctgctggccgttgtttttgcagtcggctccgcgacctcgtcctgcgatcgtcttggtttccgctttccggacactctagccaggcggttctctctaagaaacagcgtgtccttacaattaacggacacacacaacgctgctaaatggtaaatagactacacgaatttttcttaaaagaaagacagtgaggacgccatttctaatcgataacactagtatcgtcaggcaatcgttctggcagggctggctaactatcgcaagcgaaagcaatgttcgtgtggtacaccgaaaaaagtacttattaatgagaaacgcagtgatgtttgtatacttcttgatatatcagtaaaacaggctttaatacatttttatgtactcttgcctttttgatgattaaaaatcaaaaaattaagttacattaagttatcatttatcgaataacaagtcaaaggtagtcagaggtggtagccactgcacagctgtttagtgttggaaaataacaacaagccgaacagatgattgtgaaaatcagctggcccaagaacaacataacaagcgaatgcttccggcggtttggatcttttaaaagacgctcaaaatcgaagaaaatgtcagcattcatcgaggaaacaaaaagcctgctgccgcggatcgccttcatagcctgcggatgcttcagtccacccacacccatgcaccttcggatgttcggtgagttaaactagattgtgaaattctgcggtacataatcgataaaattacgcggcatgtttttgtcaacagagatagccaaggaccacttcgaaatgcagggaacccacagagtggtaggtggcatcatctcgcccacgcacgactcatatggcaaaaagggtctggcctccgccttggacagatgtgccatggtcaagctggccacccagagctccaattggattcggttgtccgattgggaggtgcaccagaatcagtggatgcgcacgcaggcggtgctccagcaccaccagaactatatcaataaccacataaattccggcgggggaggcggagatgacggggagaacacacatctacccggatggctgcctcgtgggttgcacgacagtcgggatcctgtacatctgaagctactgtgcggtgccgatctgctggagtcctttgctgttccaggcctatgggcagaggccgatgtaagtcttgatatatttgaatagtacctttttttatatgattgttcccagattgaggacattgtggctaaccatggtttggtagttatcacccgggccggctcaaacccaggaaaattcatctttgactccgacatattgaccaagtatcaggttagagagacagtacctcgacaacattatttcttattcatttccattcacatttcagagcaacattacgctaatcaccaactgggtgcctaatgaggtgagctccacgttgattcggcggctcttaggacgcggccagtcggtcaagtaccttctagacgatctggtgctggagtacatcaagcgccaacgattgtttaactttaaatcgtaggtggtcttcctgttacctccccttaatcctgcatgttcacttacaattacccatctttcaaacgatacgtacactgaatgaggcgccaccttaatccatttcacacagcagagaacacacttaacgtgcaccaccagcagtctttgtattgtttccttttatgtcttaaactgcaggcgggatgcaccggctccgaccgaatgcgactcttgacgcgctttgcacgtgaaaaagaagccctcgtcgcccacacgctttccaacccaccagcaccgcaaatcgcaccacttgccccaccagcaccataagctgtttgagccgtggcgcctcttcatggagcgtgagtgagcagagcagatccgagttcaagttcctatttagcagtgattcctttaatgcatgtttatttttgcccaatcttagcccttgtaaatacccttgttaaattagccatagttttgcggtggtcagtgtgcgtatcatctacttacaccgaattgttgccaaaatgtagtcccattaaacaataaccttaactttgttgctattgtactgaccatgcccgcctaacccatggaatgtagtaagtatataacggatgcggtgcgtcccaaccatttgctctttaaccacgcctatacggacaacaacaagaacgcgaacagctactctataggcgaccagctggagcaggacatggacgagtcggacactccaagcccgcaactgcagcatacgcctacgtcgcgggttttctgctgcggggaggtgcctttacgtggatccaaggtgctgcgatccggtcctggacaagcggtgcaggtcatcaccatgcaggcagatgagaaagaggaggtgggtatccttaaccgctgtatccattgcatttcatacatagatggaatccagagttttgctttcaaacttatgtttagatccttctaatcaattcccctctttcagagccaagcaaagaagcagaagatttcccaagtgcaactttaggaaactggaagacgaatctcacgcggattaagacaggggcgctggaagctatttgttgatattatataaatatgcaaaataaacacgttcgttaccaagttgacggctgcccatgcttttgtgggtcacttcacggagtggagggacaaggcattgaacttcaggcgacgtgcattgacattgcagtcgttgcagggcttcgctttggtgtctgatgtcagaacttgttgatggtaatatgccagttgcaggcgagagtggccaccattagtttaagcttagagggactgcagttgcttgcttcccttggaagagtccacatcgcgaatgttcttcttccgtcgccagaatgctaaacccgcgccacgcccttcgcgcgctccgtcctttgcgcttccaaagcgtcggcctcctgtccagctaacgccctcgcatcagcacgaccagttgcccttcctgcgaagatcgcggttcagcgcccttccccatttccgcgcctacgaggacgaaccggagaacctttcgcttttcatcgccatcctgtacgtggtggatttgtttggcatcttcccatttgtcacgctgccggcattgctggtgaaacttggatactttggcatcctgttggtgctttctatcatcatcctgcagatctatacctccttcctgctctcccaatgctggaccatggcggaactgcttgatccttcaattcaacagaagcgcaactatccgtatgccgcactagcagagctggcttacggtccctatatgagtctgctggtgtccgtgctgctcgatctaagcattttcgccatggcggtgcccagcgtggtcatggctgcccagaatctagagggcgtcgtgctgcgcatgagcgctggtcagtacaatttctcttactgctactgggccatcatagtcggcctggtcatctgcccgctcatgtggctgggaagtccaaagcacatgcggtaagataaatttcaggataggattatttgctttctatcaatgcactgcattatcctattttataattatcccaggggcttggctatcatcgcagtttgcgtgatgatcgttattgtggcgc

SEQ ID NO: 31973 - DNA, 1177 bp, DROSOPHILA
tttaaaagacgctcaaaatcgaagaaaatgtcagcattcatcgaggaaacaaaaagcctgctgccgcggatcgccttcatagcctgcggatgcttcagtccacccacacccatgcaccttcggatgttcgatgcagggaacccacagagtggtaggtggcatcatctcgcccacgcacgactcatatggcaaaaagggtctggcctccgccttggacagatgtgccatggtcaagctggccacccagagctccaattggattcggttgtccgattgggaggtgcaccagaatcagtggatgcgcacgcaggcggtgctccagcaccaccagaactatatcaataaccacataaattccggcgggggaggcggagatgacggggagaacacacatctacccggatggctgcctcgtgggttgcacgacagtcgggatcctgtacatctgaagctactgtgcggtgccgatctgctggagtcctttgctgttccaggcctatgggcagaggccgatattgaggacattgtggctaaccatggtttggtagttatcacccgggccggctcaaacccaggaaaattcatctttgactccgacatattgaccaagtatcagagcaacattacgctaatcaccaactgggtgcctaatgaggtgagctccacgttgattcggcggctcttaggacgcggccagtcggtcaagtaccttctagacgatctggtgctggagtacatcaagcgccaacgattgtttaactttaaatctaagtatataacggatgcggtgcgtcccaaccatttgctctttaaccacgcctatacggacaacaacaagaacgcgaacagctactctataggcgaccagctggagcaggacatggacgagtcggacactccaagcccgcaactgcagcatacgcctacgtcgcgggttttctgctgcggggaggtgcctttacgtggatccaaggtgctgcgatccggtcctggacaagcggtgcaggtcatcaccatgcaggcagatgagaaagaggagagccaagcaaagaagcagaagatttcccaagtgcaactttaggaaactggaagacgaatctcacgcggattaagacaggggcgctggaagctatttgttgatattatataaatatgcaaaataaacacgttcgttacc

SEQ ID NO: 31974 - protein, 316 aa, DROSOPHILA
MQGTHRVVGGIISPTHDSYGKKGLASALDRCAMVKLATQSSNWIRLSDWEVHQNQWMRTQAVLQHHQNYINNHINSGGGGGDDGENTHLPGWLPRGLHDSRDPVHLKLLCGADLLESFAVPGLWAEADIEDIVANHGLVVITRAGSNPGKFIFDSDILTKYQSNITLITNWVPNEVSSTLIRRLLGRGQSVKYLLDDLVLEYIKRQRLFNFKSKYITDAVRPNHLLFNHAYTDNNKNANSYSIGDQLEQDMDESDTPSPQLQHTPTSRVFCCGEVPLRGSKVLRSGPGQAVQVITMQADEKEESQAKKQKISQVQL

SEQ ID NO: 31975 - DNA, 3908 bp, DROSOPHILA
catggagcgtgagtgagcagagcagatccgagttcaagttcctatttagcagtgattcctttaatgcatgtttatttttgcccaatcttagcccttgtaaatacccttgttaaattagccatagttttgcggtggtcagtgtgcgtatcatctacttacaccgaattgttgccaaaatgtagtcccattaaacaataaccttaactttgttgctattgtactgaccatgcccgcctaacccatggaatgtagtaagtatataacggatgcggtgcgtcccaaccatttgctctttaaccacgcctatacggacaacaacaagaacgcgaacagctactctataggcgaccagctggagcaggacatggacgagtcggacactccaagcccgcaactgcagcatacgcctacgtcgcgggttttctgctgcggggaggtgcctttacgtggatccaaggtgctgcgatccggtcctggacaagcggtgcaggtcatcaccatgcaggcagatgagaaagaggaggtgggtatccttaaccgctgtatccattgcatttcatacatagatggaatccagagttttgctttcaaacttatgtttagatccttctaatcaattcccctctttcagagccaagcaaagaagcagaagatttcccaagtgcaactttaggaaactggaagacgaatctcacgcggattaagacaggggcgctggaagctatttgttgatattatataaatatgcaaaataaacacgttcgttaccaagttgacggctgcccatgcttttgtgggtcacttcacggagtggagggacaaggcattgaacttcaggcgacgtgcattgacattgcagtcgttgcagggcttcgctttggtgtctgatgtcagaacttgttgatggtaatatgccagttgcaggcgagagtggccaccattagtttaagcttagagggactgcagttgcttgcttcccttggaagagtccacatcgcgaatgttcttcttccgtcgccagaatgctaaacccgcgccacgcccttcgcgcgctccgtcctttgcgcttccaaagcgtcggcctcctgtccagctaacgccctcgcatcagcacgaccagttgcccttcctgcgaagatcgcggttcagcgcccttccccatttccgcgcctacgaggacgaaccggagaacctttcgcttttcatcgccatcctgtacgtggtggatttgtttggcatcttcccatttgtcacgctgccggcattgctggtgaaacttggatactttggcatcctgttggtgctttctatcatcatcctgcagatctatacctccttcctgctctcccaatgctggaccatggcggaactgcttgatccttcaattcaacagaagcgcaactatccgtatgccgcactagcagagctggcttacggtccctatatgagtctgctggtgtccgtgctgctcgatctaagcattttcgccatggcggtgcccagcgtggtcatggctgcccagaatctagagggcgtcgtgctgcgcatgagcgctggtcagtacaatttctcttactgctactgggccatcatagtcggcctggtcatctgcccgctcatgtggctgggaagtccaaagcacatgcggtaagataaatttcaggataggattatttgctttctatcaatgcactgcattatcctattttataattatcccaggggcttggctatcatcgcagtttgcgtgatgatcgttattgtggcgctgttgtggttctgcctttttgcagctcctgcaattggaacaccctttgagggaatctctttgggtgggtattggtcttagggcatatgcttaaaatattctaaattggtttttcttagagctgcccggtttccttaccgtgctcaacagctacagcatattggccttccagtttgacatccaccccgtcctgctgacccttcagatcgacatgaagcaaaagtcgcaggtttcctgggctgcgctcatcggaatcgccagtgagttgctcctccaatccgattacagatggatattaatttcattcctctcgattagtcacttgcagcgtggccatctttggctccatcatagccgcctataagtttggatcgatgatagctgataacttgctgcagtctttgcccaccagtgtgcccttctatgtgatgctcatcctaatggcgctccagctttgcttctccgtcacggtggctagctccgcgatgttcatgcagatcgagaactacttcaaactaccggaatgtgagcctcattttaacttaagttaatgatctaggaatttcattccactaagaaagacttttaatgagttccgtcataagatttttcaatacattaatctaagtcaacgtcatcagctaatccttcctttttatagccctctccttcaaacgcatgctaatccgctcttcagtgctggccttggaggtcctagtggcggagtttgtgcccagttttgatgccctgatggacgtggtgggtggcaccatcaccggacccctggtgttcattctcccgccacttttgtaccgccgcatccggcgaatggagcgagttcatcagcgaatcgcagcggaggcgagctatggtagtctgccactggacctcaactacgatccggtggaccttgagatggaaccactgctggtgatctcgccgccgaccacgccacgcggctgttggctgagattcgttcgtttgctgcatcgcctcgagtgcgacgtgtcctgcaccatggcggtgctcatcttcggcctgctggccaccttcctgtcgacctacctaaacatcttcagcctggccagtctgttcaccaacaactcgccctgccttagcaatctgaccaagcacttctgaggatcggggtctttcccccagctagaaatgaaaattaagactttgccaagtttttaatggccgtccttcgtcgggttcaaaagcccgagttgtggcttcatctttaatgcaatgcttaaggtgttttgtataacacaaactacaaatttaataaatctattatattacaccaagacacgcacgtttcgtttcgagtgttttgagtggtgatatttaattagttaagctttattaaaacatctccaaagccaaacaatttgtccgggaattgcacacgcgcatcatttatcatctttttcggttgcccagcaaatgtttggctttttgtttgccaaatttatttaaccattcggtgtgcgttgtgttcgctgttagttatttgttattttagccgtttgcttttgttttctgcttggtaatttgaggcaagctgggttcgagcttctcccggtggaaagtaaacaggctgataacacctttcgcagcccgcttttgtatctctcggctgtttgtatctttctatcggtgtatctgtatctgaatctatccatttggctgaaatgccggagcggcttagctcagggtttaattttaaacacacgaagattctggtgcgaagattctgcttgaagattcttcgcctgatacgcaaatttaatttattcttcgaccatgcatggttattttttttttatattttccatttgcgtatttctatataatatacatacacgtacgtaatgcgaaggcatacaatttttttctcccggcattcatttccgtcttccataatacgtttttaagcgcgttccatgttccattcggtcgggagatgactcaaggcattgtgttgataacctccccgagtcatctagtcatctttccatcccaaccaatgcaaaaaccaatcgcaacaacttgaattattatttattttttttcctattctcagtgcggtgcggtgagtgattatttattaaaattaatacccaattgtttg

SEQ ID NO: 31976 - DNA, 1584 bp, DROSOPHILA
atgttcttcttccgtcgccagaatgctaaacccgcgccacgcccttcgcgcgctccgtcctttgcgcttccaaagcgtcggcctcctgtccagctaacgccctcgcatcagcacgaccagttgcccttcctgcgaagatcgcggttcagcgcccttccccatttccgcgcctacgaggacgaaccggagaacctttcgcttttcatcgccatcctgtacgtggtggatttgtttggcatcttcccatttgtcacgctgccggcattgctggtgaaacttggatactttggcatcctgttggtgctttctatcatcatcctgcagatctatacctccttcctgctctcccaatgctggaccatggcggaactgcttgatccttcaattcaacagaagcgcaactatccgtatgccgcactagcagagctggcttacggtccctatatgagtctgctggtgtccgtgctgctcgatctaagcattttcgccatggcggtgcccagcgtggtcatggctgcccagaatctagagggcgtcgtgctgcgcatgagcgctggtcagtacaatttctcttactgctactgggccatcatagtcggcctggtcatctgcccgctcatgtggctgggaagtccaaagcacatgcggggcttggctatcatcgcagtttgcgtgatgatcgttattgtggcgctgttgtggttctgcctttttgcagctcctgcaattggaacaccctttgagggaatctctttggagctgcccggtttccttaccgtgctcaacagctacagcatattggccttccagtttgacatccaccccgtcctgctgacccttcagatcgacatgaagcaaaagtcgcaggtttcctgggctgcgctcatcggaatcgccatcacttgcagcgtggccatctttggctccatcatagccgcctataagtttggatcgatgatagctgataacttgctgcagtctttgcccaccagtgtgcccttctatgtgatgctcatcctaatggcgctccagctttgcttctccgtcacggtggctagctccgcgatgttcatgcagatcgagaactacttcaaactaccggaatccctctccttcaaacgcatgctaatccgctcttcagtgctggccttggaggtcctagtggcggagtttgtgcccagttttgatgccctgatggacgtggtgggtggcaccatcaccggacccctggtgttcattctcccgccacttttgtaccgccgcatccggcgaatggagcgagttcatcagcgaatcgcagcggaggcgagctatggtagtctgccactggacctcaactacgatccggtggaccttgagatggaaccactgctggtgatctcgccgccgaccacgccacgcggctgttggctgagattcgttcgtttgctgcatcgcctcgagtgcgacgtgtcctgcaccatggcggtgctcatcttcggcctgctggccaccttcctgtcgacctacctaaacatcttcagcctggccagtctgttcaccaacaactcgccctgccttagcaatctgaccaagcacttctga

SEQ ID NO: 31977 - protein, 527 aa, DROSOPHILA
MFFFRRQNAKPAPRPSRAPSFALPKRRPPVQLTPSHQHDQLPFLRRSRFSALPHFRAYEDEPENLSLFIAILYVVDLFGIFPFVTLPALLVKLGYFGILLVLSIIILQIYTSFLLSQCWTMAELLDPSIQQKRNYPYAALAELAYGPYMSLLVSVLLDLSIFAMAVPSVVMAAQNLEGVVLRMSAGQYNFSYCYWAIIVGLVICPLMWLGSPKHMRGLAIIAVCVMIVIVALLWFCLFAAPAIGTPFEGISLELPGFLTVLNSYSILAFQFDIHPVLLTLQIDMKQKSQVSWAALIGIAITCSVAIFGSIIAAYKFGSMIADNLLQSLPTSVPFYVMLILMALQLCFSVTVASSAMFMQIENYFKLPESLSFKRMLIRSSVLALEVLVAEFVPSFDALMDVVGGTITGPLVFILPPLLYRRIRRMERVHQRIAAEASYGSLPLDLNYDPVDLEMEPLLVISPPTTPRGCWLRFVRLLHRLECDVSCTMAVLIFGLLATFLSTYLNIFSLASLFTNNSPCLSNLTKHF

SEQ ID NO: 31978 - DNA, 3599 bp, DROSOPHILA
cactgatccagtgaaaccgagatacaatttatattcgggtttatctgatgggtcatcattagcatggctcggattcttgggtaaataatatgtgcaatactttgtttatacttttgttaatacattttatcatgcaaatcattgttcattttggaactcgtaacttgatataatggtaactttttaaatttgtaattcaaatctagcatttaagttgcgacatctcatagtaatttttctttaactcgtgcttgcttttaaattgtttgggcttttttcttcagcaattaaattatgcttataaacagaagacttttgctgtcgtcattctaaaattataaatttcatgcaaaaactggattttatgcttttcatttgaattcctcaggtttatctatttaaagaaattctaaataataacttctatatattaccttacagctaacatacatctttgttgctaaggtctggctaattttcgcatttataatctcatatcttggtagtcgcatgtaggaaaaacaaatttcgtggggttcccttatctaaatcttggccctcacgcttaaattataatattctctatggtcacttcttgtccattctggcaaacacgaaataaatctcaggtagaactttcattttaattagccgtctggtcgggagtgactcgacatctgtttatttatagaactcggcaactatctgcacatcatttagccgccgttttgtgtcacttaggcagtgggcaactcataaaccagcagggccaacagcttgccatggatgtatctgtatctggcgcgtgtatctaggtatccgtatcggaggcagcacaatactctagccattaggctgcccctatcccacatcctgaacccgaagccgaacccaaactcgaactcaaacccaaacccaatcccgatccagagaggcactctggccaaagtcgaggccatggctttgtcgtgctcatgtcgcacaacagttttcgttttcaatgctgccagaaggccagaagggcccaaaggcggccaactctcaggagttggccaaaacaggaggggccaagggcaggatggcatcggatggggcagactatgcttggcatgcattcaacacacgatacttggcattccaggcagttgcagttgcagtttctgctgctgctgctgctgcttctagttgccagttcccagttgcctgcgtgagtttgtgtccaaagtcttttgttgtgccatcttcgtctgccggctatcgatcggcatgatcgtcatcatggctggccgcttggccacactagcagaaaataattacagcgatttttggaatgtatcttactgttaaaaaacagtttgcccagattaatttccccaattttatttgtgacgcgcctatacgttttcattcgaagtctttcaaatttccaagaagactacactcctattcttgaacttttgaaattttatacacttaaaattgatggctgggaatgtacgaaagttattattcaatttagtctcatttttcgagtgtaactgaatggctagctggccaatgcctggcatgctatttttattacattattctgcaaaatagtaacaacacagatacacacacacaaccctcaataaattggagggggcagttatggccatgttgtcaacgctttttgcattgtttttcatgcgcagtccattacatgattttattatgttcctggcattcgcagcgtcatgtagaaaatgtggacccgactgcccgaatgcaacaggcttgactttggtttggttttagtttagttcttgtcactttttgtttggtgtcccgaccaacaattctgcaccattgcaacgcggcaacgcgtccactcggcaacttgcaacacgcacgctctaatgagcaaaaatcatttaagacgcggctatttttagttggcatcttctatatatagctcctccagcctcctgccgatcgacccctgcaatccgaggcggttttattgggctttcaactggttccacgtctctgggcggatttgtggtaatgcgatcaaatgcctcaaggaatttccatttgcattcaatgcgtttgcaatccaaaactaaactatttgcacagcttttattgggagctggattcgttgaaaaatgaatagcaataataatagcaatgaagaaaatggtcttagatttgtctaaaggatgcggggaaacttcttatctctgaatatagatgcatcttcccggtaaatttagacttccagaatgtccacataagtgggaatatcgaggtggggaggtggaggcatagagctctaaccagcggtcaagtacctgggctggcgtttgctttggctaattgcgcgtgcgcagccaccggagccgcgaagtccgttccacagcagccaggagaggaggaggaggaggaagaggaggaggaggaagaaagtcgaagagacggagcagctgtggccgccactttggccacgctaattaagcggaattgggcaagggatcgggatcgggaatgggatgggtacggtagtggtaaacgggaacgggatcgggcacaagtggagtgcggcgacgtgtgctgaaatgaagcagagaagaaccgttctcaaatcctaaatcgctgcagcggcgaaagaagcggcaacatgttaatttcaagtcggcaagccggcaaatttcgtggaagcggcttggattacaactgatgcgaaaaattgaagacggcgaacgttgaacggccgaatgagcaaacaaaaggaaccgtttgctgtttgacttggttaccctgcaagtgtcgttgcactttcgcagtgccctccacttgagattgtggattttcgggccgcacttcatccgtagatgggagcggaccattggcgataagctaatgacgccactcggttagtcagccagccgcagagccggccacttggcaagtgtgtgctaaaaagtatctcaatctcaatctgaatctttgtccctttcttaattcagctgcagcttctgatgaactgccagcggagctgcaaattactgttactcgtatgcatatttgtggggtgagtgccataggcaaatatcaggcgataaattgaaatccaaagtcgccctgcaaacaccaacacaaacacacattcgtgagacaacacaaacacacacagacacatacacatgcaaacgatggataaagttggcaagaaagtgctttccgccttaatgcagtgcagtgctaaatgcttttaccaaggatttgcagctcaaattcggtcgtctcgtctcgtcaacactcaccaaaatattcgccctgcctttctttattcaagaaatatcttgaatattttatataaatacaaatttgttaaatcatattcaatagtttataaacttaagattcatcgataggatagcgaccatttaagatttttaaaatttgctcatttatttaatttaattaacttaaatatcaatacaccctatttagtaattccaatatttatacttctttacttttttctagaaataaagctctgtggctccagctactgaaagtggtttctccgcttgcagcagtctggattttcg

SEQ ID NO: 31979 - DNA, 540 bp, DROSOPHILA
atgctgccagaaggccagaagggcccaaaggcggccaactctcaggagttggccaaaacaggaggggccaagggcaggatggcatcggatggggcagactatgcttggcatgcattcaacacacgatacttggcattccaggcagttgcagttgcagtttctgctgctgctgctgctgcttctagttgccagttcccagttgcctgcaatgtccacataagtgggaatatcgaggtggggaggtggaggcatagagctctaaccagcggtcaagtacctgggctggcgtttgctttggctaattgcgcgtgcgcagccaccggagccgcgaagtccgttccacagcagccaggagaggaggaggaggaggaagaggaggaggaggaagaaagtcgaagagacggagcagctgtggccgccactttggccacgctaattaagcggaattgggcaagggatcgggatcgggaatgggatgggtacggtagtggtaaacgggaacgggatcgggcacaagtggagtgcggcgacgtgtgctga

SEQ ID NO: 31980 - protein, 179 aa, DROSOPHILA
MLPEGQKGPKAANSQELAKTGGAKGRMASDGADYAWHAFNTRYLAFQAVAVAVSAAAAAASSCQFPVACNVHISGNIEVGRWRHRALTSGQVPGLAFALANCACAATGAAKSVPQQPGEEEEEEEEEEEESRRDGAAVAATLATLIKRNWARDRDREWDGYGSGKRERDRAQVECGDVC

SEQ ID NO: 31981 - DNA, 11597 bp, DROSOPHILA
gggatctcccgatccctcgccggcaatccttaacagttaatgtgtgaatttttatgcgttgccaggctccgaagagtcgtgttgttgttcttaccgcataaaatgtaatttacatccgttagcttcgagtgagatagagatggtgcccccatcttctccagctcgaaattgctactctgatttgtggctgccgttcggaggcgagagtcgctggtccctagccgggattcagtattctggattctggactccagcctccgttgcggccaaattcatgcttatgagcacttgccgttaggattttcattgttgtttcgccagcaatttgttgccaaattgtatgggccagttcttggccttctgccttatgcctgctgccttcgatttaaatgtggatctgggcaaagagccgagtcattggccaactggccaccccacaggtatgcggaaattaaaatgtgaaatattcgagaaattgtcaacccttcaactggacgcaattaatcaaagtcgagaccgccagcagcaattcataaaacagcaatttgtcaaatcatttctgctgcaacaagtggcagcagcagcagcaactggccttcctggccaaactgtcagcttagacaatttgtttgagccatttttgcgacggggtccagtgtgctgtgcgcagtgtggtacacacgcagccagcgcttcttggccagaatggccgctacctgccacaattccagctggatgcagtgctgcgccctggctggatgttgcggccaggctgcattttgattatgtggtaataacacgttgcacgcacacagccaagccaagatgttgctgctgcaatttggtgtggctcttggcttttagaccctgttatcacgccggacaaggctatcaagctgggcaaacgtggccaaacctacgcagctccctggccaatttcaattgcatgctggcacaattagagttcggcattcgcgcggcaatggcaaattaatttattatggtcatggcgatggctaacggatatggtcatcgtaaaattcccgccataatggtggaacctgcaactatggcatttcattaaataataaagattccctctatcttctctcattgcagccccggtccaggagtacacggagatccaacagtattcgggtaagtcggaaagccgtttaactactctagccataatcgtccaacaacaggagcctaataaaaatgcattcggatctgttccactttatggtgattaccatttcgtcaaacaatgcggatgtgaacgatctatggcagcatgccattttcatatttacacagtctttgatcttttatcgatattataataataatgtgattgatccgctgcccaaatggctaattataataaccatccagttgtcgtaagccgctaatcgctgcccaattatcgctgccatccgctgtcataaagccgcattagctgaggtgtgaagaggcacacatggcgaagacaaatggaaacataaagaaataagcgctgcctttttatgagacacgctgaaaaacgtgagctgggctccatacccttaccccaaacccaacccaaagatttcaatcaaaaaatggtctagccggttcacagaagccggggaaactgcggcgcttaacgtgttaatgatgtgatgtgaaatttattgcgggtggaagccactaaattaggcagccagctcctcagtcagaaagaagtagaaataaaaaccactcactggacgtgcgcatattttaagacagttgacttttgtttaacgacactgatgagctataaaaattgtcaatagcgccgtgtattatgacagccaagtggcgctaagccgcgatttatgaccaaaacgacacagtagcaaaaatcacatactatatatagtatgtataatacggatggcccgcttgcataactaatgcctgcactggaatgtattagccagaaagagttggcattgtttggagcacagattcccaggctttggccccgataaccaggtctcattctcgaattatttatattttgcacttgcagagggatgctactacaactatgcgcattaccaggagggcgaccgcatcatgaccaatgagccatgtctgaactgcacatgccacaaccgcatgctgatgtgctacctgcgtgtctgccccttcaccaagcccattggccacgattgcatcgtggagaagcgggaggaccagtgctgccccatcatcacctgcccggaaggtaagttcccttagcaagagaaccgcttgcgtttacactctactgatggctctcgctccaatttagtgcccgtagacgtgccctaccactctccggagcccggaaccgaattgagcattcccgaaaagttcggctgcagcatcgaggagaagttctacccggagggcgcccaggtgccatcgaatcccaataaaccttgcgaactatgctactgcatcaacaaccagaccaagtgcgtcatgcaggagtgcactctgcacgtggacggctgcctgcccatctacaacaagggatcctgttgcccagtgcgctacagttgcggtaagtttcggccacatatcaacttgggatttccaaactaaaaactttatatttacgcttcagaccatgagaacgagttggactttatggaccagtcgaccacaacgacaaccactacggtgcgacccaccactggattcatcctggccagcaccatgacaccacccaccaccacggactgcatccacgatggcgagatctttgcggacggagcctccctgaagggcaagaatgcctgcgagcactgctactgtatgcgcggcgacatcgtgtgcgctgtgcaggagtgcgaggtgcccatgatggcggccaatggaaagtcctgtcgcgcaatgccagcagccgagggcgagtgctgtccgagcaactacgtctgcgaggacgacagttccaccaccgaaattgttgagatcactacgccagagagtgctacttccgttccggccaagggcattcatgccgagattcccaaagaggatgtggatctgcaagaacacatcgatgacgacgataagaataaggagaccgccacaattccttccgccgagctgggcagcggtgagattgaggaggaggaagaggaaaaggataaggcaaccactgttgcacctgtacaggttacggacgaaaaggacttctccttcgagcccgaatcctccaccgccggcattccatccgattccaggatcgatttaccatcgtccaccgaggagtccaaggaatcttccactgaagctgctgaagaagatatcgttaagatcgtcaccactccagagcctgagggtagcggcgaagaggatgtacctaagccttcccagattcccgaaaaggagatcactgaagatgaactcattaaggtcagcacctcggctccagccaaggccagtcctgaagaggaagtggttacggccaccacctcggcgccaacagaggaagacgttaagccaacaaccgccggaacaattagcgaggaagaggaagagggcaagcccacacctgcagaggaaggaagcggtgaagaggagaaggatgtcaaggtcactgcagctccagaggaaaccgaagatgaagccaagcccacttctgccccagtggcaagtgatgaaaaggaacaggagcccaagccaagtgagggtagtggtgacgaagagctggatctcaagcccacaacagctccaacagcaggtgccacttcagcttccgaagaaagtgaggagcaggatgaaggcaagtctactgaagctccaacctctgtcgatgacattgagccggccaagccaactgaatcctctgaggaagctagcggcgagggagaagatgttgctaaggaaaccacacctgctggagaagccagcattgctggtgaggaggagatcgttaagggaaccacaccagctggagaacctagcagtgaaggcgatgaggagatcgttaagggaacaactccagcagaagaatccagtagtgaaagtgaagatgagctcaccaaggtcaccacacctgccggagaacctagcgttgctggagaagaagagattgccaaggaaaccacacctgccggagaacctagcattgctggagaagaggagatcgtcaaggtcaccacccccgctggagaatctagcattgctggagaagaggagatcgtcaaggtcaccacccccgctggagaatctagcagtgaaggcgaagaggagatcatcaaggtcaccacccccgctggagaatctagcagtgaaggagacgaagaaatcgttaaggaaagcactcctgccggagaaccaatcagtgaaggcgaagaggatgtcatcaaggccaccacttcagctcccaaatccgacatcgaaggcgtcaaggaacctgagacagccacagaagtaccagcagaagaagtcgaggacttcgccaaacccacaacgccaatcgctgaggcggaggaagaacccattgccggaacgcctattccaactgacggtatcagtggcgaagaggagattgttaagggcaccactccacagaccctcgaggagcagcctgaaattagtgaagagtctaccgaggtaccagttgctgaggacgatctttcgagctcgaccagtgcttcagcaatcgcctcctcgaccgaaggtgtccaggatgctgcaagtgaaacgacttccagtgcacctgccagagctggagacaaggacgaagcagctaccaccgtgcctactgcccaagacaaagatgatgaagaggttgaacaggatgccacagacttgccagtcgaggatgttgtccaaagcacaactgcaaagaccacaaccaccgagcagcccaaggaggagtcctctactgaggctgaggacgctgaaatcgaagttaccactagtagtcccgccgataaacaagaggtgccagaagctgaaccagcagacaaggaccataaggatgaggaagatgtacagaccgccactgatttgccaatcaaatctgatattgggccacctgttgtcgataccgaagctactacgggtcagcctgagaccagtgatgagactgctaccgataagccaccatctgtttatctgcctcctggtggagagaaggatactgagaaagaggacgaaactactgctacagagccatctgtccaagaggaaccatctaagcctgtggatatctctccagtgtcccaggaagttccgtccagcactgctaaagttgacaatcgcaacgacttcgaaacggagaaaccaaccctgccaccaagtggcgaggatcagagctccgagcccctgcccgccatggatctgcccgctggtattcctggcgaaggtgactgtctggtggagggcaagacctatgccaacaacaccatcgttcccgctaccgcaccctgcgacgtgtcctgcaaatgtatcagcagcctcgtggcctgccaacagatggagtgcaagttgcccgagaacttggagaaatgtaccgtggctgccgatcttctggatggttgctgtcccacttacatttgcgatgagagcactgaaagtgctgaaaaggatgaggaatctaccgccaagcccgacaataagattgacgaggatgtttcagagatcagcactgaagagattcccaaggatgtcatcatgcctactggcatcactgagcagcctctatctcatgtcaagcccgatgaagagatccaaccagtgacctcggttcctgcacagtttgatgaatctacgacagctaaggttgataagaaaccaattgatgaatccgctgaggataagaaaccaattggcgaatccgaggaggattcgaaaccaattgatgaatctgaggaggacaagaaaccggttgaagaatctgcagaagataagaaacccgttgaagattccgaagagaaggagaagccattgccgactgtcatcccagcgagtgagattgaaaaagaatccaagcccgaggacgaaaagaagactgaggctgactttgcggcgcccactgaacagccagaggctacaactcccgcccagattgccgacactgctgagaaggaggttgatgataagctggcaaccacatctgctcccgtttctggcgaagatgagctcaagcctgccgatgaaaagaaacgcactgagacagcgcagatcccagatgctgaaatccctgctagcaccgatgagcccgagtcctcgactgagctgcctactgttgatctcgacaagaaaccagaggaggattcgactaaaggcaccgaggcgcctgagtctgataaggttcctgaagttccgaccagtgcttctactgaaaatgagattgaggagtctgacaaattcacgacagtcgctccaccaaaaatttctgcttctgacgaaacagagcccactgctgaggaagatctcgtccctgcaacctttgagcccatcgaaagcgaatttgaagttagcaccaagaagccagccgtgcaaggaccaccactgcccactcttgctccggctcagccagagaagaaaccagtcgatgcagagacttccactgaggctgatatcagcaccgaaccaagcgctgaagttgaaaaggaagcttctggtgaaacatccgagtcggacaatgaaatcgatgctggtgcttctagtactcctgttcctgtttctgccgatgaggacaagactccaagcactgagaagactgtcgaggccgacgacaagttcaccactgttgcgccacttgctggtgatgaagaggagtccaacttgcccaagctaccacaagatatctttgaagaggaagcgcctgttgcggttaccaccgcagctccatcaaaggacgacggtgagcagaagccagtcgaagttgaagagaaaccgatcgaagatggacaaaagcctattgaggacgaaacctctacacctacttcatctgaaaatgagattgagcctgaatctgaccgtgcaactactattgctccttctaaggaagaaccttccgaaccatccactggtgctcctactaaggatgaacctgccgaaccatccactgatgctcctgagtctgatgagagcaaggaaacgcctgagtccgaagtgcccacaactgttgcacctgctggtgagaagattccaacaagcagtatcactcccgatgaggaaccaactgccacttctgctcctgttgccaagcctgatgaagatgtagagaaagaaaccagcaccgaaattcccactgacgctcctgcatcgtccgaagaggatgagaattcctctactgatcaaattccatctgaggtaccagaaaagaaacctgaaactcctgcacagacgccagaagaaggagatattgttggcgcaactgcagctccaacgacctctgatgaagtgcccccggtccagaggctgcctgaggaagtccttgctgagattccgcagccctcgactgaaactggaattaaacagcaagacgaaacaactgctgctccaagtattgaccgcaaggaaccctatgttactgaaatcgatgaagaagccaccacagtggctcctatctccgagaaggatgagaagccaactgaggaagagaaaccagtggaacagaagccaactggagaagagccatccgaggaagaagagaaggagaaacccattgaacaagatgtatctactgagggaccagtatctaccgaagcttctgaagctggatctaccgaatcatctgaggaagttaagccctcgactgagggagaagttgccgaaaagcctgaggacaagcagccttcttcgactgcccaggctccagttgagacaattcccgaaatctccactgaactgccagctcaagatggcgacaagcccacaagcgaggctcctgttgactccgatgaagatacctccgctccgtccgacgagaagattccctccgtttctggcgaggaagtcgagggcccagaagtcacaactgcctcacctcaagctgccgaagaggacgaacttaagacacccgcggagagtgaaccatcttccactgacaaggtaccagaaactgaataccagaagcccgaggacgagaccaaggctgacgagacccctgagtctgttacccaagtgtctgatgtggcaacatccacttcggccccagttgctggtggtgacattgaaaaggacgaacaagccaccactgcctcgcctgaagaggaggaagagatcaagccaactatcgctccagctgctgaaattcctcaaccatccgaaaaggagcccgtggatgagcaagaagtggaatccggaaccaaggccactccagcagagtctgacggccagccaattgatgaaattgcccctgcaacatctggacccatcgatgaggcttccacagccgctcccacaaaggaggaatccacaaccgttgctagcgcagcttcgcctgctgttcacgatgatgaaattaaggatgtcaccactacgcaaccagttgccgatgagaaggaagtggctgctcctcaggacgaaacgaagacatccattgatgtttccaccgattcacccactgcccaagatgatgagaagcaagacaaaaccgaggctccagtggcacccaccactgtttcatcgccgactgctgattctgctgctgattctagtactcccacagtggaggtaccatctcctgttgaaatcgacacgaagccaatggatgatatcatgtcccagactattgctcctcataccgccgatggtgctgcgtccacgtccactgaagatgaagaccaggctcccgttactgtgtctcctcaggatgctgaaaagactccagtttccccggctccccaggattctgataagactccgagctcagaggctccccaggatgccgacgaaatcccagctacagcgacacctcttgacgacaacaagatcccagccactgtggctcctcagactgatgatggggttccagctaccgcagctcctcttgatgaagacaagatccaaactactgcggctcctcttgatgaggagaagattccatccacagcagctcctcttgatgatgaaaagattcctgctccagttagccccgttgttttcgatgtggagccaagcagcgagaagcctgctgtatctgagtatgatggtgaagagagcaccgaaccacctgtccatgatgtggagaccagcactgatgagcctacttctgatgccaaactgaagccacctacttctgcacctgctacgccatcggaatctccagccacggaggcggagattgtgccagaaactgcagccccagagcttgaaaaggaggtgccagagaaggccaccgaacaacctgagcttgagaaggaaactccagagaaggccaccgaacaacctgagcttgagaaggagactccagagaaggccaccgaacaacctgagcttgagaaggagactccagagaaggccaccgagcaaccagagctggagaaggaggtgacggacaaggctacagagcagccagaatcggtcgatgagaagaccactccggagccagtcgtgaagccaagcttggattccacggaggaggatgaagagtccgttgagtccgaggaggaatccgctgacaagaaggacaagaacaaggagactgaggaggatactgacaaaaagcatgaggagcctgaggtaccagctgtagtttcggagattcctcagccaagtgaagaggccgtaccgaccactggtcacccactgttcccgcaccttgccagcagcaccacgacgccaccagccgtcgacgaccgcgttggcgaggaggatgaggagaacacaactgtcaaattgagtagctccaccaccaccagcaccacagagtctccagtgaccagcgcaccatcgacgaccacggtggccagccaacagcaacagccgattaccccgcctccctacggccacgcccccgagtacgaggatgagtacgacgaggaggaggtctttggacccggaacatgccgttacgccggcaagctgtacgtgtccgcccagcagattccacgtgacgatccctgcgacttctgcttctgcttccgaagcgacatcatctgcctgcagcaatcgtgcccgccgccaattgccggctgccacgaggagcccatctccggcttctgctgtccgcgctacgagtgccccgtgtccatggccgccgtgctgaacatcaccacgagcaccaccaccaccagcaccaccctgccgccccacttcctgcactattcgcacggcgaggcggtgaagcacaccggctgcctgatcaacggccgttcataccgcgtgggcgagcaaatcgagtccacgagcggtccctgcattagctgcacgtaagtacaatacatcgatgccacctaacgctgggtatttggtatattcctatgactgatctgcatcttgtttcaatttcagttgcggtggagacggcaagatgaagtgtgatccccagcagtgcgttcccgaacccaccatgcagcaggtgatggccgccgtggtgtcgggacgcaagagatgaaccaccagccatgctcactaaatataatttaactaattcttaagcactgcagacaacaatcacgaaccgacgaaccaaccagcccagatagcaccactcgccaactagcagcaatagcaatagcaatagaaatcatagagccaggaaaccggaaacagaaacagaaccagaactcttgaaaccggaaatccgaaacagaaagtccggaaaagccaatagcaatagcaatagtgtaaccggaccagatgcaatagtgttaattttgggtttgccgacatacgcactctatcaattggattacggcccacttgtttcggattaggttacggtgacgaagcaaccagtgatattgtactgtatacatagtataggtgcaattaatttagacgcgctcacttaaatcgattacttatttgtatttgtatgtgtactagtattttgggcttgtgaccctagtgacaggacatatagccaccacagcagccgacgtagcgcgtgccttgtaaggtcgttcattgtgcccgccgccatacaatcgctttcaagagactctcagcaccccacaccacactacaccacagataggtagagcgaagatatttcggacacggatcgcaatcaatggcgttacgaagccacggcattcggccaccggatgggattctatacttgccccctccggcggttcactcttctccaatgcgcttttatagtattttagtcaccttattttaaacattattatttttgtgtataattgttgcttctagtcttcttttgttgcaagagcaacggaatccgcctgtaacacgcgcacaacccgatcgatcgtatcatattacatcagatcagattataatagatcgtatcagatcggatcggaccagttgaatcaaattgagttgagttgagttgaaaaactgtatcttctatgaactattccaagcttttatacttttatatacaagatacgtgtagagtggagaaacgaacgaactag

SEQ ID NO: 31982 - DNA, 8307 bp, DROSOPHILA
atggtcatggcgatggctaacggatatggtcatcccccggtccaggagtacacggagatccaacagtattcggagggatgctactacaactatgcgcattaccaggagggcgaccgcatcatgaccaatgagccatgtctgaactgcacatgccacaaccgcatgctgatgtgctacctgcgtgtctgccccttcaccaagcccattggccacgattgcatcgtggagaagcgggaggaccagtgctgccccatcatcacctgcccggaagtgcccgtagacgtgccctaccactctccggagcccggaaccgaattgagcattcccgaaaagttcggctgcagcatcgaggagaagttctacccggagggcgcccaggtgccatcgaatcccaataaaccttgcgaactatgctactgcatcaacaaccagaccaagtgcgtcatgcaggagtgcactctgcacgtggacggctgcctgcccatctacaacaagggatcctgttgcccagtgcgctacagttgcgaccatgagaacgagttggactttatggaccagtcgaccacaacgacaaccactacggtgcgacccaccactggattcatcctggccagcaccatgacaccacccaccaccacggactgcatccacgatggcgagatctttgcggacggagcctccctgaagggcaagaatgcctgcgagcactgctactgtatgcgcggcgacatcgtgtgcgctgtgcaggagtgcgaggtgcccatgatggcggccaatggaaagtcctgtcgcgcaatgccagcagccgagggcgagtgctgtccgagcaactacgtctgcgaggacgacagttccaccaccgaaattgttgagatcactacgccagagagtgctacttccgttccggccaagggcattcatgccgagattcccaaagaggatgtggatctgcaagaacacatcgatgacgacgataagaataaggagaccgccacaattccttccgccgagctgggcagcggtgagattgaggaggaggaagaggaaaaggataaggcaaccactgttgcacctgtacaggttacggacgaaaaggacttctccttcgagcccgaatcctccaccgccggcattccatccgattccaggatcgatttaccatcgtccaccgaggagtccaaggaatcttccactgaagctgctgaagaagatatcgttaagatcgtcaccactccagagcctgagggtagcggcgaagaggatgtacctaagccttcccagattcccgaaaaggagatcactgaagatgaactcattaaggtcagcacctcggctccagccaaggccagtcctgaagaggaagtggttacggccaccacctcggcgccaacagaggaagacgttaagccaacaaccgccggaacaattagcgaggaagaggaagagggcaagcccacacctgcagaggaaggaagcggtgaagaggagaaggatgtcaaggtcactgcagctccagaggaaaccgaagatgaagccaagcccacttctgccccagtggcaagtgatgaaaaggaacaggagcccaagccaagtgagggtagtggtgacgaagagctggatctcaagcccacaacagctccaacagcaggtgccacttcagcttccgaagaaagtgaggagcaggatgaaggcaagtctactgaagctccaacctctgtcgatgacattgagccggccaagccaactgaatcctctgaggaagctagcggcgagggagaagatgttgctaaggaaaccacacctgctggagaagccagcattgctggtgaggaggagatcgttaagggaaccacaccagctggagaacctagcagtgaaggcgatgaggagatcgttaagggaacaactccagcagaagaatccagtagtgaaagtgaagatgagctcaccaaggtcaccacacctgccggagaacctagcgttgctggagaagaagagattgccaaggaaaccacacctgccggagaacctagcattgctggagaagaggagatcgtcaaggtcaccacccccgctggagaatctagcattgctggagaagaggagatcgtcaaggtcaccacccccgctggagaatctagcagtgaaggcgaagaggagatcatcaaggtcaccacccccgctggagaatctagcagtgaaggagacgaagaaatcgttaaggaaagcactcctgccggagaaccaatcagtgaaggcgaagaggatgtcatcaaggccaccacttcagctcccaaatccgacatcgaaggcgtcaaggaacctgagacagccacagaagtaccagcagaagaagtcgaggacttcgccaaacccacaacgccaatcgctgaggcggaggaagaacccattgccggaacgcctattccaactgacggtatcagtggcgaagaggagattgttaagggcaccactccacagaccctcgaggagcagcctgaaattagtgaagagtctaccgaggtaccagttgctgaggacgatctttcgagctcgaccagtgcttcagcaatcgcctcctcgaccgaaggtgtccaggatgctgcaagtgaaacgacttccagtgcacctgccagagctggagacaaggacgaagcagctaccaccgtgcctactgcccaagacaaagatgatgaagaggttgaacaggatgccacagacttgccagtcgaggatgttgtccaaagcacaactgcaaagaccacaaccaccgagcagcccaaggaggagtcctctactgaggctgaggacgctgaaatcgaagttaccactagtagtcccgccgataaacaagaggtgccagaagctgaaccagcagacaaggaccataaggatgaggaagatgtacagaccgccactgatttgccaatcaaatctgatattgggccacctgttgtcgataccgaagctactacgggtcagcctgagaccagtgatgagactgctaccgataagccaccatctgtttatctgcctcctgtgtcccaggaagttccgtccagcactgctaaagttgacaatcgcaacgacttcgaaacggagaaaccaaccctgccaccaagtggcgaggatcagagctccgagcccctgcccgccatggatctgcccgctggtattcctggcgaaggtgactgtctggtggagggcaagacctatgccaacaacaccatcgttcccgctaccgcaccctgcgacgtgtcctgcaaatgtatcagcagcctcgtggcctgccaacagatggagtgcaagttgcccgagaacttggagaaatgtaccgtggctgccgatcttctggatggttgctgtcccacttacatttgcgatgagagcactgaaagtgctgaaaaggatgaggaatctaccgccaagcccgacaataagattgacgaggatgtttcagagatcagcactgaagagattcccaaggatgtcatcatgcctactggcatcactgagcagcctctatctcatgtcaagcccgatgaagagatccaaccagtgacctcggttcctgcacagtttgatgaatctacgacagctaaggttgataagaaaccaattgatgaatccgctgaggataagaaaccaattggcgaatccgaggaggattcgaaaccaattgatgaatctgaggaggacaagaaaccggttgaagaatctgcagaagataagaaacccgttgaagattccgaagagaaggagaagccattgccgactgtcatcccagcgagtgagattgaaaaagaatccaagcccgaggacgaaaagaagactgaggctgactttgcggcgcccactgaacagccagaggctacaactcccgcccagattgccgacactgctgagaaggaggttgatgataagctggcaaccacatctgctcccgtttctggcgaagatgagctcaagcctgccgatgaaaagaaacgcactgagacagcgcagatcccagatgctgaaatccctgctagcaccgatgagcccgagtcctcgactgagctgcctactgttgatctcgacaagaaaccagaggaggattcgactaaaggcaccgaggcgcctgagtctgataaggttcctgaagttccgaccagtgcttctactgaaaatgagattgaggagtctgacaaattcacgacagtcgctccaccaaaaatttctgcttctgacgaaacagagcccactgctgaggaagatctcgtccctgcaacctttgagcccatcgaaagcgaatttgaagttagcaccaagaagccagccgtgcaaggaccaccactgcccactcttgctccggctcagccagagaagaaaccagtcgatgcagagacttccactgaggctgatatcagcaccgaaccaagcgctgaagttgaaaaggaagcttctggtgaaacatccgagtcggacaatgaaatcgatgctggtgcttctagtactcctgttcctgtttctgccgatgaggacaagactccaagcactgagaagactgtcgaggccgacgacaagttcaccactgttgcgccacttgctggtgatgaagaggagtccaacttgcccaagctaccacaagatatctttgaagaggaagcgcctgttgcggttaccaccgcagctccatcaaaggacgacggtgagcagaagccagtcgaagttgaagagaaaccgatcgaagatggacaaaagcctattgaggacgaaacctctacacctacttcatctgaaaatgagattgagcctgaatctgaccgtgcaactactattgctccttctaaggaagaaccttccgaaccatccactggtgctcctactaaggatgaacctgccgaaccatccactgatgctcctgagtctgatgagagcaaggaaacgcctgagtccgaagtgcccacaactgttgcacctgctggtgagaagattccaacaagcagtatcactcccgatgaggaaccaactgccacttctgctcctgttgccaagcctgatgaagatgtagagaaagaaaccagcaccgaaattcccactgacgctcctgcatcgtccgaagaggatgagaattcctctactgatcaaattccatctgaggtaccagaaaagaaacctgaaactcctgcacagacgccagaagaaggagatattgttggcgcaactgcagctccaacgacctctgatgaagtgcccccggtccagaggctgcctgaggaagtccttgctgagattccgcagccctcgactgaaactggaattaaacagcaagacgaaacaactgctgctccaagtattgaccgcaaggaaccctatgttactgaaatcgatgaagaagccaccacagtggctcctatctccgagaaggatgagaagccaactgaggaagagaaaccagtggaacagaagccaactggagaagagccatccgaggaagaagagaaggagaaacccattgaacaagatgtatctactgagggaccagtatctaccgaagcttctgaagctggatctaccgaatcatctgaggaagttaagccctcgactgagggagaagttgccgaaaagcctgaggacaagcagccttcttcgactgcccaggctccagttgagacaattcccgaaatctccactgaactgccagctcaagatggcgacaagcccacaagcgaggctcctgttgactccgatgaagatacctccgctccgtccgacgagaagattccctccgtttctggcgaggaagtcgagggcccagaagtcacaactgcctcacctcaagctgccgaagaggacgaacttaagacacccgcggagagtgaaccatcttccactgacaaggtaccagaaactgaataccagaagcccgaggacgagaccaaggctgacgagacccctgagtctgttacccaagtgtctgatgtggcaacatccacttcggccccagttgctggtggtgacattgaaaaggacgaacaagccaccactgcctcgcctgaagaggaggaagagatcaagccaactatcgctccagctgctgaaattcctcaaccatccgaaaaggagcccgtggatgagcaagaagtggaatccggaaccaaggccactccagcagagtctgacggccagccaattgatgaaattgcccctgcaacatctggacccatcgatgaggcttccacagccgctcccacaaaggaggaatccacaaccgttgctagcgcagcttcgcctgctgttcacgatgatgaaattaaggatgtcaccactacgcaaccagttgccgatgagaaggaagtggctgctcctcaggacgaaacgaagacatccattgatgtttccaccgattcacccactgcccaagatgatgagaagcaagacaaaaccgaggctccagtggcacccaccactgtttcatcgccgactgctgattctgctgctgattctagtactcccacagtggaggtaccatctcctgttgaaatcgacacgaagccaatggatgatatcatgtcccagactattgctcctcataccgccgatggtgctgcgtccacgtccactgaagatgaagaccaggctcccgttactgtgtctcctcaggatgctgaaaagactccagtttccccggctccccaggattctgataagactccgagctcagaggctccccaggatgccgacgaaatcccagctacagcgacacctcttgacgacaacaagatcccagccactgtggctcctcagactgatgatggggttccagctaccgcagctcctcttgatgaagacaagatccaaactactgcggctcctcttgatgaggagaagattccatccacagcagctcctcttgatgatgaaaagattcctgctccagttagccccgttgttttcgatgtggagccaagcagcgagaagcctgctgtatctgagtatgatggtgaagagagcaccgaaccacctgtccatgatgtggagaccagcactgatgagcctacttctgatgccaaactgaagccacctacttctgcacctgctacgccatcggaatctccagccacggaggcggagattgtgccagaaactgcagccccagagcttgaaaaggaggtgccagagaaggccaccgaacaacctgagcttgagaaggaaactccagagaaggccaccgaacaacctgagcttgagaaggagactccagagaaggccaccgaacaacctgagcttgagaaggagactccagagaaggccaccgagcaaccagagctggagaaggaggtgacggacaaggctacagagcagccagaatcggtcgatgagaagaccactccggagccagtcgtgaagccaagcttggattccacggaggaggatgaagagtccgttgagtccgaggaggaatccgctgacaagaaggacaagaacaaggagactgaggaggatactgacaaaaagcatgaggagcctgaggtaccagctgtagtttcggagattcctcagccaagtgaagaggccgtaccgaccactggtcacccactgttcccgcaccttgccagcagcaccacgacgccaccagccgtcgacgaccgcgttggcgaggaggatgaggagaacacaactgtcaaattgagtagctccaccaccaccagcaccacagagtctccagtgaccagcgcaccatcgacgaccacggtggccagccaacagcaacagccgattaccccgcctccctacggccacgcccccgagtacgaggatgagtacgacgaggaggaggtctttggacccggaacatgccgttacgccggcaagctgtacgtgtccgcccagcagattccacgtgacgatccctgcgacttctgcttctgcttccgaagcgacatcatctgcctgcagcaatcgtgcccgccgccaattgccggctgccacgaggagcccatctccggcttctgctgtccgcgctacgagtgccccgtgtccatggccgccgtgctgaacatcaccacgagcaccaccaccaccagcaccaccctgccgccccacttcctgcactattcgcacggcgaggcggtgaagcacaccggctgcctgatcaacggccgttcataccgcgtgggcgagcaaatcgagtccacgagcggtccctgcattagctgcacttgcggtggagacggcaagatgaagtgtgatccccagcagtgcgttcccgaacccaccatgcagcaggtgatggccgccgtggtgtcgggacgcaagagatga

SEQ ID NO: 31983 - protein, 2768 aa, DROSOPHILA
MVMAMANGYGHPPVQEYTEIQQYSEGCYYNYAHYQEGDRIMTNEPCLNCTCHNRMLMCYLRVCPFTKPIGHDCIVEKREDQCCPIITCPEVPVDVPYHSPEPGTELSIPEKFGCSIEEKFYPEGAQVPSNPNKPCELCYCINNQTKCVMQECTLHVDGCLPIYNKGSCCPVRYSCDHENELDFMDQSTTTTTTTVRPTTGFILASTMTPPTTTDCIHDGEIFADGASLKGKNACEHCYCMRGDIVCAVQECEVPMMAANGKSCRAMPAAEGECCPSNYVCEDDSSTTEIVEITTPESATSVPAKGIHAEIPKEDVDLQEHIDDDDKNKETATIPSAELGSGEIEEEEEEKDKATTVAPVQVTDEKDFSFEPESSTAGIPSDSRIDLPSSTEESKESSTEAAEEDIVKIVTTPEPEGSGEEDVPKPSQIPEKEITEDELIKVSTSAPAKASPEEEVVTATTSAPTEEDVKPTTAGTISEEEEEGKPTPAEEGSGEEEKDVKVTAAPEETEDEAKPTSAPVASDEKEQEPKPSEGSGDEELDLKPTTAPTAGATSASEESEEQDEGKSTEAPTSVDDIEPAKPTESSEEASGEGEDVAKETTPAGEASIAGEEEIVKGTTPAGEPSSEGDEEIVKGTTPAEESSSESEDELTKVTTPAGEPSVAGEEEIAKETTPAGEPSIAGEEEIVKVTTPAGESSIAGEEEIVKVTTPAGESSSEGEEEIIKVTTPAGESSSEGDEEIVKESTPAGEPISEGEEDVIKATTSAPKSDIEGVKEPETATEVPAEEVEDFAKPTTPIAEAEEEPIAGTPIPTDGISGEEEIVKGTTPQTLEEQPEISEESTEVPVAEDDLSSSTSASAIASSTEGVQDAASETTSSAPARAGDKDEAATTVPTAQDKDDEEVEQDATDLPVEDVVQSTTAKTTTTEQPKEESSTEAEDAEIEVTTSSPADKQEVPEAEPADKDHKDEEDVQTATDLPIKSDIGPPVVDTEATTGQPETSDETATDKPPSVYLPPVSQEVPSSTAKVDNRNDFETEKPTLPPSGEDQSSEPLPAMDLPAGIPGEGDCLVEGKTYANNTIVPATAPCDVSCKCISSLVACQQMECKLPENLEKCTVAADLLDGCCPTYICDESTESAEKDEESTAKPDNKIDEDVSEISTEEIPKDVIMPTGITEQPLSHVKPDEEIQPVTSVPAQFDESTTAKVDKKPIDESAEDKKPIGESEEDSKPIDESEEDKKPVEESAEDKKPVEDSEEKEKPLPTVIPASEIEKESKPEDEKKTEADFAAPTEQPEATTPAQIADTAEKEVDDKLATTSAPVSGEDELKPADEKKRTETAQIPDAEIPASTDEPESSTELPTVDLDKKPEEDSTKGTEAPESDKVPEVPTSASTENEIEESDKFTTVAPPKISASDETEPTAEEDLVPATFEPIESEFEVSTKKPAVQGPPLPTLAPAQPEKKPVDAETSTEADISTEPSAEVEKEASGETSESDNEIDAGASSTPVPVSADEDKTPSTEKTVEADDKFTTVAPLAGDEEESNLPKLPQDIFEEEAPVAVTTAAPSKDDGEQKPVEVEEKPIEDGQKPIEDETSTPTSSENEIEPESDRATTIAPSKEEPSEPSTGAPTKDEPAEPSTDAPESDESKETPESEVPTTVAPAGEKIPTSSITPDEEPTATSAPVAKPDEDVEKETSTEIPTDAPASSEEDENSSTDQIPSEVPEKKPETPAQTPEEGDIVGATAAPTTSDEVPPVQRLPEEVLAEIPQPSTETGIKQQDETTAAPSIDRKEPYVTEIDEEATTVAPISEKDEKPTEEEKPVEQKPTGEEPSEEEEKEKPIEQDVSTEGPVSTEASEAGSTESSEEVKPSTEGEVAEKPEDKQPSSTAQAPVETIPEISTELPAQDGDKPTSEAPVDSDEDTSAPSDEKIPSVSGEEVEGPEVTTASPQAAEEDELKTPAESEPSSTDKVPETEYQKPEDETKADETPESVTQVSDVATSTSAPVAGGDIEKDEQATTASPEEEEEIKPTIAPAAEIPQPSEKEPVDEQEVESGTKATPAESDGQPIDEIAPATSGPIDEASTAAPTKEESTTVASAASPAVHDDEIKDVTTTQPVADEKEVAAPQDETKTSIDVSTDSPTAQDDEKQDKTEAPVAPTTVSSPTADSAADSSTPTVEVPSPVEIDTKPMDDIMSQTIAPHTADGAASTSTEDEDQAPVTVSPQDAEKTPVSPAPQDSDKTPSSEAPQDADEIPATATPLDDNKIPATVAPQTDDGVPATAAPLDEDKIQTTAAPLDEEKIPSTAAPLDDEKIPAPVSPVVFDVEPSSEKPAVSEYDGEESTEPPVHDVETSTDEPTSDAKLKPPTSAPATPSESPATEAEIVPETAAPELEKEVPEKATEQPELEKETPEKATEQPELEKETPEKATEQPELEKETPEKATEQPELEKEVTDKATEQPESVDEKTTPEPVVKPSLDSTEEDEESVESEEESADKKDKNKETEEDTDKKHEEPEVPAVVSEIPQPSEEAVPTTGHPLFPHLASSTTTPPAVDDRVGEEDEENTTVKLSSSTTTSTTESPVTSAPSTTTVASQQQQPITPPPYGHAPEYEDEYDEEEVFGPGTCRYAGKLYVSAQQIPRDDPCDFCFCFRSDIICLQQSCPPPIAGCHEEPISGFCCPRYECPVSMAAVLNITTSTTTTSTTLPPHFLHYSHGEAVKHTGCLINGRSYRVGEQIESTSGPCISCTCGGDGKMKCDPQQCVPEPTMQQVMAAVVSGRKR

SEQ ID NO: 31984 - DNA, 3211 bp, DROSOPHILA
gaaaaactgtatcttctatgaactattccaagcttttatacttttatatacaagatacgtgtagagtggagaaacgaacgaactagtttttatagcaattttacaaaacgaacgcacgaattgcatagttttaacggattgaatttgtacttcgccctagtgcacctgcactggcacccgtgtcaggtgcacatgaggtggccaaaccgtagtctacatagaatttttagatcaactgaaactgaaacggaaacggaaaccgattacggaaccggaaacacactgtcggccatcgctactgctcgactgattgaaaatcgcaccgatcgcagagaggagctatctttgtaaactattttttttaactaccagctgccgcgctggtcattactttattggtcatagaatagaacgaaacgaatggatcttcagtcacttgagccttagcaatgcgccgaaatcttcaagcgcttgaatcgcgctgaatgaatacgaacatcaattagttttatataatctctaactatagttgtagccctaagtatttaattttaaaaataaataaataaattttaatttagatcttatttatttgatatgtcttttaagaacagctcttgtgtttccataccttatcataatttatatgcagctattctttgtaatctaataaataaatacaacgctttttattgaaatgtatatctggagagtgttttgtaattaaagtggtcattttggatatcctttatacactgcatacacaaatgtgaaatgttcttagaaagagacagggttttcaatggctttcttcacagaaccaatggtttgataaaataaaggttaggctctatattaaagtaatagattgctcgttagttaagttgaaattttaaaaaatcgttatagctcaccttttaaagcgggaatttcgatgttttccaatcgagcaatcgaatatatttctacgttatggtatttttaaacggttcatcagcgggcacacttccaaccggcagctaaaaagtttataatattttccgcctatggcccgacttcgttcaaaccactggacttctgtataaaagcggctccaaatggtgaatatatccaccataaactgggtcttcgtctgcggcctgtccttttgcctgggcgggattgcggtgctcagtctcatgccattgggatcaggtgcgtctgcgaaacatgaacgcttgctataaatactgatccggaaccgctcttttaatagactgcgtgtgcccgctgtccaatccgctggccaagcttgccggtggcggagaaggtgtatccgtgattaagaaagagccagccgatgagaagcagccacagccacatgaccacggtgcgtccgtacacaagatggcactgctggtgccgtttcgagaccgatttgaggaactcctccagttcgtcccccacatgaccgcctttttgaagcggcagggcgtggcgcaccacatctttgtgctgaaccaggtggacaggttccgcttcaatcgcgcctctctcatcaacgtgggtttccagtttgccagcgatgtgtacgattacattgccatgcacgacgtagacttgctgcccttgaatgacaatctgctctatgagtatcccagcagcttgggaccactgcacatcgccggaccgaagctacatcccaaataccactatgataacttcgttggaggaatattactggtgcgacgcgagcactttaagcagatgaacggcatgtcgaaccagtactggggctggggattagaggacgacgagttcttcgtgcgcatccgggatgcaggactgcaggtgacgcggccgcagaacattaagactggcactaatgatacattcaggtgagaccagtgctccggatttcgcaactagacgtgactactaataattattgtcattcaacctcagccatattcacaaccgctatcatcgtaagcgggacacccagaagtgcttcaaccagaaggagatgacccgcaagcgggaccacaagacgggcctggacaacgtgaagtacaaaatacttaaggtgcatgagatgctcattgaccaggtgccggtgaccatcctcaacattttgctcgattgtgatgttaataaaacgccttggtgcgactgctccggaacggcagcggctgcatcggcggtacaaacctgatgggttgtgttaaaccaaagatcctatgtttatttcgctattatagtgtgttgtattgtataaatgcgctaatacacgtgcaccatgccatagaggaatgtccagaagagcacgtaggtgcaaaggccgcccatgaactgattggtcagcagatttctgcggttaatgaaaaacttgcgccactgggtgcccgatttcacgagcaccagaatccagagcacgaacacggacaggaagtagaaaaggaatcccagcgtaccactcaggcccaaaatacctgcgaattggtgggacattaactaagttggttcaccatcaattggagccaattacccgcagcgcagcccgagatggcagccatcgatgtgcgacagtattccacggcggatatgttgttccggatggcgccctcgctgtaggcgattatttcgccagtcttggactgcgtggtcttcactcgattcattttatttaattaaattctactttaatttctagcaaaaatattcctaggctgtgaacttcgattgtgtgccgattgtgttatcgattggtgccgataactatgcactgtaaaaattcactagcggtttttgcaggataaatagtttttgtaaattttccgagataaacttgacgagctgtttaatgttaaataatgaagtttaatacaatatcaaatatatttgctgaagtgtatatttattctcaccgctctgtgcttcgatggctcacaattgcgtttgccattcgcccgggcacgtagattgttgttattgggattggcctggagcactcggacggacagtaattcattaaaatatgtggtgataacgcgagctgccgaatctgcgtgcaattcgtgcgtttgacgtgggtactaactgctatgctgtcgcgcggacagttgttctgatacgcagagttcctgcctcaccacacacgaccacctccattaaaaccagccaccccccccagcgcctcctccaccgacagcagctgctccaccgcaccacc

SEQ ID NO: 31985 - DNA, 1083 bp, DROSOPHILA
gcacacttccaaccggcagctaaaaagtttataatattttccgcctatggcccgacttcgttcaaaccactggacttctgtataaaagcggctccaaatggtgaatatatccaccataaactgggtcttcgtctgcggcctgtccttttgcctgggcgggattgcggtgctcagtctcatgccattgggatcagactgcgtgtgcccgctgtccaatccgctggccaagcttgccggtggcggagaaggtgtatccgtgattaagaaagagccagccgatgagaagcagccacagccacatgaccacggtgcgtccgtacacaagatggcactgctggtgccgtttcgagaccgatttgaggaactcctccagttcgtcccccacatgaccgcctttttgaagcggcagggcgtggcgcaccacatctttgtgctgaaccaggtggacaggttccgcttcaatcgcgcctctctcatcaacgtgggtttccagtttgccagcgatgtgtacgattacattgccatgcacgacgtagacttgctgcccttgaatgacaatctgctctatgagtatcccagcagcttgggaccactgcacatcgccggaccgaagctacatcccaaataccactatgataacttcgttggaggaatattactggtgcgacgcgagcactttaagcagatgaacggcatgtcgaaccagtactggggctggggattagaggacgacgagttcttcgtgcgcatccgggatgcaggactgcaggtgacgcggccgcagaacattaagactggcactaatgatacattcagccatattcacaaccgctatcatcgtaagcgggacacccagaagtgcttcaaccagaaggagatgacccgcaagcgggaccacaagacgggcctggacaacgtgaagtacaaaatacttaaggtgcatgagatgctcattgaccaggtgccggtgaccatcctcaacattttgctcgattgtgatgttaataaaacgccttggtgcgactgctccggaacggcagcggctgcatcggcggtacaaacctgatgggttgtgttaaacca

SEQ ID NO: 31986 - protein, 322 aa, DROSOPHILA
MVNISTINWVFVCGLSFCLGGIAVLSLMPLGSDCVCPLSNPLAKLAGGGEGVSVIKKEPADEKQPQPHDHGASVHKMALLVPFRDRFEELLQFVPHMTAFLKRQGVAHHIFVLNQVDRFRFNRASLINVGFQFASDVYDYIAMHDVDLLPLNDNLLYEYPSSLGPLHIAGPKLHPKYHYDNFVGGILLVRREHFKQMNGMSNQYWGWGLEDDEFFVRIRDAGLQVTRPQNIKTGTNDTFSHIHNRYHRKRDTQKCFNQKEMTRKRDHKTGLDNVKYKILKVHEMLIDQVPVTILNILLDCDVNKTPWCDCSGTAAAASAVQT

SEQ ID NO: 31987 - DNA, 6101 bp, DROSOPHILA
ccagaagtgcttcaaccagaaggagatgacccgcaagcgggaccacaagacgggcctggacaacgtgaagtacaaaatacttaaggtgcatgagatgctcattgaccaggtgccggtgaccatcctcaacattttgctcgattgtgatgttaataaaacgccttggtgcgactgctccggaacggcagcggctgcatcggcggtacaaacctgatgggttgtgttaaaccaaagatcctatgtttatttcgctattatagtgtgttgtattgtataaatgcgctaatacacgtgcaccatgccatagaggaatgtccagaagagcacgtaggtgcaaaggccgcccatgaactgattggtcagcagatttctgcggttaatgaaaaacttgcgccactgggtgcccgatttcacgagcaccagaatccagagcacgaacacggacaggaagtagaaaaggaatcccagcgtaccactcaggcccaaaatacctgcgaattggtgggacattaactaagttggttcaccatcaattggagccaattacccgcagcgcagcccgagatggcagccatcgatgtgcgacagtattccacggcggatatgttgttccggatggcgccctcgctgtaggcgattatttcgccagtcttggactgcgtggtcttcactcgattcattttatttaattaaattctactttaatttctagcaaaaatattcctaggctgtgaacttcgattgtgtgccgattgtgttatcgattggtgccgataactatgcactgtaaaaattcactagcggtttttgcaggataaatagtttttgtaaattttccgagataaacttgacgagctgtttaatgttaaataatgaagtttaatacaatatcaaatatatttgctgaagtgtatatttattctcaccgctctgtgcttcgatggctcacaattgcgtttgccattcgcccgggcacgtagattgttgttattgggattggcctggagcactcggacggacagtaattcattaaaatatgtggtgataacgcgagctgccgaatctgcgtgcaattcgtgcgtttgacgtgggtactaactgctatgctgtcgcgcggacagttgttctgatacgcagagttcctgcctcaccacacacgaccacctccattaaaaccagccaccccccccagcgcctcctccaccgacagcagctgctccaccgcaccaccaggagaggggcaattaaaaaatcaatcagagggccctaattgaaagctgccaccgtcgaaatgtcgccgccgaagaactgcgcggtgtgcggggacaaggctctgggctacaacttcaatgcggtcacctgcgagagctgcaaggcgttcttccgacggaacgcgctggccaagaagcagttcacctgccccttcaaccaaaactgcgacatcactgtggtcactcgacgcttctgccagaaatgccgcctgcgcaagtgcctggatatcgggatgaagagtgaaaacattatgtccgaggaggacaagctgatcaagcggcgcaagatcgagaccaaccgggccaagcgacgcctcatggagaacggcacggatgcgtgcgacgccgatggcggcgaggaaagggatcacaaagcgccggcggatagcagcagcagcaaccttgaccactactcggggtcacaggactcgcagagctgcggctcggcggacagcggggccaatgggtgctccggcagacaggccagttcgccgggcacacaggtcaatccgcttcagatgacggccgagaagatagtcgaccagatcgtatccgacccggatcgagcctcgcaggccatcaaccggttgatgcgcacgcagaaagaggctatatcggtgatggagaaggtaatcagctcacaaaaggacgccttaaggctggtgtcgcatttgatcgactatccaggtgggtgcagacaagatttcatcgtttagccttatccgctcacctatgaacgacttgaatctttacaggcgacgcactcaagatcatttcaaagtttatgaactcgccctttaacgcgctgacaggttagagttttaaaatttgtggttttaaacttaatttcacattccttgttaatttaaatacgcagtattcaccaaattcatgagctcacccacggacggcgttgaaattatctcaaagatagttgattcgcccgcggacgtggtggagttcatgcagaacttgatgcactcgccagaggacgccatcgatataatgaacaagttcatgaataccccagcggaggcgctgcgcattcttaaccgaatcctaagcggcggaggagcgaacgcagcccagcagacagcagaccgcaagccattgctggacaaggagccggcggtgaagcctgcagcgccagcggagcgagctgatactgtcattcaaagcatgctgggcaacagtccgccaatttcgccacatgatgctgccgtggatctgcagtaccactcgcccggtgtcggggagcagcccagtacatcgagtagccaccccttgccttacatagccaactcgccggacttcgatctgaagaccttcatgcagaccaactacaacgacgagcccagtctggacagtgattttagcattaactcaatcgaatcggtgctatccgaggtgatccgcattgagtaccaggccttcaatagcatacaacaagcggcatcgcgcgtaaaggaggagatgtcctacggcactcagtctacgtacggtggatgcaattcggctgcaaacaatagccagccgcacctgcagcaacccatctgcgccccatccacccagcagttggatcgcgagctaaacgaggcggagcaaatgaagctgcgggagctgcgactggccagcgaggctctttatgatcccgtggacgaggacctcagcgccctgatgatgggcgatgatcgcattaaggtaaccaacagtccacggtattagcctataggtctttctacatttatagctccaacaccacggcttatctaatcagagtgtgcgagctgcgatatatgtacacacggcacctggcactttttagccattcggtgattcagtgcgtctctcgatgttggcccacgggccgtatcttcgtcagccagtttctgggttcccagcaatgctcgcctaccaaatgtaaacacactttttaatggggtggctcaaagtttttgatttcccaagagctttggtcgagtaaaagaaaattgatcgaaccagataagctattttcccccagagggttaaagaatttgaagtcatgcgactgggtctagttaagatatttgattacgaaaattggcctttaattaagaccctaaacgtgacaaacttccattctatatacttcttgatgagtatttaaacaaatatggctattttcggaacaaatcgggcactcatttatatctttagctttatctttattttttaagatgtgtccacacctttgatcgacctctagttcccctggagaaatgatttggaattatccaataatgattcatcacttccacgaattgttgtcccattaatcgagccaccctagctttcatgcaatcagaacgtctggtctgccaagaaggagcagacagcggctttatcagcctctgggcgtgccaattgtgacactatcaaccattatcaagagtaccagcaggcgctcatgagtctccagccagccgtcgatttgggcgtttattgtcgcttagactgtttaccgattttgcctcatcgcaattagcacatttcagtattgttaattgggaaaaacgatacaattttgacgaaatatatggagcagccaggtgttgggcgctatgataagcagtgctccgccattcgattgagtcaccttccagggagaagcctttacgattatggcgataataatggccacctgttcgttcttttccattttgtttgttttgtgaaccacagcccgacgacactcgccacaacccaaagctattgcagctgatcaatctgacggcggtggccatcaagcggcttatcaaaatggccaagaagattacagcattccgtgacatgtgccaggaggaccaggtggccctactcaaaggtggctgcacagaaatgatgataatgcgctccgtaatgatttacgacgacgatcgcgccgcctggaaggtacgtagccttaattaaataactaaatattctattagactgatatgatatgatacaatgtgctcctacaggtaccccataccaaagagaacatgggcaacatacgcactgacctgctcaagtttgccgaaggcaatatctacgaggagcaccaaaagttcatcacaacgtttgacgagaagtggcgcatggacgagaacataatcctgatcatgtgtgccattgtcctttttacctcggctcgatcgcgagtgatacacaaagacgtgattagattggaacaggtgagtaagcacttgataccatactgcagtattactaactttctttcattcgatagaattcctactattatcttctgcgaagatatctggagagtgtttattctggctgtgaggcgagaaacgcgtttatcaagctaatccaaaagatttcagatgtggagcgtctgaacaagttcataattaatgtctatttgaatgttaacccatcccaggtggagcccttgctgcgtgaaatattcgatttgaaaaatcactagacaaccgatgcgtgtcgggcatttaatgcctatgttgatgcccaatgatgaatggtcaacaagctgtagttgttgttgttgttgatgtctgttttatcttgtcgcttgtaatgttagattttaatcgaatgtgattgttagatttgcatatactgcatagattttatatttctacatcaaagagagcatatttaggataccaagtgcaaagcaacacaatctatatgtaatgtacaccgtttacctagtttcaaataaactagacgataatgcaataactaacttggaagcgtgggttctgtgcaaaaaggaaaaaagacaaaaaaaataaactgactttgagaaccagtggtaataaaatgtctcgtattcttttctactcgaatgaatttcgaaccctccaggacaaattacgcaaacgagtgattttgaacaacaatccaaaataatttaattccgaaagtcacaaaataaaaattcgaagtaggaaaaaacaaataagatgtttggaaaccaacgagagatgtgcttcgttaaagcatcaacccggggaaacaccacagcaaccgcgcatgtgtacccgcgaccagtcctcagaaatccacgtcgtgtacgtatccgcagccagcgtatgtgtccgcatctgccgaccccgtcttacatagtcatttatgtataatgtaggtaatataatagctcgagctcgctccgcaccaccaatgtgcgtcgtgcaagtccattccaattgttatccggtccactcgccgcgcaaatcggctttcaggttgattcgcggcaatccttggcccattgcagaaactcatccaacgcgctgacggccaaattgcgagaaagagccttcacacgcagattacgatcggttgtaatgagcaccaattccgtttgaatgaaacacttgccatctgcaaaagagttttagttagaaatgctatcaggaaggacatttaacggaagcagctcacctgtgcattgttcggtttttgccgttttcgagacagccattgccgttgccagaatcttgtcgtcattggacaaatattcctcctcaactagggcaaacaccgatgcattgacaaacgagccctttgtggtagcacatctagaaaagaaatcaataaggtattattgatcagcaggaaaagctttcctgaacaactattactactgatttaaaagtaaaatttcaatacattatcaggaaacttttatctatctcaatagcaaccaatgaattagacagaattataaatagctaatcgctagtaaaccctttatcagatatcagtaataaaggaactatgagctgacgcgcggaatataattaacaatagctt

SEQ ID NO: 31988 - DNA, 2818 bp, DROSOPHILA
cctggagcactcggacggacagtaattcattaaaatatgtggtgataacgcgagctgccgaatctgcgtgcaattcgtgcgtttgacgtgggtactaactgctatgctgtcgcgcggacagttgttctgatacgcagagttcctgcctcaccacacacgaccacctccattaaaaccagccaccccccccagcgcctcctccaccgacagcagctgctccaccgcaccaccaggagaggggcaattaaaaaatcaatcagagggccctaattgaaagctgccaccgtcgaaatgtcgccgccgaagaactgcgcggtgtgcggggacaaggctctgggctacaacttcaatgcggtcacctgcgagagctgcaaggcgttcttccgacggaacgcgctggccaagaagcagttcacctgccccttcaaccaaaactgcgacatcactgtggtcactcgacgcttctgccagaaatgccgcctgcgcaagtgcctggatatcgggatgaagagtgaaaacattatgtccgaggaggacaagctgatcaagcggcgcaagatcgagaccaaccgggccaagcgacgcctcatggagaacggcacggatgcgtgcgacgccgatggcggcgaggaaagggatcacaaagcgccggcggatagcagcagcagcaaccttgaccactactcggggtcacaggactcgcagagctgcggctcggcggacagcggggccaatgggtgctccggcagacaggccagttcgccgggcacacaggtcaatccgcttcagatgacggccgagaagatagtcgaccagatcgtatccgacccggatcgagcctcgcaggccatcaaccggttgatgcgcacgcagaaagaggctatatcggtgatggagaaggtaatcagctcacaaaaggacgccttaaggctggtgtcgcatttgatcgactatccaggcgacgcactcaagatcatttcaaagtttatgaactcgccctttaacgcgctgacagtattcaccaaattcatgagctcacccacggacggcgttgaaattatctcaaagatagttgattcgcccgcggacgtggtggagttcatgcagaacttgatgcactcgccagaggacgccatcgatataatgaacaagttcatgaataccccagcggaggcgctgcgcattcttaaccgaatcctaagcggcggaggagcgaacgcagcccagcagacagcagaccgcaagccattgctggacaaggagccggcggtgaagcctgcagcgccagcggagcgagctgatactgtcattcaaagcatgctgggcaacagtccgccaatttcgccacatgatgctgccgtggatctgcagtaccactcgcccggtgtcggggagcagcccagtacatcgagtagccaccccttgccttacatagccaactcgccggacttcgatctgaagaccttcatgcagaccaactacaacgacgagcccagtctggacagtgattttagcattaactcaatcgaatcggtgctatccgaggtgatccgcattgagtaccaggccttcaatagcatacaacaagcggcatcgcgcgtaaaggaggagatgtcctacggcactcagtctacgtacggtggatgcaattcggctgcaaacaatagccagccgcacctgcagcaacccatctgcgccccatccacccagcagttggatcgcgagctaaacgaggcggagcaaatgaagctgcgggagctgcgactggccagcgaggctctttatgatcccgtggacgaggacctcagcgccctgatgatgggcgatgatcgcattaagcccgacgacactcgccacaacccaaagctattgcagctgatcaatctgacggcggtggccatcaagcggcttatcaaaatggccaagaagattacagcattccgtgacatgtgccaggaggaccaggtggccctactcaaaggtggctgcacagaaatgatgataatgcgctccgtaatgatttacgacgacgatcgcgccgcctggaaggtaccccataccaaagagaacatgggcaacatacgcactgacctgctcaagtttgccgaaggcaatatctacgaggagcaccaaaagttcatcacaacgtttgacgagaagtggcgcatggacgagaacataatcctgatcatgtgtgccattgtcctttttacctcggctcgatcgcgagtgatacacaaagacgtgattagattggaacagaattcctactattatcttctgcgaagatatctggagagtgtttattctggctgtgaggcgagaaacgcgtttatcaagctaatccaaaagatttcagatgtggagcgtctgaacaagttcataattaatgtctatttgaatgttaacccatcccaggtggagcccttgctgcgtgaaatattcgatttgaaaaatcactagacaaccgatgcgtgtcgggcatttaatgcctatgttgatgcccaatgatgaatggtcaacaagctgtagttgttgttgttgttgatgtctgttttatcttgtcgcttgtaatgttagattttaatcgaatgtgattgttagatttgcatatactgcatagattttatatttctacatcaaagagagcatatttaggataccaagtgcaaagcaacacaatctatatgtaatgtacaccgtttacctagtttcaaataaactagacgataatgcaataactaacttggaagcgtgggttctgtgcaaaaaggaaaaaagacaaaaaaaataaactgactttgagaaccagtggtaa

SEQ ID NO: 31989 - protein, 723 aa, DROSOPHILA
MSPPKNCAVCGDKALGYNFNAVTCESCKAFFRRNALAKKQFTCPFNQNCDITVVTRRFCQKCRLRKCLDIGMKSENIMSEEDKLIKRRKIETNRAKRRLMENGTDACDADGGEERDHKAPADSSSSNLDHYSGSQDSQSCGSADSGANGCSGRQASSPGTQVNPLQMTAEKIVDQIVSDPDRASQAINRLMRTQKEAISVMEKVISSQKDALRLVSHLIDYPGDALKIISKFMNSPFNALTVFTKFMSSPTDGVEIISKIVDSPADVVEFMQNLMHSPEDAIDIMNKFMNTPAEALRILNRILSGGGANAAQQTADRKPLLDKEPAVKPAAPAERADTVIQSMLGNSPPISPHDAAVDLQYHSPGVGEQPSTSSSHPLPYIANSPDFDLKTFMQTNYNDEPSLDSDFSINSIESVLSEVIRIEYQAFNSIQQAASRVKEEMSYGTQSTYGGCNSAANNSQPHLQQPICAPSTQQLDRELNEAEQMKLRELRLASEALYDPVDEDLSALMMGDDRIKPDDTRHNPKLLQLINLTAVAIKRLIKMAKKITAFRDMCQEDQVALLKGGCTEMMIMRSVMIYDDDRAAWKVPHTKENMGNIRTDLLKFAEGNIYEEHQKFITTFDEKWRMDENIILIMCAIVLFTSARSRVIHKDVIRLEQNSYYYLLRRYLESVYSGCEARNAFIKLIQKISDVERLNKFIINVYLNVNPSQVEPLLREIFDLKNH

SEQ ID NO: 31990 - DNA, 2896 bp, DROSOPHILA
ctccatggtatgttgcgctcctcgaccgatttagctgcattgtggggcatggtaaacagagaaaatcgcattaaaaccgcacattaagcaagaaatacgatcgaaaactcggccgtcgagtagttcctgtctatgggaaaacgctctgtctgtggtggtaggttatatacctgtgtttcctggtattttcatctgaaacggaaacgcaacgcaggttaatacacttatcgtatcgtattggcttgtcagccactgtatatccgaacattaatcgctgcttaacaatggaaaatcttcctgcgaaatcccgacataaatcgaatcgagcatatgtacatatgtgtgtatgcaaaatacaattacctgatccacgcctgacatttgctgcactttttgcctgcaaataggaaatggcttagtatggcggcgccgattcggttgactggccgtagctatattacccctttttaaaataaatgatataaaaacacaaggcaggcagagtttgttgcttaaaagtttttataaactccgatatattttttttacttaaagaaccacatacactgacaccacacgcacattaaccaatacactgacgggattcttaacgcttccgaagccgtcacttttcacgcgaacggcgttgcgcagacaaagcgatattatcaacactaatttaacggctgtgtgattaaaatgcaagctagtgtcatattaagcattgaggtgattggaatttgaattaagattgtattttactaaaataaataagagtttaaatttttgagagacatagttaagttgcggttatatttagtatttagtaccgattgcgccaaaccagtgctgccaaaattctagacacatcgatatcatcgccaaaacatcggtcttgtgccagctctataaaatagccacctcatctttgtcagccgtagattttgttagatttaaattgttagctatggcgagggcggcttttattgtgtgcctactgatggcctgtgcctggagcagccatgcggtgatgttcaagctgtcgccgaacacccagaagtgcctcaaggaagacatccaggcgaaccaactggttatgggcgagttcgaagtttccgacgtacccggccagatcatcgactacattgtgagttttccgctcggtacacgtacttaacttactccacgcacttaacgaactcaatttgcgtccaacaggcacgcgacaccaagggacacatcctgtcgcagaaggagcacatcactaagggcaagttcagcttcatgtccgaggtgtacgatacgtacgaaatctgctttatatccaaagttcctgcacgtaagttatagtttgcaataaactcccatagcgtatatatataaacgtttcgatttctgtgcagatcaacgcggcgttatacaggaagtatcgctcttgaccaaaaagggagtggagaccaagagctacgaaggcgtaagtacacttatgtcctttttgcatgttttacacttgacttgcaatcctttaatcatatgcagattggcgaagcatccaaactgaagccccttgaagttgatcttaagcgtttggaggatctctccgactccattgtgcgtgatttcgttctcatgcgcaagcgggaggaggaaatgcgcgataccaatggtatgtgaaataccaaaaattccctagaatcacgtctaattattgttcgcattctgcctacagagaaaaccaacagccgcgtgctgttcttcagcatcttcagcatgtgctgcctgctcggcttggcgacgtggcaagttctgtacctccgcaggtacttcaaagccaaaaaactcatcgaatagtcgtctagccgtagtcttaatgcgtgcgtggaactgtgtttaaatgcctggtttagatttcatcctttcatcttttgaacgtttttctgaaataaatgcaactaccacgtatgtatattttattactgcgactgctctccacatttcttggcggtgtgacaaataaatagctcgtattggacgcgtttaacataacaggtacataacacaaaaccacacggtacaagttattggctcagctggcataagttaaaaattgcgattcccttagacggttgtttccttcagcaacattgcactctctgtatccagtccgtcgcttttggcggccaaagcgcctgcctcgtcggtgtcttccttgcacggacttgtggttcccttcttcatcaagatatagcgcgacttggccgcggagctgttcgatgcactcgaatcgtccaccacggactgctccatccacaggctttcgtcgttcagcgcctggttcaccaggttcgccaagctctccggtagcttcgatatagctgtgggatccgcaggacctagaaaagcataaatataagattataggacttgaagagatctcataaacgatgctgcgagctggactcttgatccacaaacattttttttcggtccgctggcaactttgattagtgatagaaaactgaaaaagaatcgcacgttaacgtaaaaaaatataaatgaaaagaaaaagaaaagaagacaagtgaggtataaaaaagtaatttattttcttaaagaagacgaacacataataaacaatgtacatacttaaaacacagattcaaagaaatagtttaatacaagcttaggctgaatcgctttcactgcgaaaaggaacagggtacataagatggatataagagatttcggtatggcttttaaatgcacatgagtttaagattataactacaatcgctcgacatatttacacacgattccattgggtctactacaattatatatatttacacaatgtaaattcaaagatatctcgtgcaccttgtcgttcgaagcttcc

SEQ ID NO: 31991 - DNA, 633 bp, DROSOPHILA
atggcctgtgcctggagcagccatgcggtgatgttcaagctgtcgccgaacacccagaagtgcctcaaggaagacatccaggcgaaccaactggttatgggcgagttcgaagtttccgacgtacccggccagatcatcgactacattgcacgcgacaccaagggacacatcctgtcgcagaaggagcacatcactaagggcaagttcagcttcatgtccgaggtgtacgatacgtacgaaatctgctttatatccaaagttcctgcacatcaacgcggcgttatacaggaagtatcgctcttgaccaaaaagggagtggagaccaagagctacgaaggcattggcgaagcatccaaactgaagccccttgaagttgatcttaagcgtttggaggatctctccgactccattgtgcgtgatttcgttctcatgcgcaagcgggaggaggaaatgcgcgataccaatgagaaaaccaacagccgcgtgctgttcttcagcatcttcagcatgtgctgcctgctcggcttggcgacgtggcaagttctgtacctccgcaggtacttcaaagccaaaaaactcatcgaatagtcgtctagccgtagtcttaatgcgtgcgtggaactgtgtttaaat

SEQ ID NO: 31992 - protein, 195 aa, DROSOPHILA
MACAWSSHAVMFKLSPNTQKCLKEDIQANQLVMGEFEVSDVPGQIIDYIARDTKGHILSQKEHITKGKFSFMSEVYDTYEICFISKVPAHQRGVIQEVSLLTKKGVETKSYEGIGEASKLKPLEVDLKRLEDLSDSIVRDFVLMRKREEEMRDTNEKTNSRVLFFSIFSMCCLLGLATWQVLYLRRYFKAKKLIE

SEQ ID NO: 31993 - DNA, 3186 bp, DROSOPHILA
atcgtaattaggtcacttccggcagtgaccgagataaaagtaacggtaatatcatgagtacaatggccagttaaaagtagatataaacaattaaatggcacagggaatagaaattaatgggtttggacaaagcaataacattgaaacttgcaggtttctaatgttttacagttctttgatccttaatattattatttatcctattatcttgactaagtttttgaatttcagtgtaactgcaattaaatgcgtataaatgcagctcgaaattaacaattcatgcggtgtggtggcacattaagcaatttggtgatccgttgtctatattataagcatatccgccgacataaaactattaaggcccattaagacctacggtgtacatcatcttttcattcaaacagcttacagtagttactgcgtactgcgtatgacggtttcaatctttgacagaattcctaagtatcttcaaaagtattacaaccgcaacacttgtccgaaatgtcttcaatttgtgtcacttatgcaaatccgtaattcccacaaaacgggtttaacaatttgtcaaaaattcgatgtcaaatgcccaaatgaaacacaaactggcaaacactatataatataggcggtttgctatttccaggctttttgaaagttgggtagtgaaagttgtattgaactctgtgcgtctctttcgaaatctccaacacaatccaagcgattgcacgtagcatgaatactgaacagcacgtgagacggtagccacatttcttgcaagaatacacaagtgaattcaattcctccactccggctccacgctgcacatatatgccctataagtgggggccaagccttacgggggaaatgcgatggcagttataaatacttgcacacacgtccgtccacctgatattttctttgccacaatgttttcggccccaaatttataaagagacggacggcaggcaaaccgtttattgtacttttaggaaccgcttaactcatatctcaacgcgatcgcaaaatgcgtaccgaatacctggtcgttctgattatatgcacttcctgcatttgcattagtgctggagatagctattccggggatattcaaagctcgaactcattggatttcggtgtgtgaaagataatagggatcaaaagagattctaaagtgctgaaaaaccttatagtaaagcaaactgaaagtgaaattaataatatacacttacaaatatatgtgtttctgtactatcaattggcactgagtgcttaaaacgataattcagtgtacaaacaactattcaaatctttatgacagaagtcattggattaacttcttggattatccttgaatgctaaacttataagattctttcgcatttattaggcaacgatagtgggggctacagctacagctccccgccgagcaacagctacttgcctccagccacacctgctccggagtacctgcctccgccgaacaatggataccagtacaatccgccgccgaacaacaactacctgccaccgcctaacaacaactatctgcctcctcctcctgaatatggaccgccagctggctatccttcctatggaccaccacctcctccgttttacaagccagctccgttcattccctaccattcgcacgactccattctggaaaagcttaagtccaagatcaatctgtatacgcttggaaagattttgctcaagctgttgatattcaagaaaatcgtcaagttcatcggcctgattttcttgctcttggttctgccgaagctgaaaaacattttcaaggatgatatgatgtctggatctggtgagagcgatggcatggaaagcaaacttgtagagacagataagggtaaggtgtttctatatagtgctttaagcattaattattaatatttatatttctcccttttacagataaactagcccaacaaattgagaacctatacgattttgtaataaactcgatagaaagttttgaaggaagaagttcgtagatcaataccaaaattagttataaatgcattgttacaaattgtattacacttgattatttatttgttaaagtcttataaataaaagtatttcgtattttactcttgtgtttgaacttggggcatatcattgattcagactggttcttaaatcaatccaacatcctgatggcttgatacgcttaattaggttcttgaacagtactcattaagtagtcggcctatctaccagaatattagccaaggtacacatttgtacctgcaaacgtacctaggtacgaaagctgtcaccttgcgcatcactggcgacgatacatttcgccgactatcgatagacgggctcactctgcgtccgcatccaagttgcgatcggattcattcgcattcgccagtgatcaactccgctgctgcagatccacagccaaaaaatgctgcacatagtatcggttgttattatagccctgagtctgggctgtgccgttggccaggatttgcggcgtgtggacgacaccgagttgattcaactcctgaccggcagcagcaatgtggttgtcctattcagtgagtattggtaggaaagtcagccagagaaatccagcctacgtgtccactgtgcatatggaggatggtacaccggttactggctaacgagcacacttaattgcagacaaaaacaattgccagcgctgcgtggaatatgagaacatggtgaccaagatacgtgcccagctggaggagaccttgtcggccattgtggtccagtcggtggacagcaacctggtatccatctatgaccccagcaaggagcccgctttggtgttcttcaggcgaggaatacccattctataccatggcgagatcaacgatgacgaaatcctagacttcttcaatgacaacttagagccagcggtcaaagagctttccgacgacaacttcgagcacctgactcaagcctcgtcgggtgccactaccggggactggtttatcttcttgtaagctatattagtcatgcgttgaggtcgccatctaagcgtcatgagatgtacatatatgtgcacatatgctcacctacacccacttccagctcttcggccgaatgtaccgtctgtcagcgactctatgccgtttgggagtctgtgggcggaaagctaaagcgaaagctgaatattgcccgcat

SEQ ID NO: 31994 - DNA, 651 bp, DROSOPHILA
ctcatatctcaacgcgatcgcaaaatgcgtaccgaatacctggtcgttctgattatatgcacttcctgcatttgcattagtgctggagatagctattccggggatattcaaagctcgaactcattggatttcggcaacgatagtgggggctacagctacagctccccgccgagcaacagctacttgcctccagccacacctgctccggagtacctgcctccgccgaacaatggataccagtacaatccgccgccgaacaacaactacctgccaccgcctaacaacaactatctgcctcctcctcctgaatatggaccgccagctggctatccttcctatggaccaccacctcctccgttttacaagccagctccgttcattccctaccattcgcacgactccattctggaaaagcttaagtccaagatcaatctgtatacgcttggaaagattttgctcaagctgttgatattcaagaaaatcgtcaagttcatcggcctgattttcttgctcttggttctgccgaagctgaaaaacattttcaaggatgatatgatgtctggatctggtgagagcgatggcatggaaagcaaacttgtagagacagataaggactggttcttaaatcaatccaacatcctgatggcttga

SEQ ID NO: 31995 - protein, 208 aa, DROSOPHILA
MRTEYLVVLIICTSCICISAGDSYSGDIQSSNSLDFGNDSGGYSYSSPPSNSYLPPATPAPEYLPPPNNGYQYNPPPNNNYLPPPNNNYLPPPPEYGPPAGYPSYGPPPPPFYKPAPFIPYHSHDSILEKLKSKINLYTLGKILLKLLIFKKIVKFIGLIFLLLVLPKLKNIFKDDMMSGSGESDGMESKLVETDKDWFLNQSNILMA

SEQ ID NO: 31996 - DNA, 3053 bp, DROSOPHILA
atagtgggggctacagctacagctccccgccgagcaacagctacttgcctccagccacacctgctccggagtacctgcctccgccgaacaatggataccagtacaatccgccgccgaacaacaactacctgccaccgcctaacaacaactatctgcctcctcctcctgaatatggaccgccagctggctatccttcctatggaccaccacctcctccgttttacaagccagctccgttcattccctaccattcgcacgactccattctggaaaagcttaagtccaagatcaatctgtatacgcttggaaagattttgctcaagctgttgatattcaagaaaatcgtcaagttcatcggcctgattttcttgctcttggttctgccgaagctgaaaaacattttcaaggatgatatgatgtctggatctggtgagagcgatggcatggaaagcaaacttgtagagacagataagggtaaggtgtttctatatagtgctttaagcattaattattaatatttatatttctcccttttacagataaactagcccaacaaattgagaacctatacgattttgtaataaactcgatagaaagttttgaaggaagaagttcgtagatcaataccaaaattagttataaatgcattgttacaaattgtattacacttgattatttatttgttaaagtcttataaataaaagtatttcgtattttactcttgtgtttgaacttggggcatatcattgattcagactggttcttaaatcaatccaacatcctgatggcttgatacgcttaattaggttcttgaacagtactcattaagtagtcggcctatctaccagaatattagccaaggtacacatttgtacctgcaaacgtacctaggtacgaaagctgtcaccttgcgcatcactggcgacgatacatttcgccgactatcgatagacgggctcactctgcgtccgcatccaagttgcgatcggattcattcgcattcgccagtgatcaactccgctgctgcagatccacagccaaaaaatgctgcacatagtatcggttgttattatagccctgagtctgggctgtgccgttggccaggatttgcggcgtgtggacgacaccgagttgattcaactcctgaccggcagcagcaatgtggttgtcctattcagtgagtattggtaggaaagtcagccagagaaatccagcctacgtgtccactgtgcatatggaggatggtacaccggttactggctaacgagcacacttaattgcagacaaaaacaattgccagcgctgcgtggaatatgagaacatggtgaccaagatacgtgcccagctggaggagaccttgtcggccattgtggtccagtcggtggacagcaacctggtatccatctatgaccccagcaaggagcccgctttggtgttcttcaggcgaggaatacccattctataccatggcgagatcaacgatgacgaaatcctagacttcttcaatgacaacttagagccagcggtcaaagagctttccgacgacaacttcgagcacctgactcaagcctcgtcgggtgccactaccggggactggtttatcttcttgtaagctatattagtcatgcgttgaggtcgccatctaagcgtcatgagatgtacatatatgtgcacatatgctcacctacacccacttccagctcttcggccgaatgtaccgtctgtcagcgactctatgccgtttgggagtctgtgggcggaaagctaaagcgaaagctgaatattgcccgcatgaacagtttggagtctggaatctcaactgctacgcgactgggagtattggaagcaccggcttttattttgtaagccctgatcgctttggttgtgtccaagaatagattatataaattataatcattacagcttgaggcaaggaaagatgtacaaatattcagccaagcaatacagtcccgaagcctttgtccagtttgctgagaagggatatacccagagccatcctcaaccagtgcccgcaatcccaagtgccgtgtaagtattcctctcatagctaaaatgattttaaattcatccatcgatcgaattttaaactcaaagtccgattatgacctttttatagggatttgtgagaaactgatacatgtgtttagtaagtgagccaagataaaacttgtaaacctattaataattactattagttaacaaatactgattctttgtccccggtacaaggttgcatataacgccagtttgagggtattcaacatagacactgattccaccatcgagcataaaacaattgttaatatcactccgttgattaatatcgaaccaaatgttaatcgtaaccgttgtatattatccagtttgtacataaacaatattacattaatcaattataccctggttaaaacagttcctggtttgagaagatcgaatttaatactacacaacgtttatcctaataaccaatgatcaaatgagctaatgttttaactttcgtgcttttcagaaacgaatttttgggcccactgcaaagttattttgcagctgaaaacataacatcgctggcgactttgagtattttcgccttagttgctctcttattcgttggcaaaaaggttgccaaaatattcagttcagagcctgcgaaaacaaaaaataagtcgaaataaaactaatataaagactaaatgaaacacgacgtttttgaattagtcgagtgacaacaattagcggaaaagtgggcgcgaaaattcaactgctgcaattcctaacgccacaaaaactggcagctcttttggctggaacggtggaagcggaacatgcaaatatggatacctaatatcgcaaaagatccattgttcactggcgcacaacgctgacaatacctatatcctatctcttgattgctttcaattaattagcgggcaagcaaacaaaaatatttagatcggcccatttagcaactgggctcggagttcaggggctaactcggctagcaatctagccaattgcttaagtgcgatgatagt

SEQ ID NO: 31997 - DNA, 794 bp, DROSOPHILA
ttcgccagtgatcaactccgctgctgcagatccacagccaaaaaatgctgcacatagtatcggttgttattatagccctgagtctgggctgtgccgttggccaggatttgcggcgtgtggacgacaccgagttgattcaactcctgaccggcagcagcaatgtggttgtcctattcaacaaaaacaattgccagcgctgcgtggaatatgagaacatggtgaccaagatacgtgcccagctggaggagaccttgtcggccattgtggtccagtcggtggacagcaacctggtatccatctatgaccccagcaaggagcccgctttggtgttcttcaggcgaggaatacccattctataccatggcgagatcaacgatgacgaaatcctagacttcttcaatgacaacttagagccagcggtcaaagagctttccgacgacaacttcgagcacctgactcaagcctcgtcgggtgccactaccggggactggtttatcttcttctcttcggccgaatgtaccgtctgtcagcgactctatgccgtttgggagtctgtgggcggaaagctaaagcgaaagctgaatattgcccgcatgaacagtttggagtctggaatctcaactgctacgcgactgggagtattggaagcaccggcttttattttcttgaggcaaggaaagatgtacaaatattcagccaagcaatacagtcccgaagcctttgtccagtttgctgagaagggatatacccagagccatcctcaaccagtgcccgcaatcccaagtgccgtgtaa

SEQ ID NO: 31998 - protein, 249 aa, DROSOPHILA
MLHIVSVVIIALSLGCAVGQDLRRVDDTELIQLLTGSSNVVVLFNKNNCQRCVEYENMVTKIRAQLEETLSAIVVQSVDSNLVSIYDPSKEPALVFFRRGIPILYHGEINDDEILDFFNDNLEPAVKELSDDNFEHLTQASSGATTGDWFIFFSSAECTVCQRLYAVWESVGGKLKRKLNIARMNSLESGISTATRLGVLEAPAFIFLRQGKMYKYSAKQYSPEAFVQFAEKGYTQSHPQPVPAIPSAV

SEQ ID NO: 31999 - DNA, 4739 bp, DROSOPHILA
ttgagtattttcgccttagttgctctcttattcgttggcaaaaaggttgccaaaatattcagttcagagcctgcgaaaacaaaaaataagtcgaaataaaactaatataaagactaaatgaaacacgacgtttttgaattagtcgagtgacaacaattagcggaaaagtgggcgcgaaaattcaactgctgcaattcctaacgccacaaaaactggcagctcttttggctggaacggtggaagcggaacatgcaaatatggatacctaatatcgcaaaagatccattgttcactggcgcacaacgctgacaatacctatatcctatctcttgattgctttcaattaattagcgggcaagcaaacaaaaatatttagatcggcccatttagcaactgggctcggagttcaggggctaactcggctagcaatctagccaattgcttaagtgcgatgatagtttggcgtggaacgctcaaattaaagcagcgtttcgtttcgtaaagcgtgagattcgcgatcgtgttgttaggcagtttttttttatttgtttcgcagcggtcatcgttggcgtaagcgtattcctcggaacctggattttttgtatcttggggtaaatcactcaaaacacgctatttatacacccgctgatacccaaatacacgcaaatgtacccgaattggtgttggttaaaacacagtgctcgctaaatgtcagctgacgtcagaaggtcttgaaaaaagagcgaggagtacacacgaacacaaaaacgattacgaatacgagtgggacgtatatatgtgtagtgcggtatatcgatatcggtagatcgagagagaacactacactcacacgacactcacattcgcattcgcagcgactttcgattgagattttggttggctgtggctgtagtcaagcgagcgcacatgagtcagattcgtagcttttgttttgttcagtcgagtgcgagttctgtgcgattcagatactcgctgccatccgaaccgaactgaagtccaagtcgaatctaatgtgcgtacttacgtgtagaacagttcaagaaaatgtgcagacattcaacggtcgcatttgtgtggatgtgtggttgtagtgaagagtgccagcattaatcgcatttttcccctgcacgagcaccacgactagaaaatactcgacacgtctgtctgtttttctgctttattgcttctacgctattctgcttttccgtttcggttttcctccgcttggcctagtgaaaaacaacaaatttgattatattgtgtaagttatgtctagcattgaaaagatgaaaagtgtcattcctataaatacaccaccacctcgggaaaggcactcgcaatagagaaactggccaaaacccaacaacaaacataacaaacaaaggaaccgctgaatataaccaaacttcggagtaggggctgagctaaaaagtatagtgcgcagccatcatgactaactcaccacccaaaacgccagcccaattacagaaaatcgatattctagtcgcgctgtaacgctgcgtagctgctaaatacacagctccctacctgcaaacaacccgaatacaaaaaaaaaaaaaagaaaactacgaataacaaaacagtcaggcgaggcattagtataccgaaaagcgaaaaccacttccgccaatggtcgaaatcgccgtcgccatctcgacatttagctagccatatagcaaatgtctttacatatcataccgatataatagaaaccatctgtgatacgcgtgtaccttaaaaatgaactaactttgcaccgatcgagggtatcactgggaaattaacgatgcgtcttgtccgcagtaaatgttgtcaacgtgatgtttctgtaaccgactatctgaacaccccgcatccgcaccagcaccatccatcgtccaccgacgtccagcacaccaaaaacatatttacacgctactgggacgaccacataagaatgaaggaatcgagcgagggcaaaaccagggccaaggccccatccgctgccgcatccgcatccaccacaccatcgtcatcttcagcacctgccaaacaaacccagagcgttacgttcgtgaggaccagtaatgcaccagctgtttgcgacgccaacgggaacgggaatgggtgctccatccaaacggagtggacattccccccaaaggcgcccacaccgcacatctacaattgcctgagtccggtaagtccacactgaaagtaaaagcgttggaatatcatgtaagttaggatcagatacaactttataatatggtatataatatattttcgagcgaattaagattgtaaagagatagcgtatatggcgtagtttattttttgcttcgcctgcatagttcctgtgtaatagatagaccacccaccccattcgcccattcgcccattcgacaagtttcctccgcagtgcagattatcatgacgtaacgattattagatactccacgggcgaccgtcgtctgtacgcagtatagttagttcctagtctttgtgctcgtgtgttggcggaagataaaggggaaacaaattgtttgcacttcagcaattgccatttaagtcattagtatgtatggcggtttgaacctatgtacatacggacatttggcaatatattataggcttttgcttgggcacgctcggccataaatagatctataccgaggaatttcaaagataagattagagaatcgcatatacaagcgcaggtcagctggggttcataaataacaaattcactcggatcgtatgtttataattaaggaagggctaaatcacttttgttttccggttttcactttctcgcttgcacaattgcacatctcacagatattcataaaacgtacaaggactttttggcgaaacacttacattactaaattcaggaaactccccgattcaatgaatcaacaaaagtaacttgacacgttctagaaattttgcagttttgaaatatgcattagcgataaggcaaaaactagaatatgactcacaatcagcgtgtaactaagtaaatattatacataataagtgaatgtagagatattaatttatttcggagtttctaagattttaccaaattttatacttataaaatactcttcattcttccaggacatgatggcctcaagtgataagagcagctttaagggatttcgcaagcaattcagtggacggttcaagcgcctagttactcgaaaagtggaacacactccagtgatacctccagaattgaagccgcaactaaaaacaatatacgtttactaacttaagatgtaacgacaattgcaagcacaagtgttttccccactatgtacgtatgcacctcatcggttggcgtatacatatgtgtatgtaaatggcaggaaacattagtgataggaaaagcaagataaactaagtaatcataataccattctgattgacaattttaagtattcagcgtattcgtgcgtattgttaggctcaataaaaaaacgaacattgcaaagacagacgaggtttaaaatgaattggaacaaaagtcacggggttcatgaaatacatacatatcgagaaagaacataacataaatgttcaaatatctgctggtagtaccgatacgaatctatgtatttgcttctttttcaaataagttaaaggaacctactatcctacctatacctacatgttcattaattacgattaaagaaatagtttaattaccaaactgctgaaataattattgtgttggtagtttctgtgtgaaggatgaaatggaaagcaatttaacgagacacatgggcacattatctcggtctgcttcaatcgatgaaccaaggagcttttccatatcgagcaacatacaactgaaaccacaagccatgccaacattcaaacttagtggaacgaagaactggctgctatcatgcgaaaagaatttagccactaaaatggtgctgcgataagattgaggtaagcaaagtggatatgccacgttgtgcggactgagagaagcgatggcaaccacaaaatgtgctatcttaggaaaacataccccgaaatccgcagtaagaactccgttttaatggttcacttatcatatgtattcgaaattaactagacaattaaataaaatgcttactttattccaatctaaacgtacgtacacacaaacgcgtctatatatatacatagtcaagtactcgtatatatagctccaccgaccagagacgaggttagcagttattaatctgcatgggttccttcccgagtagtgctacccgtttccgagttgcctgtgccagtctcttttcggtctctattgctgggcccagcaccactggcatcgtggctttcgctgctgtttggtgtggacactgcggtctttgttgacttgggggattgggattcctgggtctgtggaccagtttcagcttgggtgctcgtcgactcgctgcggcgggtcgcttgatcctcctcattccgattggggaactcgtgaaccgagcttgaatttatctggaaaagccgaacgaattgggtgagatgatgcctcttcaatagattgaactgtacaactcaccacgtcctcttccgattccacgctggatatcgagggatttctctggataatcaatgatataggtattgggtacaattatcttgtatggaacaatactacaactacttacttgtgctttgtatttgattaacttaaacttgcg

SEQ ID NO: 32000 - DNA, 1813 bp, DROSOPHILA
ccgaaccgaactgaagtccaagtcgaatctaatgtgcgtacttacgtgtagaacagttcaagaaaatgtgcagacattcaacggtcgcatttgtgtggatgtgtggttgtagtgaagagtgccagcattaatcgcatttttcccctgcacgagcaccacgactagaaaatactcgacacgtctgtctgtttttctgctttattgcttctacgctattctgcttttccgtttcggttttcctccgcttggcctagtgaaaaacaacaaatttgattatattgtgtaagttatgtctagcattgaaaagatgaaaagtgtcattcctataaatacaccaccacctcgggaaaggcactcgcaatagagaaactggccaaaacccaacaacaaacataacaaacaaaggaaccgctgaatataaccaaacttcggagtaggggctgagctaaaaagtatagtgcgcagccatcatgactaactcaccacccaaaacgccagcccaattacagaaaatcgatattctagtcgcgctgtaacgctgcgtagctgctaaatacacagctccctacctgcaaacaacccgaatacaaaaaaaaaaaaaagaaaactacgaataacaaaacagtcaggcgaggcattagtataccgaaaagcgaaaaccacttccgccaatggtcgaaatcgccgtcgccatctcgacatttagctagccatatagcaaatgtctttacatatcataccgatataatagaaaccatctgtgatacgcgtgtaccttaaaaatgaactaactttgcaccgatcgagggtatcactgggaaattaacgatgcgtcttgtccgcagtaaatgttgtcaacgtgatgtttctgtaaccgactatctgaacaccccgcatccgcaccagcaccatccatcgtccaccgacgtccagcacaccaaaaacatatttacacgctactgggacgaccacataagaatgaaggaatcgagcgagggcaaaaccagggccaaggccccatccgctgccgcatccgcatccaccacaccatcgtcatcttcagcacctgccaaacaaacccagagcgttacgttcgtgaggaccagtaatgcaccagctgtttgcgacgccaacgggaacgggaatgggtgctccatccaaacggagtggacattccccccaaaggcgcccacaccgcacatctacaattgcctgagtccggacatgatggcctcaagtgataagagcagctttaagggatttcgcaagcaattcagtggacggttcaagcgcctagttactcgaaaagtggaacacactccagtgatacctccagaattgaagccgcaactaaaaacaatatacgtttactaacttaagatgtaacgacaattgcaagcacaagtgttttccccactatgtacgtatgcacctcatcggttggcgtatacatatgtgtatgtaaatggcaggaaacattagtgataggaaaagcaagataaactaagtaatcataataccattctgattgacaattttaagtattcagcgtattcgtgcgtattgttaggctcaataaaaaaacgaacattgcaaagacagacgaggtttaaaatgaattggaacaaaagtcacggggttcatgaaatacatacatatcgagaaagaacataacataaatgttcaaatatctgctggtagtaccgatacgaatctatgtatttgcttctttttcaaataagttaaaggaacctactatcctacctatacctacatgttcattaattacgattaaagaaatagtttaattacc

SEQ ID NO: 32001 - protein, 181 aa, DROSOPHILA
MRLVRSKCCQRDVSVTDYLNTPHPHQHHPSSTDVQHTKNIFTRYWDDHIRMKESSEGKTRAKAPSAAASASTTPSSSSAPAKQTQSVTFVRTSNAPAVCDANGNGNGCSIQTEWTFPPKAPTPHIYNCLSPDMMASSDKSSFKGFRKQFSGRFKRLVTRKVEHTPVIPPELKPQLKTIYVY

SEQ ID NO: 32002 - DNA, 3502 bp, DROSOPHILA
cacgatgtaaagcgggggtttcccagtctgcctgcaaggtaattttatacttgtttacttggaaagtttaagtgaatcatctgattaaatgcaaacacgccttgtgtatttgcttttccattatgggcctttgtttggcaacagggaaactataacaaccggaatggccgaaatgaaagaggtcataaaaccggaggtgaaagctaaagttttatattccggactaataaaatatatggtttttttttatttctatatgtgatatatattctgatctccacttacaattcgttatagccgagcatctttcccttgttttcggttacccaggaaggtcgctgatggacgaaatatgaaagtatcgctaatgcaattaagcaaagcaaacacatgtgaagatgttgctaaaatggtgccaaaatagtatttacacttaatattactctgagactcttgcaagtcaacttttttatttaccattttcaggttttgcgtaaacaatgttttcgccgcaaattgtttatgttttttaggccgccaaccgacgatgccataattttttaccgcaacgagcaagatatgtgcataactccttatttaaccaatgtaagcaatggatattgcttggtcctgggatttggctacagcgaaacccatgataaatgcatttttgtttaaacaatgcgcaaaaacactaaacaactagcacattttacagtcgtaaatatttgtgttagtcaagatagcggcaaggccctgggctttttaaaatctcatgagtgtcactgataaatattttatatattttgcttattcattacagattactgaataaataataaaacaacatgtttacagcctgcaagtaaatattacttgtattactatttagttttgaaaataaacatatggtatagaattatccaccgtgtttctttccattcgtttcatcagcagctatcgataagttatcggctgtgatccagtggtgtgggtattgttttcatttattttcaacagcacacgtgcaaccagaaatataataacaaataaaaatgctgcgaaaacaagccagacagcgaagggaatacctgtacaataaagcgctcactgagcgcctcaagtccaaacaaaaaatccaggagaccgttgtgaaaagcattaatgaaaacaaagcaattggctccaaaaatgtgaagaaaagtctcaccgcctacaagtcgctgaaatacgcggatgagggtaaatatcaatataacatttattaaataatgtttaaatagtttcaagacagtgcaattatgctgttagatgatagcgcaattatgctgttagatgaatctgcaatacagatgttttcgtttgaaagctaaaatcccaagagcttacaaaggtagcattcgtgtttcccaaataaccagtcgagattttatcggtagttaagaactaacaattacaattagtaaatagtaattttctatgcgtgtttagaaggcagacagcgacaccacatattaaattttgattttagtgcaattatacgcgtgtgtcctgagatttgagaagataaaaccgtctttttttgaaaaggatccttctttaactataaaacgttgtatagatgttaaatggcgttattaacaaagatttttgtataacgttgaatctcaaatttggtgtattaaatagaattattataaaagcatttgcactaaaaaaggatctatgtatttcaggtgtcgatgaccgcactgtcaatgatgagtatcactatgccggatgcgaggatccgaaaataatgctgaccacctcgcacaacccttcgtcgagattgaaaatgttcatgaaggaactgcggctgattatcccaaatgcgcagcagatgaacagaggaaactaccagctgactacactaatgcacgcctgtcgtgccaataatgtaaccgatttcctaattgtccatgagcatcgtggcatcccggacagccttgtggtctgtcatcttccgtacgggccaactgccttcttcaacatatccgatgtggttatgcgacatgatatacccgacattggacacatgagcgagcagaagccacacttaatttttaataactttaaaacgcccattggcctgagaactgttaagatactcaaacacttgttcccagtgcccaaggagaactcccaaagagttatgtctttcctaaaccacaatgactcgattatattcagacatcatcagtacaaatatgtgaacaaggagttggagcttaccgaagtgggccccagattctcactgaagctgtaccaaattaagctcggcactttggagaacatcaaggcagctgacacggaatggattaaccgaccttatatgaatacctcgcagaagaggctcatattttctaacgatccgggcataataaataaggacaccgaggcttagatttagagataccgaacgatttaacagaaataaatttgttttacttttataatgtaactatttcttttatttttatgtggctattactattcaaaactaccttacataaagaatgcactaaaaatatatttgagcaaataatcaaaggctgcaaaagaaaaacggccaattatcggaagaccgacctttgaaagaacattcgaacagtagtcgtgaacatttggcgatgaccgtttgactcttcaagttatgagtcccagaatcagtttaaggagacaccaaaagatgctgcagaacatgggtatttcaaatctgggtcacgcccccttttgcctcttcaggtcacgaatttctgtggcaggcgaacccaacagatgcgccaagccacttctacgaaaaagtggagttattttctcccgcctacgccaatatatttacacttttgaaaagaatttgtttcgaatggttccttcgtgcgaaccaattaccttttggactatacattgtatagggaatacttataggaatgcataatttaagagcacttaaaaggtagccaatttgctaactttttcgtatgtccttctaatattaacttctttaaagggcttacactgatcgatcgtaatagttttgggtaattaatgaacacaaagtgttcattgtctgcgactcggacagacgattggcagggatccgcatccgctgttccatatcagttagttagatcaaaggctaacacgatctaataaggtgtaaaacacctgacaacaccagccatataattaaatgtgtttatactaattccgtctatcatttagcagctgtccgatgctaatgatggaacgcattcgcctaaatagcctgcctgcctgcctgcctgtacaggctgttggatctggcacccattactggccatgccgatgatcagcaggccgcatggagcatggaaacccgtccatttcgttcgacttcgctccgtttggacttggaccacatacaacttgataccattgccgtgaaacaatgcaggggatgggatgagcactcgggcac

SEQ ID NO: 32003 - DNA, 1008 bp, DROSOPHILA
ttttcatttattttcaacagcacacgtgcaaccagaaatataataacaaataaaaatgctgcgaaaacaagccagacagcgaagggaatacctgtacaataaagcgctcactgagcgcctcaagtccaaacaaaaaatccaggagaccgttgtgaaaagcattaatgaaaacaaagcaattggctccaaaaatgtgaagaaaagtctcaccgcctacaagtcgctgaaatacgcggatgagggtgtcgatgaccgcactgtcaatgatgagtatcactatgccggatgcgaggatccgaaaataatgctgaccacctcgcacaacccttcgtcgagattgaaaatgttcatgaaggaactgcggctgattatcccaaatgcgcagcagatgaacagaggaaactaccagctgactacactaatgcacgcctgtcgtgccaataatgtaaccgatttcctaattgtccatgagcatcgtggcatcccggacagccttgtggtctgtcatcttccgtacgggccaactgccttcttcaacatatccgatgtggttatgcgacatgatatacccgacattggacacatgagcgagcagaagccacacttaatttttaataactttaaaacgcccattggcctgagaactgttaagatactcaaacacttgttcccagtgcccaaggagaactcccaaagagttatgtctttcctaaaccacaatgactcgattatattcagacatcatcagtacaaatatgtgaacaaggagttggagcttaccgaagtgggccccagattctcactgaagctgtaccaaattaagctcggcactttggagaacatcaaggcagctgacacggaatggattaaccgaccttatatgaatacctcgcagaagaggctcatattttctaacgatccgggcataataaataaggacaccgaggcttagatttagagataccgaacgatttaacagaaataaatttgttttacttttataatgta

SEQ ID NO: 32004 - protein, 298 aa, DROSOPHILA
MLRKQARQRREYLYNKALTERLKSKQKIQETVVKSINENKAIGSKNVKKSLTAYKSLKYADEGVDDRTVNDEYHYAGCEDPKIMLTTSHNPSSRLKMFMKELRLIIPNAQQMNRGNYQLTTLMHACRANNVTDFLIVHEHRGIPDSLVVCHLPYGPTAFFNISDVVMRHDIPDIGHMSEQKPHLIFNNFKTPIGLRTVKILKHLFPVPKENSQRVMSFLNHNDSIIFRHHQYKYVNKELELTEVGPRFSLKLYQIKLGTLENIKAADTEWINRPYMNTSQKRLIFSNDPGIINKDTEA

SEQ ID NO: 32005 - DNA, 3119 bp, DROSOPHILA
gtaaatctcagactctttgctttggctctcctcgccgctttgaagtttcgccgtggcggagggatgatgcatgttcgcatcgcggtgattgggagagagcacgggggcaatgatgtgagtgattatattttgattgcattgctcactgtggttggttgtacgtacggaccgcggaggactgcagacctggacgactgcaaaactggaggactgcagaactgcagaactgcagagctggagaactggggacggcattgctcacttagtacaataaccggcacgtcgtctgccagtctgctgaaacagtaattttttgtgtgccgtgttcttcgtttgttgtcgtttgttttgttcccgctctatcgctatcttcgccccaagttcgccccaagtccgctccagctttatagcccaccaccaccatcaccaccgccgctcacgtattcgcattcagcttttgatggtaatttgccaggcaggcggagggcggcagttggagggcggcagggcgcacagtcggatggggaaacctcagtgagagtgcttttccttccagagtgccagtgccagtgccagtggcagagcagagctgagctgctccagtggtagtggtggtggcgaagccagtgtcgtcgccggagcttataacgagcgtagttcttgcgcagagtttattgccgacagttggcgcgatcttgtttgccgtcgcttcttgtcgctatctcgtccatatcacacatcgccatgccgcatcgccaccgtgccccaaatggatgttcctcgctagcaaatccactagctgctcccgcttatgttcctgcgacggcacgcggcattgctcctcattgcgccgcatgcgtttaggatattcatacgtttgacggacgaaaataatacgagtgattagcaagtgcttgagtgcattcataaatcaagttagcctgcaaatatgtaacactgtgatgtgcggaacaaattgagccgaaaacattgtgtaataatgccccggccctcgcgagaatcctacggcgaacagaagcccccctattcgtacatttcgctaacggccatggccatctggagttcgccggagaaaatgttgccgctcagcgatatctacaagtttatcacggaccgatttccgtactaccgcaagaacacccagcgctggcaaaattcgctgaggcacaatctcagcttcaacgattgcttcatcaaggtgccccgacggccggatagacccggcaagggagcctactgggcactgcatccgcaggcctttgatatgttcgaaaacggcagcctgctccggcggaggaagcgcttcaagctgcacaagaacgacaaggatctgctcaacgaggagctgactgccctggcgaacctcaatagattcttctttaccacccgtaacggaggcagtgcagcgcacatgtcgccgctggatatgaacaatgcggccgccatgagactggatccactgcccaggagcacggcgcacatgccaaactccctgggtccaggtgtgccactgccgcacgtaatgcccgcctccatgtccggtgcggatcacacgaatctggcggacatgggactgaccaatctgcccgcgctaaccagttccgagatcgagggaccgctgagcctgcgacccaagcgatccttcacgatagagagcctgatcacgcccgacaagccggaacatccgtcggaggacgaggacgacgaggatgaccgcgtcgatatcgatgtggtcgagtgcagcggtatcagccgctatcccacaacgcccgccgcctccgaggagtatatgtccgccagccgatcgagccgaacggaggatcccctgccgccgatgcacacgatcaacgccggtgcccacgtgccgtttctgcactatgccacgggtgccaatgtggccggactgccagcgtcgggaatacccaatagccccaccacctacgagctggccatctcgcatccgctcttcatgatggcggcgcccattgccaacatgcacaacatatactacaataatgttaccctcgtcgctccggcgcagcaatatcggagccccgaggtgcagaatagaatagacaacgatatgcgtacgatatagataagtggcaacaagcagggtagtaacgaaacacacctatgtactatatagcattatttatgaacgatatatgtatatgtatatttatgtatgtatatccatccaaacgtagttccttttgtattaagattaattgtaataggaccaaaacatatggtatacattcataggcgtagaaaggcttgtaaatacaattttattagcttgtatcacatatccgtattagtaaattatttattttatttttatcgaacctagtgcatagatcgatccttttgtgaagaatataaacatttaaacaacttaaagaagtgtttagaaaaatcgagcggaaacagtgaaatgtagtgaacgtaagtaaagtttagttatctagcttttttttcaactttaagatcttcacccagctttataaatgaaatccagtctatatacatttttagccccaaaaagtatttcagttatggcttcgagtttgtttgacttattcaattataatcacattaaaacgattttatattttataaaagcggttcttaattgaattctagaatatcacaattttttttattaaatttcgaaaatcgtgtcttttcaaacaggcttaagcttctttggttaaatctgtagtttttcacaaaagccattgagattataaatattttggaaatattccaaatctttagaaagtttttagcaatgtccttattcaaaaaacggggttcttcttgttacaaaagtaagtgttatatatttttctgtcttttaaaaaggaagtaacatcatttaagatttggttatattttaatcgaaacataaaacgaaatttttctgagaaatgctttttatcccgcttgtcccttaacttttactaactttaaaacttttataactttttattaactttttttttaataatgtgtttggaacgatctaatttagcaagtgatccgtgatatcaagatttcctttttagcctctaagaaccagcagatcccct

SEQ ID NO: 32006 - DNA, 1119 bp, DROSOPHILA
atgccccggccctcgcgagaatcctacggcgaacagaagcccccctattcgtacatttcgctaacggccatggccatctggagttcgccggagaaaatgttgccgctcagcgatatctacaagtttatcacggaccgatttccgtactaccgcaagaacacccagcgctggcaaaattcgctgaggcacaatctcagcttcaacgattgcttcatcaaggtgccccgacggccggatagacccggcaagggagcctactgggcactgcatccgcaggcctttgatatgttcgaaaacggcagcctgctccggcggaggaagcgcttcaagctgcacaagaacgacaaggatctgctcaacgaggagctgactgccctggcgaacctcaatagattcttctttaccacccgtaacggaggcagtgcagcgcacatgtcgccgctggatatgaacaatgcggccgccatgagactggatccactgcccaggagcacggcgcacatgccaaactccctgggtccaggtgtgccactgccgcacgtaatgcccgcctccatgtccggtgcggatcacacgaatctggcggacatgggactgaccaatctgcccgcgctaaccagttccgagatcgagggaccgctgagcctgcgacccaagcgatccttcacgatagagagcctgatcacgcccgacaagccggaacatccgtcggaggacgaggacgacgaggatgaccgcgtcgatatcgatgtggtcgagtgcagcggtatcagccgctatcccacaacgcccgccgcctccgaggagtatatgtccgccagccgatcgagccgaacggaggatcccctgccgccgatgcacacgatcaacgccggtgcccacgtgccgtttctgcactatgccacgggtgccaatgtggccggactgccagcgtcgggaatacccaatagccccaccacctacgagctggccatctcgcatccgctcttcatgatggcggcgcccattgccaacatgcacaacatatactacaataatgttaccctcgtcgctccggcgcagcaatatcggagccccgaggtgcagaatagaatagacaacgatatgcgtacgatatag

SEQ ID NO: 32007 - protein, 372 aa, DROSOPHILA
MPRPSRESYGEQKPPYSYISLTAMAIWSSPEKMLPLSDIYKFITDRFPYYRKNTQRWQNSLRHNLSFNDCFIKVPRRPDRPGKGAYWALHPQAFDMFENGSLLRRRKRFKLHKNDKDLLNEELTALANLNRFFFTTRNGGSAAHMSPLDMNNAAAMRLDPLPRSTAHMPNSLGPGVPLPHVMPASMSGADHTNLADMGLTNLPALTSSEIEGPLSLRPKRSFTIESLITPDKPEHPSEDEDDEDDRVDIDVVECSGISRYPTTPAASEEYMSASRSSRTEDPLPPMHTINAGAHVPFLHYATGANVAGLPASGIPNSPTTYELAISHPLFMMAAPIANMHNIYYNNVTLVAPAQQYRSPEVQNRIDNDMRTI

SEQ ID NO: 32008 - DNA, 2825 bp, DROSOPHILA
cctatctagcaataataaaaaacaaacaaagtacaaatatgataaaaatatcttagcttacaatttttattaagttctatccttaaaaaatttaagtatgaatagtacatgttatctctacataaatataaaacggaaagcaccttaatttatttgtacggatatgttcaactaaagctggcaaacgtacaagataatgcaaatacgctggtgctcataatttatttttcaatttcatgcaaaagccaaaacaatttaaatcattttctgaagcgaagcaatacgatgggaagtgaaatacgagcgtttcctttattatttcatgttccgacccgcccacaattcatataaaataaacaggtattgacaaaagcttgcaaatcaagggctttccccttgcaattgtgcttttgcagcacatttgcacatatgtgaatgcgattgtgctgctatctcgacgaaaattgaaaatggcgatgggaaaaaaatggggccttattgccgttgttgccttgtcgccgggacaaaacgcttttccgccacgctgctcctggtgttaggctatattgtgtgtgggtaatcgcatacgcgatgattggtccaaactctccgggcaacccatttcgaaattcgccgtaaacaacaccttcgattcccattggcacgccgctcagacaaggacaaccagatccgagacctgttttggccaacattgccttctcgctcggcatagtgagtactggatactggattgtggatagttgacataccaccaccggttgggcatgggcatgtgtgcgagaggcagctctccaaatccggtcttgctctttgcgagcagccagttccataaaacatgaagttttgctgcccctcgcattagtcttaacgctgctgccgccgagaaaacatcgctctgaagttcaaaaaaaaaaaaaaaaaccccataaggaattatttggtgcggacggggaacgattgtgtgaatttttgaaacgacttcttcgcaatgccacgcccattgaaaatgagctacggtgatcagaagcctccctactcgtacatatcattaacggccatggccataatacactcgccgcaaagattgctgccgctcagtgagatatatcgatttataatggatcagtttccattctaccggaagaacacgcaaaagtggcaaaactcactgcggcacaatctcagcttcaacgattgcttcatcaaggtgccgaggaatgtgaccaaggccggcaagggctcctactggacacttcatcccatggccttcgatatgttcgagaatggcagcctgctgcggcggcgaaaacgtttccgcgtcaagcagctcgagaaggatatttcgaactggaaattagccgccgccgccaatacggagatggtgacccactatctggacgatcagctaacgcagatggcctttgccgatccggcgcggcatggtcatgtgctcgccaatgcatctgctgcccaaatgtcaccctacaaggctactccgccgatccttccgacgactgtgacccaacttccggcgcggccaaagcgcgccttcaccatcgagagtctcatggctccggatccggcgagcacgccaaatgagggattagtgcccatggagtacggcagtcccgatgccgtcgcgttggaaaagccgccgtttaatttgccattcaatttcaacgaactcgccgcgcagtatcagttatacttcccaagttttttctacaacggccaatatggcaacataccttgctaccagaaaacaccgccgctttttcataacggcccgttgcccgtcttttgattatgaaagttatagttaaactagagttaaaccaagctatgtctaaaacatactcactagtggtcctattattgtaatcttatgttatttacttgtgtactcatcttatttaaacgaagccgtattgtaaacagttgagtttagaagatctctaaagtcaataaagaactgcctataattgtattaaatgtttgtttaaactatacaactatgtaggtctgtgaagtctagctgtagcacccgatactttatttttttattttagtttaccattagaataatgtgtaaaacccataattattatctccgtcgtgaagtttaaactgtgtattatttgcaattcctattgccacagggaatatacttatgtacataactaacatccaatctatttggttccttagataattgcagctcgaaaacaaactacaggttgtaaatatataaatagacgccgattaattcgattacaggtcgaaaataggtccgcaatggttaacttgccttcctaccttgttttgcaaatcatttgcatctcacacatgcacacacacgtattcgaattgcttttgtttccattagctgtcaatcatccttacatatgtttgacttcaaccctagtcggaacacctcgccttcgctaccatccatatccatatccacatccacttccacatacattataaaacacccattggaaagaagggggagcggggtcgtcggtcgatacggcgcggaatgtagtttgttatgtcttacaagaaaggtggcacagacttggaagccgaattttgaaatactttactacataaattcaatgatctacagaaaatattttaacgaaaaaatggttgaaagttgcttttatctagggaaagtcctgtaaacttaagtgtttttgatctcaggttattattttgatcttccagatgaaactgtaatattcaaaacataagtctattggccaatattaatacaatacacattattacttaacatc

SEQ ID NO: 32009 - DNA, 825 bp, DROSOPHILA
ttcttcgcaatgccacgcccattgaaaatgagctacggtgatcagaagcctccctactcgtacatatcattaacggccatggccataatacactcgccgcaaagattgctgccgctcagtgagatatatcgatttataatggatcagtttccattctaccggaagaacacgcaaaagtggcaaaactcactgcggcacaatctcagcttcaacgattgcttcatcaaggtgccgaggaatgtgaccaaggccggcaagggctcctactggacacttcatcccatggccttcgatatgttcgagaatggcagcctgctgcggcggcgaaaacgtttccgcgtcaagcagctcgagaaggatatttcgaactggaaattagccgccgccgccaatacggagatggtgacccactatctggacgatcagctaacgcagatggcctttgccgatccggcgcggcatggtcatgtgctcgccaatgcatctgctgcccaaatgtcaccctacaaggctactccgccgatccttccgacgactgtgacccaacttccggcgcggccaaagcgcgccttcaccatcgagagtctcatggctccggatccggcgagcacgccaaatgagggattagtgcccatggagtacggcagtcccgatgccgtcgcgttggaaaagccgccgtttaatttgccattcaatttcaacgaactcgccgcgcagtatcagttatacttcccaagttttttctacaacggccaatatggcaacataccttgctaccagaaaacaccgccgctttttcataacggcccgttgcccgtcttttga

SEQ ID NO: 32010 - protein, 271 aa, DROSOPHILA
MPRPLKMSYGDQKPPYSYISLTAMAIIHSPQRLLPLSEIYRFIMDQFPFYRKNTQKWQNSLRHNLSFNDCFIKVPRNVTKAGKGSYWTLHPMAFDMFENGSLLRRRKRFRVKQLEKDISNWKLAAAANTEMVTHYLDDQLTQMAFADPARHGHVLANASAAQMSPYKATPPILPTTVTQLPARPKRAFTIESLMAPDPASTPNEGLVPMEYGSPDAVALEKPPFNLPFNFNELAAQYQLYFPSFFYNGQYGNIPCYQKTPPLFHNGPLPVF

SEQ ID NO: 32011 - DNA, 4848 bp, DROSOPHILA; identical to SEQ ID NO: 24688

SEQ ID NO: 32012 - DNA, 1675 bp, DROSOPHILA
tttgcctatctacattgccattttgtaaatatgatatagacgcgaattggcccgaacccgaagtctgaacccaaaaactccgttagtcctttgttgatggtaatcgtgcatttgaggcgagaaatcgaaatcgttagcattccgtagagacattcaaggcacggagcgagcatgttcagtatcagcgagctctgttgcatgttttgctgccccccgtgtccgggtcccattgcggccaagttggccttccagccgccggagcccacgtacaaattgaccccggcggacgacaccaacatccggtacaacctgcagttgttcgaccgcgccgagtggcagtactctgaacgtgagaaatcgaaagtggaggccttctttacgcgcacctcgcgtggcaacctgatcacctgcatctatgtcaggtgcagcaagaatgccaagtacacacttctcttctcccacgggaatgcagtggatttgggccaaatgagcagcttctacctgaccctgggctcccagatcaactgcaatatctttgggtacgactactccgggtacggaatgagtggcggcaagccgtccgagaagaatctgtatgcggacatcgaggctgcctggcaggcgatgagaaccagattcaacatcagcccggagacaatcatcttgtatggccaaagcattggcactgtgcccactgtggacctggcctcgcgtcacgaggtcggcgctgtgatactccattcgccgctgatgtccggcctaagggtcgtctttaggaacacaaagagaacctggttcttcgacgcctatttcagggtgctggacataatgatgtggaactgcatccgcattattacgagcgactgcgcaaatttctttcggtggaactcgtcaaatgacaattaaagaataatgtggacggaggcgttagcgacactacatcgggcgtaatatctaattcaaaccctgccgccggtagtgcgtccctaagttcaaagcacccgaatcctgcccctgcggcaggaagcgaaacaagtaaaaagaatgtggacacaaatgtcaaacggattgaaaacgatggtgcctcaaattccagccagagttctactaaagctctcgagcagaagtttctttagcaaaaacagtcgggctcatattcaaaagcccaacccttctcaccacagttcccaagcagggaactatcaagtaaatcgtgcggaaacagacatagtaaacaaaataggaaagatgacccaccattaaccgatatgaagtcgaacggcttctttgtttctcgtttaaaacaaccaaatattgctccaacacttccagtactttctccacattcaccaatgaatgctaatatacatataaatagccagcatacccaactttccggtcgatatctaaataacaaagtgtcccaacaaatcgacactgaaagtataaaaagagtggcatctaaccgatctctaaaggacagtcaaaacgtcttatccatttcatcaactctaatatgcaactgcgagaaggcccaaaaatcgaatggctcagaagcggaagcaaacgaagaaatcaaaattaaactgagctcagatactggtaacaaatctaccattagtaaattaaaagacccgaaactctcttcagcgtcggaaaaaaacgcattagataa

SEQ ID NO: 32013 - protein, 244 aa, DROSOPHILA
MFSISELCCMFCCPPCPGPIAAKLAFQPPEPTYKLTPADDTNIRYNLQLFDRAEWQYSEREKSKVEAFFTRTSRGNLITCIYVRCSKNAKYTLLFSHGNAVDLGQMSSFYLTLGSQINCNIFGYDYSGYGMSGGKPSEKNLYADIEAAWQAMRTRFNISPETIILYGQSIGTVPTVDLASRHEVGAVILHSPLMSGLRVVFRNTKRTWFFDAYFRVLDIMMWNCIRIITSDCANFFRWNSSNDN

SEQ ID NO: 32014 - DNA, 3213 bp, DROSOPHILA
gttcgctcttcttgcaggtgcctcaaattccagccagagttctactaaagctctcgagcagaagtttctttagcaaaaacagtcgggctcatattcaaaagcccaacccttctcaccacagttcccaagcagggaactatcaagtaaatcgtgcggaaacagacatagtaaacaaaataggaaagatgacccaccattaaccgatatgaagtcgaacggcttctttgtttctcgtttaaaacaaccaaatattgctccaacacttccagtactttctccacattcaccaatgaatgctaatatacatataaatagccagcatacccaactttccggtcgatatctaaataacaaagtgtcccaacaaatcgacactgaaagtataaaaagagtggcatctaaccgatctctaaaggacagtcaaaacgtcttatccatttcatcaactctaatatgcaactgcgagaaggcccaaaaatcgaatggctcagaagcggaagcaaacgaagaaatcaaaattaaactgagctcagatactggtaacaaatctaccattagtaaattaaaagacccgaaactctcttcagcgtcggaaaaaaacgcattagataattcaaccgagggttgtttgcaattgaaaagtgtaattggaaaggagcaaaaatcgctgtctccgagactgacgttacacaagagtgggtttcaacaggccatcataatttccgacgacagtgagaacacgaagtcttcgcgattaggtacccaaacagcaaggcagctctccagtaattcagacaatcaattttatcgacagcttacccataagattagcaaatcggagcaaacttccccaaacaacttggagctagacaaagctaactttctctacgatacgaacaataggagtacgggctgtttggtgtatccttcggatccatggataaagaactcgcatattaagaacagcttgtcccccaaaacggaaaagtattcaaacaccatgcatcacaatatcgatccgtgggtcaagagacaaacagatgctgctgtggaaatctcacggcttcccaagaaaaatttctaccgcgaaaaatccctttcttccataaacaataaactaatttcgaccagaactgagaaatcaaagtgtgcaaagccgcagttgaagcattcgaaaacggagctggacgatgatcaagtatttttaaatgagccaggattgctttttgctccattctctccgcaatatcgcaacacgtcgcataaaatctggtctctcgaccagccttctaacgatctgaaagccaacattcaaagcaagtcagctagttttttaccggacaaggtgaaggagatatccagtccattgccgaaccatgttagaaaatctgtacaacaaaacaatagtaatttgctgtgtccgaatgttcaagcaagattattgcttcaagtagaaaagctgcattctagacacagctccctatcgattcccactcaatcgaaggatgaactacccctgaacatccgtcgactgtccgagcagatccgtgaaccgcctttggagaaaaacatctcattatccctcagcgatcgtaacgttagcaaaattccgacatctgatggcgtgggcgaggctcacctggttgcccctcacaagatggacaaatttcatgtgagtagggatgccgcagtgcagagtacaagccaccttgaagactttatatccctacaacgaggccccaaagattccacaattgttaataatgtaaacccctttacgagtacttataagcctgatccacttttagaaaccacctgttaaaaccatttgctaggaagccgaaaaccgaaagccgatattaaagtgtctctgcatagctcattcataggtcatgaaaatatacaaaatataaaaccacaaaaaacatacatacatatatgtcttatatatcaatcgaatctaaatatgaataataaacaagtaataaataataattttagtagtaccttaagtttgaaatttttacagtgattttgcatttatattaagtaacactataatgccctgccaacaatatggggctaagttttaggcttaactacattcgcaaagcatatatatgtgtgtaatagtgtattttctcctcattttattgtcattttacatatttgttgtaatacattttatagtaataaaatctttataaagagctaagtaacgcatctagttgttattcattggccgcctgttgtgtggggggtttgaaaagttcccaaatgtacaatggtttttaaactcttaaagttgagaaaatattacgctttcactgctttttgtttatattcatactctttcagagaaacttttatacaattggttggttttatgaacgtattaatttgacaacccacgcaaatcaagcctctattaattgcattcgatttgactttcaccgaaaaacaagcaaattaagctcgctttggataaggcccatagttgggattcgttgacataatccgagcaattcagagtgtatttatgtaatctggaatccatataaagtccgaatgcaaagcggattaaagacagttgttgatagtctcttgtgaaaacatttgttcacttcatacaaaaaaaaaaaatgctttggataagagtgcttgtggcgtatagtataattttatttggaagtttccacggagagtgtgctgccgttcataaagataataatacatataattcaacaaaaaactctcttattgaagctcagtcgattgggagaatcgtaaaccgcgtaaatcagaaagaaattaatcagaacatcctgccaccgccaagttatttaggtgaaacaactcgcacatcgagtactgatccagaaaatccctgtccccatgatatttctcaattaaatgctgctccagaagccaagatcaatgaaaacccatcagctacgcatataaagtacggatcacaagtaaacactcaatccacttactcatcagattttcaattgcaaatacaaaacccacgaccagttcagcacatacattaccactacattgtgcccaattccactccaaaaccgatcataaattatgtgactcaatctcaatctgatttcaacgcccacaatgttgttaattcagtaggtcaaccatactccccaatcgaccctcggccatcgcatatcgcatatgaaagcaatcagc

SEQ ID NO: 32015 - DNA, 1213 bp, DROSOPHILA
atgcatcacaatatcgatccgtgggtcaagagacaaacagatgctgctgtggaaatctcacggcttcccaagaaaaatttctaccgcgaaaaatccctttcttccataaacaataaactaatttcgaccagaactgagaaatcaaagtgtgcaaagccgcagttgaagcattcgaaaacggagctggacgatgatcaagtatttttaaatgagccaggattgctttttgctccattctctccgcaatatcgcaacacgtcgcataaaatctggtctctcgaccagccttctaacgatctgaaagccaacattcaaagcaagtcagctagttttttaccggacaaggtgaaggagatatccagtccattgccgaaccatgttagaaaatctgtacaacaaaacaatagtaatttgctgtgtccgaatgttcaagcaagattattgcttcaagtagaaaagctgcattctagacacagctccctatcgattcccactcaatcgaaggatgaactacccctgaacatccgtcgactgtccgagcagatccgtgaaccgcctttggagaaaaacatctcattatccctcagcgatcgtaacgttagcaaaattccgacatctgatggcgtgggcgaggctcacctggttgcccctcacaagatggacaaatttcatgtgagtagggatgccgcagtgcagagtacaagccaccttgaagactttatatccctacaacgaggccccaaagattccacaattgttaataatgtaaacccctttacgagtacttataagcctgatccacttttagaaaccacctgttaaaaccatttgctaggaagccgaaaaccgaaagccgatattaaagtgtctctgcatagctcattcataggtcatgaaaatatacaaaatataaaaccacaaaaaacatacatacatatatgtcttatatatcaatcgaatctaaatatgaataataaacaagtaataaataataattttagtagtaccttaagtttgaaatttttacagtgattttgcatttatattaagtaacactataatgccctgccaacaatatggggctaagttttaggcttaactacattcgcaaagcatatatatgtgtgtaatagtgtattttctcctcattttattgtcattttacatatttgttgtaatacattttatagtaataaaatctttataaagagct

SEQ ID NO: 32016 - protein, 273 aa, DROSOPHILA
MHHNIDPWVKRQTDAAVEISRLPKKNFYREKSLSSINNKLISTRTEKSKCAKPQLKHSKTELDDDQVFLNEPGLLFAPFSPQYRNTSHKIWSLDQPSNDLKANIQSKSASFLPDKVKEISSPLPNHVRKSVQQNNSNLLCPNVQARLLLQVEKLHSRHSSLSIPTQSKDELPLNIRRLSEQIREPPLEKNISLSLSDRNVSKIPTSDGVGEAHLVAPHKMDKFHVSRDAAVQSTSHLEDFISLQRGPKDSTIVNNVNPFTSTYKPDPLLETTC

SEQ ID NO: 32017 - DNA, 2431 bp, DROSOPHILA
gtgcccgctgtccaatccgctggccaagcttgccggtggcggagaaggtgtatccgtgattaagaaagagccagccgatgagaagcagccacagccacatgaccacggtgcgtccgtacacaagatggcactgctggtgccgtttcgagaccgatttgaggaactcctccagttcgtcccccacatgaccgcctttttgaagcggcagggcgtggcgcaccacatctttgtgctgaaccaggtggacaggttccgcttcaatcgcgcctctctcatcaacgtgggtttccagtttgccagcgatgtgtacgattacattgccatgcacgacgtagacttgctgcccttgaatgacaatctgctctatgagtatcccagcagcttgggaccactgcacatcgccggaccgaagctacatcccaaataccactatgataacttcgttggaggaatattactggtgcgacgcgagcactttaagcagatgaacggcatgtcgaaccagtactggggctggggattagaggacgacgagttcttcgtgcgcatccgggatgcaggactgcaggtgacgcggccgcagaacattaagactggcactaatgatacattcaggtgagaccagtgctccggatttcgcaactagacgtgactactaataattattgtcattcaacctcagccatattcacaaccgctatcatcgtaagcgggacacccagaagtgcttcaaccagaaggagatgacccgcaagcgggaccacaagacgggcctggacaacgtgaagtacaaaatacttaaggtgcatgagatgctcattgaccaggtgccggtgaccatcctcaacattttgctcgattgtgatgttaataaaacgccttggtgcgactgctccggaacggcagcggctgcatcggcggtacaaacctgatgggttgtgttaaaccaaagatcctatgtttatttcgctattatagtgtgttgtattgtataaatgcgctaatacacgtgcaccatgccatagaggaatgtccagaagagcacgtaggtgcaaaggccgcccatgaactgattggtcagcagatttctgcggttaatgaaaaacttgcgccactgggtgcccgatttcacgagcaccagaatccagagcacgaacacggacaggaagtagaaaaggaatcccagcgtaccactcaggcccaaaatacctgcgaattggtgggacattaactaagttggttcaccatcaattggagccaattacccgcagcgcagcccgagatggcagccatcgatgtgcgacagtattccacggcggatatgttgttccggatggcgccctcgctgtaggcgattatttcgccagtcttggactgcgtggtcttcactcgattcattttatttaattaaattctactttaatttctagcaaaaatattcctaggctgtgaacttcgattgtgtgccgattgtgttatcgattggtgccgataactatgcactgtaaaaattcactagcggtttttgcaggataaatagtttttgtaaattttccgagataaacttgacgagctgtttaatgttaaataatgaagtttaatacaatatcaaatatatttgctgaagtgtatatttattctcaccgctctgtgcttcgatggctcacaattgcgtttgccattcgcccgggcacgtagattgttgttattgggattggcctggagcactcggacggacagtaattcattaaaatatgtggtgataacgcgagctgccgaatctgcgtgcaattcgtgcgtttgacgtgggtactaactgctatgctgtcgcgcggacagttgttctgatacgcagagttcctgcctcaccacacacgaccacctccattaaaaccagccaccccccccagcgcctcctccaccgacagcagctgctccaccgcaccaccaggagaggggcaattaaaaaatcaatcagagggccctaattgaaagctgccaccgtcgaaatgtcgccgccgaagaactgcgcggtgtgcggggacaaggctctgggctacaacttcaatgcggtcacctgcgagagctgcaaggcgttcttccgacggaacgcgctggccaagaagcagttcacctgccccttcaaccaaaactgcgacatcactgtggtcactcgacgcttctgccagaaatgccgcctgcgcaagtgcctggatatcgggatgaagagtgaaaacattatgtccgaggaggacaagctgatcaagcggcgcaagatcgagaccaaccgggccaagcgacgcctcatggagaacggcacggatgcgtgcgacgccgatggcggcgaggaaagggatcacaaagcgccggcggatagcagcagcagcaaccttgaccactactcggggtcacaggactcgcagagctgcgg

SEQ ID NO: 32018 - DNA, 375 bp, DROSOPHILA
gctagaaattaaagtagaatttaattaaataaaatgaatcgagtgaagaccacgcagtccaagactggcgaaataatcgcctacagcgagggcgccatccggaacaacatatccgccgtggaatactgtcgcacatcgatggctgccatctcgggctgcgctgcgggtattttgggcctgagtggtacgctgggattccttttctacttcctgtccgtgttcgtgctctggattctggtgctcgtgaaatcgggcacccagtggcgcaagtttttcattaaccgcagaaatctgctgaccaatcagttcatgggcggcctttgcacctacgtgctcttctggacattcctctatggcatggtgcacgtgtattag

SEQ ID NO: 32019 - protein, 113 aa, DROSOPHILA
MNRVKTTQSKTGEIIAYSEGAIRNNISAVEYCRTSMAAISGCAAGILGLSGTLGFLFYFLSVFVLWILVLVKSGTQWRKFFINRRNLLTNQFMGGLCTYVLFWTFLYGMVHVY

SEQ ID NO: 32020 - DNA, 4502 bp, DROSOPHILA
agaattgaagccgcaactaaaaacaatatacgtttactaacttaagatgtaacgacaattgcaagcacaagtgttttccccactatgtacgtatgcacctcatcggttggcgtatacatatgtgtatgtaaatggcaggaaacattagtgataggaaaagcaagataaactaagtaatcataataccattctgattgacaattttaagtattcagcgtattcgtgcgtattgttaggctcaataaaaaaacgaacattgcaaagacagacgaggtttaaaatgaattggaacaaaagtcacggggttcatgaaatacatacatatcgagaaagaacataacataaatgttcaaatatctgctggtagtaccgatacgaatctatgtatttgcttctttttcaaataagttaaaggaacctactatcctacctatacctacatgttcattaattacgattaaagaaatagtttaattaccaaactgctgaaataattattgtgttggtagtttctgtgtgaaggatgaaatggaaagcaatttaacgagacacatgggcacattatctcggtctgcttcaatcgatgaaccaaggagcttttccatatcgagcaacatacaactgaaaccacaagccatgccaacattcaaacttagtggaacgaagaactggctgctatcatgcgaaaagaatttagccactaaaatggtgctgcgataagattgaggtaagcaaagtggatatgccacgttgtgcggactgagagaagcgatggcaaccacaaaatgtgctatcttaggaaaacataccccgaaatccgcagtaagaactccgttttaatggttcacttatcatatgtattcgaaattaactagacaattaaataaaatgcttactttattccaatctaaacgtacgtacacacaaacgcgtctatatatatacatagtcaagtactcgtatatatagctccaccgaccagagacgaggttagcagttattaatctgcatgggttccttcccgagtagtgctacccgtttccgagttgcctgtgccagtctcttttcggtctctattgctgggcccagcaccactggcatcgtggctttcgctgctgtttggtgtggacactgcggtctttgttgacttgggggattgggattcctgggtctgtggaccagtttcagcttgggtgctcgtcgactcgctgcggcgggtcgcttgatcctcctcattccgattggggaactcgtgaaccgagcttgaatttatctggaaaagccgaacgaattgggtgagatgatgcctcttcaatagattgaactgtacaactcaccacgtcctcttccgattccacgctggatatcgagggatttctctggataatcaatgatataggtattgggtacaattatcttgtatggaacaatactacaactacttacttgtgctttgtatttgattaacttaaacttgcgctcctcccgcatccgcgtcagacgcatcaggagcgagtaatgctgctccacgcgatgcagacatgatttgcatatggtttttggcaatggatcagtcggagatatctggtgcaattgagcagtaggtgataaatcaataaattatttaacaagatgctgatagttgggaaaaactattggaatggctgacattgggtacacacaaacatccttgacgatgggaacgtgatttgtgtgtagctccgccttttcagcagcgtccattagttggcaatactcactgtaattggtaggtaaccgttgattttctcaacaagacacaaacgctggccatgatcactataaatatgtattactgtgcggtgcatctctgaacacagtcggcatagaaatcccgatatgcacgccttttctatgctccccatcttgattgattccgattctgttggttggctatatcctcagctgctggttgggatgtcgtttaatttaacgctagccaaaacaactttcccaaaatattgtttaatacttttcagataggtgttgtgtacatatgtttcgattcgagggttgtatttccgattgcctcggcaggttgccagcttgtttttttcggcatttctatagaaaagtcgatagttgacaacaattgtacaaatgcacagtttcatttgaaataaccgcgaatgcccacataaaacatatgattttagcacattgaatcatgcggaagtgggacaaagagtttttagaataatatgttatctatttaactggaaattgttaaccaatctgtcccaaacactcgtaataatttaatattttaaactgtattataacgtattatacagctggaaagtatattttgaaacggacgagatggaattgaaacagatcagctgtttcgggtttttagtgttttcgtatcatgtaccaggtacatacttaggtacataactaagtacttctcgcaacgattgtatcagagaaataaaattcgtctttatattataaacttattattcttatatcgagaatcaaatagtaaaaacagatcttatcaagatagaaatccctggagcgtctcaaaggataaagacgcgctgtttaaggactgcacattctgcaccgcgaatcccttgaaattcgtgcactgatgaaaggcaggatccatcataagcagcgattgtgttttttggtttgacaagccaaagaaaacctcgccctgtacgtcgaacggtattttaattttaacgcagggagaccgctgaatggagtttagaagctccatgtgacacatattggcgctttctccgaagaaaactccatccagatcattgtcgggtattatttggaactgaggaatcccggcgttatttaaaatcttacatgtgaacacacacttcttgcgcggatccttgggatgggcgtagattcgtgtggccacatatcccacgggatatatccagctctcagtgtgaaaattgggattcactgatataatctcgcccagtgagtggagtaatacattatttaggttcatcggaaacatgggcttctttttccgtacaattgtaacattttttggcttatcttcgacggggttcttatgcgaaactacaggactgtatttctttgtggtttcagcggcgtcgttttttccattcgagacactgggtcgtccactgttggatttctccaagccctcgtgaaacatgaggcgctctatcaagtaaagtctttgggatcgggtcacagatagttcggcctgcagacgacagatctcatccgtgagggcggcgttctcctgaaattggtattataaagttaatagatcatataacttcccgtaaatgttttatgctataatgtaaacatatatgtgagtaggaatcttaaggtttcttgtaaatactcttaagtttgcataacttcgccctagtttctaagatcttaccagtagataactcttgacggagcgttttaagctctcgtagcgccgcttatactttaaattcattgctttttaatttataatttcagcaaaaacaagagatacgatttgtttgttgttattgccgtgggtttgttatgattatcggactgcagggctgccattcgtaagttatcgaaatacggtattcggtagattcatttatgttggtatatcttacataccaaattaataaacaaaactgatctaatctaatctttgtttattttaaaagatataaataaagttttaaagggtgcgaaaaaaacaaacggagacgttaattcgaattgaaattaaggaaattcctaatggatttgcaaatcctcttagcctaattcaatctggcattctgaccttgcaaaggacttaatcatgttaaaaagttacttccggcgctcggaattaaggatatttgaaaaaataaggtatgtttttaaagtagttaaatagttgcgcacataatttagcttggcatctgaaaatgtgccttaaagtgcgtagtttgaccatggaagcaccagtctgcaaaggtagttacaagaataccaacacctagcccttcaagagtatatgtacataaacaggtgtgcgtgaggcttaccaccattagaaccattgatgattggtaacttcttaatggattttcattcaacaatttcaagagttacaaactataagtttttaaaatcattagcatgagagctagaaaaaacgtccgatcaccatggcaacaggtgtctgtctgtatgtatcatcccgttccttcccatttccccactttcgcccaatgttagatactacaaacatccatagctcattataatgtgtttgcgatagtgtagggaagagcgtgtgaataccactgagaaaaatctacgtcggagagcagctttggcaatgaatcacatcgtttgttcgtttcggtttcggtgcaaataagccgttagtatgtttctacactccggtgacacttgttggattccgatttcgattcagtgcctctgaagctaaaaacgcaacatca

SEQ ID NO: 32021 - DNA, 1203 bp, DROSOPHILA
atgaatttaaagtataagcggcgctacgagagcttaaaacgctccgtcaagagttatctactggagaacgccgccctcacggatgagatctgtcgtctgcaggccgaactatctgtgacccgatcccaaagactttacttgatagagcgcctcatgtttcacgagggcttggagaaatccaacagtggacgacccagtgtctcgaatggaaaaaacgacgccgctgaaaccacaaagaaatacagtcctgtagtttcgcataagaaccccgtcgaagataagccaaaaaatgttacaattgtacggaaaaagaagcccatgtttccgatgaacctaaataatgtattactccactcactgggcgagattatatcagtgaatcccaattttcacactgagagctggatatatcccgtgggatatgtggccacacgaatctacgcccatcccaaggatccgcgcaagaagtgtgtgttcacatgtaagattttaaataacgccgggattcctcagttccaaataatacccgacaatgatctggatggagttttcttcggagaaagcgccaatatgtgtcacatggagcttctaaactccattcagcggtctccctgcgttaaaattaaaataccgttcgacgtacagggcgaggttttctttggcttgtcaaaccaaaaaacacaatcgctgcttatgatggatcctgcctttcatcagtgcacgaatttcaagggattcgcggtgcagaatatatctccgactgatccattgccaaaaaccatatgcaaatcatgtctgcatcgcgtggagcagcattactcgctcctgatgcgtctgacgcggatgcgggaggagcgcaagtttaagttaatcaaatacaaagcacaaagaaatccctcgatatccagcgtggaatcggaagaggacgtgataaattcaagctcggttcacgagttccccaatcggaatgaggaggatcaagcgacccgccgcagcgagtcgacgagcacccaagctgaaactggtccacagacccaggaatcccaatcccccaagtcaacaaagaccgcagtgtccacaccaaacagcagcgaaagccacgatgccagtggtgctgggcccagcaatagagaccgaaaagagactggcacaggcaactcggaaacgggtagcactactcgggaaggaacccatgcagattaa

SEQ ID NO: 32022 - protein, 400 aa, DROSOPHILA
MNLKYKRRYESLKRSVKSYLLENAALTDEICRLQAELSVTRSQRLYLIERLMFHEGLEKSNSGRPSVSNGKNDAAETTKKYSPVVSHKNPVEDKPKNVTIVRKKKPMFPMNLNNVLLHSLGEIISVNPNFHTESWIYPVGYVATRIYAHPKDPRKKCVFTCKILNNAGIPQFQIIPDNDLDGVFFGESANMCHMELLNSIQRSPCVKIKIPFDVQGEVFFGLSNQKTQSLLMMDPAFHQCTNFKGFAVQNISPTDPLPKTICKSCLHRVEQHYSLLMRLTRMREERKFKLIKYKAQRNPSISSVESEEDVINSSSVHEFPNRNEEDQATRRSESTSTQAETGPQTQESQSPKSTKTAVSTPNSSESHDASGAGPSNRDRKETGTGNSETGSTTREGTHAD

SEQ ID NO: 32023 - DNA, 4801 bp, DROSOPHILA
tgaacaagtcccagactagaaaggtccttttgttggtgatcattgatccttttatccctacgccgaggtagtgtgtttttcttttgcctttgcgcaccgaaaatgtttgaaacaattgattttccggcttgcaagaatggaaattgatttcttttcactaaaaaaaaatcatatataaattaaaaacgccaccaatcgtactaattaatcactcacatctggttgcatttctcatctcacgtctctttatatttgtttcttcattagtcgcgcaggatgctgaaccaccatgttccgcattattattgacttcatatgggggtttcacggaaattggctcattattaattgactgaagttatagaagaccacttattattattataaaaaataatagtttcaaaatctactaacttttagaaaccgaagagggtacatcacaacaggctcgcccctgctaaccacaatcagatagggagatattatctttaaagtgcttcctttcgagggatcatagaccttatcgaccacccaaaacttttccgtgttttccatatcgaagcttgggttcatatgaatgttgacaatcagttgcgtctcgcaggatttgttcgaatggttctcggggcatttgatgagaattgcattcatactgtcgggcatttcacttttggctaaatgtaacaatagatttattagaaatccatatagtaatgcagcagtaatttgccttttcattttaataaaattgtttgttaaatttattattttgaaaataggttagcgactaccttgatcacgttctcaaataaagttgtataccaagtcaaatattctaaatataaaccaacaatttattaacagtatatttatttaaaatatacattttacatttaaaatagaaaacaatactagtaggtaagtcactagagctactaattttaaactcaattgggatcgtagacaaagtagatagtccaagttgacgtcgaaataatatttaaagcacattgcaggtcttctgtacattgatcatggatcccgatggacatttgaaaacttcagtcgcactcccgccctgggcaacgagccaacccaatctggaaacggagttaataacattagaatactagtcatttttataatatttacactcacatattatcgaattcgggagcgtttgtatcgatgcccaagtagttcgattcagcacacagttcctgggcggaaactaaaaagaagatttgcgtcggcgttagattcagaccaggtagtctggccattcccttgatgggaccggttagggaaagcattgagtggtatgatatctgcattcctcccgaatgaatcagtatatccatgcggctgtagttcgagaatatatttacagaatgcggcacacaacgcattgccttttcgtcgaacgattttgtgatggaacgcaaaatctctttggcaatggaaacaccaacagaagcatagtgcagatatggcggcaatacagcattaaagtatggtatgagtatgacggataatgggacaactgcaaatatgtacggaaatattatagtttactctggcttatagattttttttacatatataccgaccgattgaatggctcagcgtatcataaaaaatggtcgacactatgggatatgcccaactgcaacaaaagttgtgtataattacaaaataagatgacattctatcgaagtaacaacttacgcatcatgggagccgccgttcaaactgatatcattcggctccagtttgttctttttgtatatctccaaaatgttttgaaaccagcattcggacgtaatattcagaggttggagactcttcaacaagtccgttgtgtttgagaatccctcccaggtctgcgattggatcttcaaagccgatagtttcactagggcagctccttttaaagacggcgctctcttcaagtgcgcttttaatgacttaaatatgatctcagcctgtaaaagaaatatataaagcatatgttttcaatttgacacggttgataattactcgttttgtggtgtcctttaggtcttcagatgaatgttgagcaatatatagggaagatgataattcgggcaatgcccacatggtggatcgggtgcaaacttcggggctcggataatcacgtggcaatatttgtaaagcacttaacaataatagcgaattgtgtgcaactctagttgggtacttggtgagaaagtattctaaggctttcagataatcactattcctaacaacgatgggtccgctccagttctgcggtataagcaatgtccaatttaactgaaaatgtatataatatatattataaataattagaaattcggtatgtttacttacaactgggtacaagtcttgtagactggatacattatataaaacagtgctgtcccagaatcctcgacgagagtgttcaacttgcagctgtaagaaaagtttacatgctcaaattctattagctctttagtattcgcacttcgagttcaccttgtttaggtcctttataaattcaaaaatagtatccttctcggaaactctttgagcatatgacacgaagtaaggtaggaaattctcgattaaatcggctaacaacttcggtaccccttgtcgaatacgactaggcggggcttttggactcatccaacgtatttttcgctaagtacatttgcaaattagtatctgttccattaacttagaccgacctacctcgaggatagttgacgaagtgctgggtccactaataataagtagaatgtgcggtcgccttccgtagctaaggtcgtgatataggtctaccaacggactggggccgagatcatagatcttggctattaagggtgctatactcgatggtcccaccgaaccaacaggcagataaccgcctagggaatcaaatatcctgtgcatgacagttgagttagttgtctgctgcaagcagctttcaaacaaattgtgcaatataccaaagctgccgttcataatcttgttctggaatagatctgcaagatatagcatatttatttaatatatgtacctcgcaaatcggatggatgcagcttacacagcatttgtgaatcgacgcttttctgtgagtttcccatttcaatgaggttcgttatatttttattgggcgtgttgcgccaacagctgaacttcttgaactccgtgcacggatccttgttccaattgagtctggcctggatgctggaggccaccgcctcgcaaatgggatccgagcattccggcggtgctgaaacggccggcgagcaccgatccccgtccatgtagcaatctcttggcagaggtgagggtgccgtgcttatcaaaaataatatgggcgatgctaccagcaatgtggtcaccaacagggtggctgatgtgatggccattttgtgcactgccgccgaggtgcgcagccaaatgcacggggcacagcatatccatcctataatgctgttctgcaagtcatattaaaatcgaattacagaatgcaaatatgaatcatacgcactgtgaccccctcaccttattatatcgagtattgaagttttcgatgttagcactgtcgatcatttcgatctcatcggatttgcccatctgcttggagccaacgggcgttttgaaggacaactgcttttgtagcagcgaggcgctacttcctccggatggattggcggtcgtaataagattccggccatgaccgttgttgcccaagccggcaacgccgttctttcgaaaaacattacgtgcactggaatcagctgtcattgtttggttttgactctgaaaatgttattacgttctgctgattccgttgatgggcataagttttcacgcatttacataaatttgtactgcggttggtcggggacttgtgataagcactgccaaagggttcgaaagatatattcatttattgacggggtactaatcaatatcaattgcttgctcaccgcacatttgcctccagagatctatatacaggacttatgagctatacactcgatcaaataattgacgcacctacatatgcagcttaaaaatcaagtgtatatatctttatccgattaaattaacttaacaatataatcacttttctgccgaaaaaggaaatgaccactggcaactctcggttgtgctcgggaaagctctagccaaagctttcgaagcatctggggttcctgtgaaagcttttccatatttgtacatatgtccattttgcattattgagcactttttggtggggaaagaagtacccccactaatgcgctagcgttccttactaagctatgcaaaaataaagtactccaaagcattttcgttcgccatagcccattcccaacactctttccatcgccacctgttgtcaggatgcggtactaaacatagaaaaattatctagtctattcgaaaaaatcatcacaaaaaatttaaattttatatataaacagcaaaaatccagttacatagttttgtgcatttcacgtttattttcgaagtatcgatttcatatatctttggcgtagaatgtatattaagtttttaaagctatgagttgtgtaggcagaaaaatttgaccattttttttttgtaatatataaaagctatttcatttttaataaagcgtttcaaaaattacattcaagtaatcgttgtttatcgataaatatttatttgtgtaagcctctgccttgatgcgaaaatttgaatacaaaaataattagacttactacaataggatgactggacaaaagcttgacaaattagc

SEQ ID NO: 32024 - DNA, 1731 bp, DROSOPHILA
atgacagctgattccagtgcacgtaatgtttttcgaaagaacggcgttgccggcttgggcaacaacggtcatggccggaatcttattacgaccgccaatccatccggaggaagtagcgcctcgctgctacaaaagcagttgtccttcaaaacgcccgttggctccaagcagatgggcaaatccgatgagatcgaaatgatcgacagtgctaacatcgaaaacttcaatactcgatataataagaacagcattataggatggatatgctgtgccccgtgcatttggctgcgcacctcggcggcagtgcacaaaatggccatcacatcagccaccctgttggtgaccacattgctggtagcatcgcccatattatttttgataagcacggcaccctcacctctgccaagagattgctacatggacggggatcggtgctcgccggccgtttcagcaccgccggaatgctcggatcccatttgcgaggcggtggcctccagcatccaggccagactcaattggaacaaggatccgtgcacggagttcaagaagttcagctgttggcgcaacacgcccaataaaaatataacgaacctcattgaaatgggaaactcacagaaaagcgtcgattcacaaatgctgtatctattccagaacaagattatgaacggcagctttggtatattgcacaatttgtttgaaagctgcttgcagcagacaactaactcaactgtcatgcacaggatatttgattccctaggcggttatctgcctgttggttcggtgggaccatcgagtatagcacccttaatagccaagatctatgatctcggccccagtccgttggtagacctatatcacgaccttagctacggaaggcgaccgcacattctacttattattagtggacccagcacttcgtcaactatcctcgaggctgagatcatatttaagtcattaaaagcgcacttgaagagagcgccgtctttaaaaggagctgccctagtgaaactatcggctttgaagatccaatcgcagacctgggagggattctcaaacacaacggacttgttgaagagtctccaacctctgaatattacgtccgaatgctggtttcaaaacattttggagatatacaaaaagaacaaactggagccgaatgatatcagtttgaacggcggctcccatgatgcttgggcatatcccatagtgtcgaccattttttatgatacgctgagccattcaatcgttgtcccattatccgtcatactcataccatactttaatgctgtattgccgccatatctgcactatgcttctgttggtgtttccattgccaaagagattttgcgttccatcacaaaatcgttcgacgaaaaggcaatgcgttgtgtgccgcattctgtaaatatattctcgaactacagccgcatggatatactgattcattcgggaggaatgcagatatcataccactcaatgctttccctaaccggtcccatcaagggaatggccagactacctggtctgaatctaacgccgacgcaaatcttctttttagtttccgcccaggaactgtgtgctgaatcgaactacttgggcatcgatacaaacgctcccgaattcgataatatattgggttggctcgttgcccagggcgggagtgcgactgaagttttcaaatgtccatcgggatccatgatcaatgtacagaagacctgcaatgtgctttaa

SEQ ID NO: 32025 - protein, 576 aa, DROSOPHILA
MTADSSARNVFRKNGVAGLGNNGHGRNLITTANPSGGSSASLLQKQLSFKTPVGSKQMGKSDEIEMIDSANIENFNTRYNKNSIIGWICCAPCIWLRTSAAVHKMAITSATLLVTTLLVASPILFLISTAPSPLPRDCYMDGDRCSPAVSAPPECSDPICEAVASSIQARLNWNKDPCTEFKKFSCWRNTPNKNITNLIEMGNSQKSVDSQMLYLFQNKIMNGSFGILHNLFESCLQQTTNSTVMHRIFDSLGGYLPVGSVGPSSIAPLIAKIYDLGPSPLVDLYHDLSYGRRPHILLIISGPSTSSTILEAEIIFKSLKAHLKRAPSLKGAALVKLSALKIQSQTWEGFSNTTDLLKSLQPLNITSECWFQNILEIYKKNKLEPNDISLNGGSHDAWAYPIVSTIFYDTLSHSIVVPLSVILIPYFNAVLPPYLHYASVGVSIAKEILRSITKSFDEKAMRCVPHSVNIFSNYSRMDILIHSGGMQISYHSMLSLTGPIKGMARLPGLNLTPTQIFFLVSAQELCAESNYLGIDTNAPEFDNILGWLVAQGGSATEVFKCPSGSMINVQKTCNVL

SEQ ID NO: 32026 - DNA, 3959 bp, DROSOPHILA
agcaggcgaagatattgatttttttgtttatgcatgtcccgcgttcacatgaggaaatggggaaaccaactgaaacacacacacttagacttagccttatgaataacttatgaatattatcgaaatggatatgtgtggattgtatcttatttgaggactcaccggcgaaacgcaaacgcggccctctaaccacttgcaaatacttgggggcccgttggacgtaaatgtggatgggggctattgggtgctcgatatccctctcctcttcgtcgcttccaatattccaattcgatgacagtcgctgcttcgctcgtctgctctctcgcggttcggtacgcaatggccacaattcacgatggactcgctttcaattacaaggataatttgcctttacttaaatttattacttgcatcaggccgaagaggacagagaatttcgatggcaacgcatcaaagaaacaaatgtcacatttgtctctacgggcccaaaagttgttctccttctggcgatgggccgactgctagagctggtagtgacctctacctgcaatcgattaatcgattgagtacatttcggtattatttatgaaatggaaatttaaatataatgtgaaattttttgatatagagtgaattattataaatatggaaatcaataattaccattcacattttacgttatttcaaaacaatcgataattaccattattctgtacagttgctcgttactcaccatttggtatctatcggttaaacatttataataatatttggttatattaataaaattgcaacaccttcaaaatagtttaaatttgttatacatttttaaggtataacttttcctaaattattgtaaatatacatatatggtttatttaaggctgtaaattatcaaatcccttttcaaaaaccaaccattgttcagaaaatataaattatatattttaatttttacagatatatactgatattgaaccggcaactatcgattgtcgaaatgcaattagcggagaaacatatcgtggcccttatgtttcctgcaatcgatgtttctaccttcactttcgtttccggcgtggtgcgtaagttgctccgcgttttcgcaattttaagcgattatcactttgtttgaactctaggccggccatgtgcctataagttaacagcaaagcatatcgtcgccattgggaccaaagtaactctcaaatctggttcaattttaatccgtagaaattttacatcatggacaattctggaaataaccgctacgagctgttgttcatggacgacgatgactcctctgggctcgcacagccacagattgccgctgtagtcgcggcgcccaagaagccggaaccggcaaaggcgccaaaggcaccaaagagcaagtcggagaaggagaacaagccggttgtggctgcccgcaaggccaacgctccggtggctaaaaacgctagtccagtgaaaggcggcaagggtcccgctggcggggatgtgggtcgtcccaagaacccaacagcaaacggtgccaacaaccagggcaggttcaacaacaaccaacgctacggaaataaggagtcgaacggagaaattcggaaacgagttgccgcagcgtcaattcaacaatcgtgacaacaggggaccaccacgcgtccgtaccggcgagaagttcggaaagcgcgagttcgatcgccagtcgggatccgatagaactggtaattatgtctagattcttctgtccttggttttcgtgtttgcttctcaagtgaatccgttttttctgcgtggaaaatgctgccctgtaatggcggcatgctgcaaaatatagagaaaacgcaacccttggcaacaagattgattacatatcgcgtatttctcacgtgacttttaggcatttgtaatacgcaaaacgtttgaaaacgtgtttgtaaatattaattttaaatgatgaaataatgaaattactgcgttgcaaactcgtgtgttcacacatgtgttttcttggacatttttttgtttgatttttttgatttttgatcttataatttattaatttattaattcgttaccgaaaatataaaattcgtttggttaaacttttaatttgtcttatacggcaaacattttcccgaaaatcctctttactcatatcgattgaagcctattaatagctgatttattctccacaggcgtcaagtcaattgacaagcgcgaaggcggtggtgcccacaactggggctccccgaagcaggacattgaggacttaaagacgaccggggagacctcaccgcaggcggaaaaggaggactcggccaacgaacagtcggctgatcccgcggtcgccgccgaagaggatgagtccaagcagatgacccttgacgagtggaaggctttgagagaccagcgtgccaagcccaactacaatttgcgcaaagcgggcgagggagccgccgacaatgccgagtggaagaagatgatcgtgctgagcaagaagaaggagagcaacagcgaagacgagttggagtatgatccatcgctgtatcctcagcgcgtgggccgccttcagcgcatcgtggacatccagttcaacttcaatgatggacgcaaggtcggattccgcaagggacctcgccccggagccggtcctcgcgagggtggcttccgcaatgacggacctcgcggagaaggtggctatcgcaatgacggacctcgcggagaaggtggttatcgcaacgacggacctcgcggagagggtccacgcaatgagggaccgcgtggagaaggctaccgcaatgacggaccgcgtggagagggattccgtggtccccgctttaacaacggacccagcaacggctatgaaaacagacaagacaacaacagattcggagagaaacgccgctccgcccagaagccactgaaggttgacgatgaagctcaattccccactctgtgctaggagttgagaacaacaataagatttaataatttcgcgtattaaataattagtaagctggtccttcggttaacaaataaccattagattttcgggcgcgatctatgaagcttgacgaccgattaataaacagaaacaaatcagccacgcttatccatattccttagttgtaaacaaaaatttttgcatttttcactctcatcatttacgcataaaaaaaactattacaaatagttggaatgttgaaataaatttacatcaattacaaaccaaggaataataattaattaggtttttattagcttaattcgctgccatccttaatcttttgaatgaatgcacttaattcttgcgccgaatacgatttctttcggctcttcttcggcggcgcggcttccatagatgacggttcacgtttggtctgagaatagattgaatttttttagaactgcaattacaggaaatgttttaagaacctacgaagtgtctgtactcgggcgaaatggactccagttgcagcagtctattttccactcgtttgattctactgaaaatgttttcctcgttgtcggtggttagacccatgtacgattcaattgcctgtagtcgtgaattgggtagcgatttcctcatttctttggttggatccgtttgaccgtcacgcgatcccattagtttattcagttcgagttcgtagttgggtcgcatttccatttgctgaggtccgcatcggttgtttactcgtcggactgtgataggttgtttgtagaccaaagtggctatagttatgaaaatagagcatcgtttacccaccttttaaatggcaatttgactgctcctgcttaataattgtgctctgcgttcgagcgcaggaatcgctcaagttttggtctgagctgacaaaagacgatttgaagtcaattacattttgtgagtttatttcgtctcgttttctgttgacaaaacattctaaacgcttggttaactcagcgtcattaactct

SEQ ID NO: 32027 - DNA, 1272 bp, DROSOPHILA
atgcaattagcggagaaacatatcgtggcccttatgtttcctgcaatcgatgtttctaccttcactttcgtttccggcgtgaaattttacatcatggacaattctggaaataaccgctacgagctgttgttcatggacgacgatgactcctctgggctcgcacagccacagattgccgctgtagtcgcggcgcccaagaagccggaaccggcaaaggcgccaaaggcaccaaagagcaagtcggagaaggagaacaagccggttgtggctgcccgcaaggccaacgctccggtggctaaaaacgctagtccagtgaaaggcggcaagggtcccgctggcggggatgtgggtcgtcccaagaacccaacagcaaacggtgccaacaaccagggcaggttcaacaacaaccaacgctacggaaataaggagggaccaccacgcgtccgtaccggcgagaagttcggaaagcgcgagttcgatcgccagtcgggatccgatagaactggcgtcaagtcaattgacaagcgcgaaggcggtggtgcccacaactggggctccccgaagcaggacattgaggacttaaagacgaccggggagacctcaccgcaggcggaaaaggaggactcggccaacgaacagtcggctgatcccgcggtcgccgccgaagaggatgagtccaagcagatgacccttgacgagtggaaggctttgagagaccagcgtgccaagcccaactacaatttgcgcaaagcgggcgagggagccgccgacaatgccgagtggaagaagatgatcgtgctgagcaagaagaaggagagcaacagcgaagacgagttggagtatgatccatcgctgtatcctcagcgcgtgggccgccttcagcgcatcgtggacatccagttcaacttcaatgatggacgcaaggtcggattccgcaagggacctcgccccggagccggtcctcgcgagggtggcttccgcaatgacggacctcgcggagaaggtggctatcgcaatgacggacctcgcggagaaggtggttatcgcaacgacggacctcgcggagagggtccacgcaatgagggaccgcgtggagaaggctaccgcaatgacggaccgcgtggagagggattccgtggtccccgctttaacaacggacccagcaacggctatgaaaacagacaagacaacaacagattcggagagaaacgccgctccgcccagaagccactgaaggttgacgatgaagctcaattccccactctgtgctag

SEQ ID NO: 32028 - protein, 423 aa, DROSOPHILA
MQLAEKHIVALMFPAIDVSTFTFVSGVKFYIMDNSGNNRYELLFMDDDDSSGLAQPQIAAVVAAPKKPEPAKAPKAPKSKSEKENKPVVAARKANAPVAKNASPVKGGKGPAGGDVGRPKNPTANGANNQGRFNNNQRYGNKEGPPRVRTGEKFGKREFDRQSGSDRTGVKSIDKREGGGAHNWGSPKQDIEDLKTTGETSPQAEKEDSANEQSADPAVAAEEDESKQMTLDEWKALRDQRAKPNYNLRKAGEGAADNAEWKKMIVLSKKKESNSEDELEYDPSLYPQRVGRLQRIVDIQFNFNDGRKVGFRKGPRPGAGPREGGFRNDGPRGEGGYRNDGPRGEGGYRNDGPRGEGPRNEGPRGEGYRNDGPRGEGFRGPRFNNGPSNGYENRQDNNRFGEKRRSAQKPLKVDDEAQFPTLC

SEQ ID NO: 32029 - DNA, 5235 bp, DROSOPHILA
gcatattttattcatttccttgagtgccatgctatcgtaggcctcgtacgccaatgacagcacctgaaaggtcgaaaagtacaaatgaatcaatgaaatcaattgattgagataatgaagccacctttttcccttgaaaattatcgcgcgtagtgcccacgaaaacggatgaggctccacagccttcatcggccagcaactgatggatatgagcgatatctatggggtcgtttaccaatttcacgtgatccatggcggaaaggttagcctccactcagtggcggtatgatggcgagttcgtctccttccttaaacagaattctatcactcaggttgtcaatgtacgactcgttgtgggccaaaatcaagttatcccggatggaggtcaggccaaatttggacaccaggtggtccagcagttcggtggcagtaatttcagtaggaacttccactgtcgaccggggagtgtttgctaattcacgggatttagcaaagaacaacacgtgcacgttgacaacaggtccatccgcattcatatttacaaatgaagattggcgatgacacagcagttccattttccgactacctatgtatcgatttcttatcggaacgaagtggaatagtccacggaaagggaaacagctgactgaaactttattaaatgcttaataactttttagataaatcaaagaagcttcttactcattgcataaacaatacaaatatttaatacatagtaattatacagcgaattcattctgacaatccgaatcatcaacagcatacaatcgatatattttgtttaaagttcgtccatcgcaatttacaccgatacttaatttcgcaagtgaataaaattgttattattccctattaaactaatttaacttatctaacgtagatagcgaacttgtgaatatttaatgataagttaagttgccagatagattcttttttcttcactttccgtgttgacatcgtcaactttccataaagaaccatgaagacacgtttcaataccttcgatataatctgcggagtggcggaactgcaaaagtatgtaaaaaatccggataattccgatgcccaggaataatggtacatctacatttatattccaggctggtcggctggcgagtgaatcagatctatgacgtggataacaagacctacctcttccggatgcaagggaccggtgcagtggagaaggtcactctgctaatagaatctggtacaagattccataccactaggttcgaatggcccaagaacatggctccgtccggtttcagcatgaagttgaggaagcacttgaagaacaagcgcctggaaaaggttcaacagatgggtagcgatcgtattgttgactttcagttcggtaccggtgatgccgcctaccatgttattttggagctctacgatcgtggtaatgtgatcctcaccgactacgagctgaccacgttatatattttgcgtccgcatacggagggcgagaacctgcgcttcgccatgcgcgagaaatatcccgtggaacgggccaaacagcccacgaaggaactggaactggaagctttggttaagctgttggaaaatgccaggaacggcgactatttgcgacagattctaacacccaacttggactgtggtccggcagttatagagcatgttctcctctcacacggcttggacaatcacgttatcaaaaaggaaacaacggaagaaacgccggaggcggaggacaagccggagaagggcggtaaaaagcaacgtaagaagcaacagaatacgaaactggaacagaaaccatttgacatggttaatgacttgccaattcttcagcaagcagtaaaggtaagaacaatatcgtggaaatatttattattgctgttaaagtaaataaaacgttctgtgcaatcttttaggatgctcaagagcttatagctgagggaaatagtggaaaaagtaaaggctacattattcaagttaaagaggaaaagcctacagagaatggaacggtggagtttttctttagaaacatcgaatttcatccctacctctttattcaattcaaaaactttgaaaaggccacatttgagtcctttatggaagccgttgatgaattttactctacgcaagagtcgcaaaagattgacatgaaaacgctacagcaagagcgtgaggcactaaaaaagctgtctaatgtcaagaatgaccacgcaaagcgtctagaggaattgacaaaagtccaagatgtggacagaaagaaagcagagctaataacgtccaatcaaagtctggtggataatgcaattcgggctgttcagtcagctattgccagtcaattatcctggccggatattcacgagcttgtaaaggaggcacaggcaaatggcgatgctgtagctagttccataaagcagcttaaactggagactaatcatatatcccttatgctcagcgatccatatgacaacgatgaagacgacgatcttaaggatccagaggttactgttgtggatgtcgacttggctctgtctgcttgggccaatgcccgtcgatactacgatatgaaacgttcggctgctcaaaaagaaaagaaaactgtagatgcttcccaaaaagctcttaagtctgcggagcgcaagacgcagcagacgctcaaggaagtgaggactatatcgaacatagtaaaggcacggaaagttttctggtttgaaaagttttactggtttatcagctctgaaaattatttggttattggaggaagagatgcccagcagaacgagcttattgttaaaaggtttgctttcaattacttaaatagatcgaagtatttataattatgacatgttgttattccagatatatgcgtccgaaagacatttatgtgcacgctgagattcaaggcgcctcgagtgttattattcaaaatcccacaggagaagaaatacctcccaaaacgttgctagaggcaggatccatggctatttcgtacagtgttgcttgggatgccaaagtggttaccaactcgtactgggtaacaagcgatcaggtcagcaaaactgcaccgactggagagtacttggcaacgggaagctttatgatcagaggaaagaagaacttccttccctcctgccacctgaccatgggtctaagtttacttttcaagttggaggatagcttcattgagcgccatttgggagagcgtaaagttagaagcctggaggatgatcaaatagatccaaatgttaaagaaaacgaagttgaacatgatcttttgtcggataatgaagacgctgattcaaatataaatctatcggaaccaagctccaataccgaaattacagcttttcccaatacagaagttaagattgagcacgatactggtcgcattatagtcagatccgactccgtaaatccagagattgaagagactaaagagagtgaagttgtcctagacaaaattttgaaaaagacggacgatgaagaaacgaccattattttggctggtccaagtcgtaaaaagcaagtaagtgccaaaaagaccaaggaagacaaggcacgggcgaaacaagaagctgccaagcaggaagtccctcctgtgagtagtgaaccaaaaaatccatctcaagttaagagaggtcagaagggaaagctcaagaaaatgaagcaaaaatacaaggatcaagatgatgaagagcgggaaattcgcatgatgattctcaagtcatcgggtaaggaaaagccacaggccagtgccgataaagtggtggagaaaagtgagtcaaccaaggagtacgtgaagccagaaaaaagtgcagctcccaaaaacccagtggaactggacgatgctgatgaagtgcccgtcggtggggatgtggatgtactcaacagtctgactggacagccgcacgaaggagatgagctgctgttcgcgattccagtcgttgctccctatcaggctttgcaaaactacaagtaggctatactgaaagttcgcataaaatgtttattgtaaatgtgatatcctttttaggtttaaagtaaagctcaccccaggtacgggaaaaagaggaaaggcggcgaaactagcacttaatatcttcgcaaaggagaagagctgcagtgctcgtgagaaggacttactgaaaagtataaaggaagagtcgttggccaggaatataccaggaaaggtcaagctatcggccccgcaacttcagaagtatcacaaataactaaatcaaatgtatgcaaaatgtgttgagccataacttaaggaagtgttaaaaatgctttaaaaaagtaatgccagttgatacaataaaagagaatgtttacggaactgaatatatatgttgattccttatcaaagagatatatatatatatgtatatattgattttgttaacggttgaaactggctcttatcgatagtcttgttgctgggcgaactttaagctgggattttggggcgcatgcgcctcatatggggcccgagtttgcatgtgtttgtttacttcggttggctgtgttcgaaagtggtgttgtataagtagatattttggtgctaagtcgcctgttttggcattttgtgtactaaaaagttcgggaacttctcgtcatcattcgattcgtcgtgaattgccacagtaaaaatctacactagcctgtttaaaacaatgaattcctccggagcccgatgaaaaagcaaacaagcccgaaggcagcaaatcacatagcttctcgcaaccaaagacaatacagcggaaaatgtatctttcgtgcgaaatccgtgtaaaacattttttccaacccaaccgtttgcgtgccgtggaggatttcaccgatatgtagatacatttaggcaaagacggagtgcttcccaacgaaaggaaaccattgcaaaaggaataaaattaaagtgctgaggctatggttcggtgaaaaactatggccttcaaagtcccacccagttagaaggatatgtgcgtgtgtgtctgtaagtgtgtgttagtgtatgtgagtgtgtgtgtgtatgcatacatatgaaggcatgtattgattaaggacacagcacttttttctcagccgtgtgagctgaactgaattaacatacagtgtttacgtgcctccaattataaagttaaaagttatgcccccgctgacatacttgcaagcactcgaattagcatgacgtacaaaaaaagtgcccatattcgcattcgcattcgcaca

SEQ ID NO: 32030 - DNA, 2919 bp, DROSOPHILA
atgaagacacgtttcaataccttcgatataatctgcggagtggcggaactgcaaaagctggtcggctggcgagtgaatcagatctatgacgtggataacaagacctacctcttccggatgcaagggaccggtgcagtggagaagaacatggctccgtccggtttcagcatgaagttgaggaagcacttgaagaacaagcgcctggaaaaggttcaacagatgggtagcgatcgtattgttgactttcagttcggtaccggtgatgccgcctaccatgttattttggagctctacgatcgtggtaatgtgatcctcaccgactacgagctgaccacgttatatattttgcgtccgcatacggagggcgagaacctgcgcttcgccatgcgcgagaaatatcccgtggaacgggccaaacagcccacgaaggaactggaactggaagctttggttaagctgttggaaaatgccaggaacggcgactatttgcgacagattctaacacccaacttggactgtggtccggcagttatagagcatgttctcctctcacacggcttggacaatcacgttatcaaaaaggaaacaacggaagaaacgccggaggcggaggacaagccggagaagggcggtaaaaagcaacgtaagaagcaacagaatacgaaactggaacagaaaccatttgacatggttaatgacttgccaattcttcagcaagcagtaaaggatgctcaagagcttatagctgagggaaatagtggaaaaagtaaaggctacattattcaagttaaagaggaaaagcctacagagaatggaacggtggagtttttctttagaaacatcgaatttcatccctacctctttattcaattcaaaaactttgaaaaggccacatttgagtcctttatggaagccgttgatgaattttactctacgcaagagtcgcaaaagattgacatgaaaacgctacagcaagagcgtgaggcactaaaaaagctgtctaatgtcaagaatgaccacgcaaagcgtctagaggaattgacaaaagtccaagatgtggacagaaagaaagcagagctaataacgtccaatcaaagtctggtggataatgcaattcgggctgttcagtcagctattgccagtcaattatcctggccggatattcacgagcttgtaaaggaggcacaggcaaatggcgatgctgtagctagttccataaagcagcttaaactggagactaatcatatatcccttatgctcagcgatccatatgacaacgatgaagacgacgatcttaaggatccagaggttactgttgtggatgtcgacttggctctgtctgcttgggccaatgcccgtcgatactacgatatgaaacgttcggctgctcaaaaagaaaagaaaactgtagatgcttcccaaaaagctcttaagtctgcggagcgcaagacgcagcagacgctcaaggaagtgaggactatatcgaacatagtaaaggcacggaaagttttctggtttgaaaagttttactggtttatcagctctgaaaattatttggttattggaggaagagatgcccagcagaacgagcttattgttaaaagatatatgcgtccgaaagacatttatgtgcacgctgagattcaaggcgcctcgagtgttattattcaaaatcccacaggagaagaaatacctcccaaaacgttgctagaggcaggatccatggctatttcgtacagtgttgcttgggatgccaaagtggttaccaactcgtactgggtaacaagcgatcaggtcagcaaaactgcaccgactggagagtacttggcaacgggaagctttatgatcagaggaaagaagaacttccttccctcctgccacctgaccatgggtctaagtttacttttcaagttggaggatagcttcattgagcgccatttgggagagcgtaaagttagaagcctggaggatgatcaaatagatccaaatgttaaagaaaacgaagttgaacatgatcttttgtcggataatgaagacgctgattcaaatataaatctatcggaaccaagctccaataccgaaattacagcttttcccaatacagaagttaagattgagcacgatactggtcgcattatagtcagatccgactccgtaaatccagagattgaagagactaaagagagtgaagttgtcctagacaaaattttgaaaaagacggacgatgaagaaacgaccattattttggctggtccaagtcgtaaaaagcaagtaagtgccaaaaagaccaaggaagacaaggcacgggcgaaacaagaagctgccaagcaggaagtccctcctgtgagtagtgaaccaaaaaatccatctcaagttaagagaggtcagaagggaaagctcaagaaaatgaagcaaaaatacaaggatcaagatgatgaagagcgggaaattcgcatgatgattctcaagtcatcgggtaaggaaaagccacaggccagtgccgataaagtggtggagaaaagtgagtcaaccaaggagtacgtgaagccagaaaaaagtgcagctcccaaaaacccagtggaactggacgatgctgatgaagtgcccgtcggtggggatgtggatgtactcaacagtctgactggacagccgcacgaaggagatgagctgctgttcgcgattccagtcgttgctccctatcaggctttgcaaaactacaagtttaaagtaaagctcaccccaggtacgggaaaaagaggaaaggcggcgaaactagcacttaatatcttcgcaaaggagaagagctgcagtgctcgtgagaaggacttactgaaaagtataaaggaagagtcgttggccaggaatataccaggaaaggtcaagctatcggccccgcaacttcagaagtatcacaaataa

SEQ ID NO: 32031 - protein, 972 aa, DROSOPHILA
MKTRFNTFDIICGVAELQKLVGWRVNQIYDVDNKTYLFRMQGTGAVEKNMAPSGFSMKLRKHLKNKRLEKVQQMGSDRIVDFQFGTGDAAYHVILELYDRGNVILTDYELTTLYILRPHTEGENLRFAMREKYPVERAKQPTKELELEALVKLLENARNGDYLRQILTPNLDCGPAVIEHVLLSHGLDNHVIKKETTEETPEAEDKPEKGGKKQRKKQQNTKLEQKPFDMVNDLPILQQAVKDAQELIAEGNSGKSKGYIIQVKEEKPTENGTVEFFFRNIEFHPYLFIQFKNFEKATFESFMEAVDEFYSTQESQKIDMKTLQQEREALKKLSNVKNDHAKRLEELTKVQDVDRKKAELITSNQSLVDNAIRAVQSAIASQLSWPDIHELVKEAQANGDAVASSIKQLKLETNHISLMLSDPYDNDEDDDLKDPEVTVVDVDLALSAWANARRYYDMKRSAAQKEKKTVDASQKALKSAERKTQQTLKEVRTISNIVKARKVFWFEKFYWFISSENYLVIGGRDAQQNELIVKRYMRPKDIYVHAEIQGASSVIIQNPTGEEIPPKTLLEAGSMAISYSVAWDAKVVTNSYWVTSDQVSKTAPTGEYLATGSFMIRGKKNFLPSCHLTMGLSLLFKLEDSFIERHLGERKVRSLEDDQIDPNVKENEVEHDLLSDNEDADSNINLSEPSSNTEITAFPNTEVKIEHDTGRIIVRSDSVNPEIEETKESEVVLDKILKKTDDEETTIILAGPSRKKQVSAKKTKEDKARAKQEAAKQEVPPVSSEPKNPSQVKRGQKGKLKKMKQKYKDQDDEEREIRMMILKSSGKEKPQASADKVVEKSESTKEYVKPEKSAAPKNPVELDDADEVPVGGDVDVLNSLTGQPHEGDELLFAIPVVAPYQALQNYKFKVKLTPGTGKRGKAAKLALNIFAKEKSCSAREKDLLKSIKEESLARNIPGKVKLSAPQLQKYHK

SEQ ID NO: 32032 - DNA, 6313 bp, DROSOPHILA
gtgccaaaaagaccaaggaagacaaggcacgggcgaaacaagaagctgccaagcaggaagtccctcctgtgagtagtgaaccaaaaaatccatctcaagttaagagaggtcagaagggaaagctcaagaaaatgaagcaaaaatacaaggatcaagatgatgaagagcgggaaattcgcatgatgattctcaagtcatcgggtaaggaaaagccacaggccagtgccgataaagtggtggagaaaagtgagtcaaccaaggagtacgtgaagccagaaaaaagtgcagctcccaaaaacccagtggaactggacgatgctgatgaagtgcccgtcggtggggatgtggatgtactcaacagtctgactggacagccgcacgaaggagatgagctgctgttcgcgattccagtcgttgctccctatcaggctttgcaaaactacaagtaggctatactgaaagttcgcataaaatgtttattgtaaatgtgatatcctttttaggtttaaagtaaagctcaccccaggtacgggaaaaagaggaaaggcggcgaaactagcacttaatatcttcgcaaaggagaagagctgcagtgctcgtgagaaggacttactgaaaagtataaaggaagagtcgttggccaggaatataccaggaaaggtcaagctatcggccccgcaacttcagaagtatcacaaataactaaatcaaatgtatgcaaaatgtgttgagccataacttaaggaagtgttaaaaatgctttaaaaaagtaatgccagttgatacaataaaagagaatgtttacggaactgaatatatatgttgattccttatcaaagagatatatatatatatgtatatattgattttgttaacggttgaaactggctcttatcgatagtcttgttgctgggcgaactttaagctgggattttggggcgcatgcgcctcatatggggcccgagtttgcatgtgtttgtttacttcggttggctgtgttcgaaagtggtgttgtataagtagatattttggtgctaagtcgcctgttttggcattttgtgtactaaaaagttcgggaacttctcgtcatcattcgattcgtcgtgaattgccacagtaaaaatctacactagcctgtttaaaacaatgaattcctccggagcccgatgaaaaagcaaacaagcccgaaggcagcaaatcacatagcttctcgcaaccaaagacaatacagcggaaaatgtatctttcgtgcgaaatccgtgtaaaacattttttccaacccaaccgtttgcgtgccgtggaggatttcaccgatatgtagatacatttaggcaaagacggagtgcttcccaacgaaaggaaaccattgcaaaaggaataaaattaaagtgctgaggctatggttcggtgaaaaactatggccttcaaagtcccacccagttagaaggatatgtgcgtgtgtgtctgtaagtgtgtgttagtgtatgtgagtgtgtgtgtgtatgcatacatatgaaggcatgtattgattaaggacacagcacttttttctcagccgtgtgagctgaactgaattaacatacagtgtttacgtgcctccaattataaagttaaaagttatgcccccgctgacatacttgcaagcactcgaattagcatgacgtacaaaaaaagtgcccatattcgcattcgcattcgcacatatagaccttcgtgtaggtatgtacgagcatgtgtgtatacagcataccctctattgcacctgctcgaaaaatcaaatatcagaactgaggaccattttgttattttaaaacagaatatcaaggcatacagaaagtttgtgcgatggaagtaaatgaattaaatgaccgtttttatacaaaatcccaaacattataaacgatgaaattactatcccccatctaaaatatattttatctcatttatttctaaaatttaaataaacatacatgaaagagtatgaatttacatttcagaaatgccaactgatagctaataaattgcttataatggacttttgtggaatatttgcaactgccagataaaatgagggctatcctgattgctcaagcgaaccccgaaaaggcgtcgacagtaactaatcatatttgttagcagcagatctactaaaacagcagtaaggttcacttaactggcattaaatgaatatgtgaacgattccttaataaaatatattttatcctattaatattacttgaattttaagaacatggagccaaatcattattactgccggagcgccatgcagcagaatccctcgacttccattccccaacatgcgtcgaacaaactcaactatgggatgaacgctggccaggattatgtgacatgtagctccggccaatcgcaatcgggctacagctccaaggacttggttccgcgcagtgggaacagcaaaacgctcggcgggaatggcaacatggggagtccgtacggaggatctgtgtgcagcaacagtggccaatgcagcaagaatactgccaacgctgggaactatatcaacataatgactgttccactgggaacactgcagtataatcgaaaaaagctatctacacaagactacgagtgcgtttgctataccaagttcaacgaatttatgcattataatattcgtaattacttttcagatcgcatttatattacaacactacggatgtgaagtgtcgcgatgattactatatagccaacaatgccgcagcagcaataccgcagcaccaagctcatcaaccgcatcagcagccgcatcagcaccaacatccgcagcatcagcagcagcatcagcaacaccagcaacaccaacagcaccagcaacatcagcaacatctgcaccagcagcagcagcaacaggcaaactttctccacatccaacaatcgctacaacacaaccaccaattgagccacccagaaccaatccatcagttgccccaattacagggcacggtggccgatccaccagatgccttcgacaactgtgcgatcttcccgagcgccggcggcagcagcaacggaagtggacgcgtggcagccactcaaacccatcagaacccatccggtgtggtcacgtgcgaccagcaggtacccgtgtccctgggctcggtgaatatgcccgttcccccaatcatgtataccgtgcatcgtgtggtgaccacagctcagatccaaacggcagcgggcagcaccttcgcctcgtcggctagtgtgtccagtgtggtcagcactggccagaatgatggtgactgcctgtcgccggcacaggtgtcctccgccatggccgcctctggaaatgcttcctgtctgggtggattacccgacatgggcgccaacatgatgagcaatgcaagtgcactttgtcccctttccgacctgaggagcccatccggtaagagaaactaaattgcaatgtttagtgttatgctatttgtttatctataacatttttaggagtgctcaccaattcctcatacatgccacaacatcacaagtgcaacaatgggaatgatgcccaatccaatcccgcaatccaaaaacgcctgatggcgaccagctcaacttcgaacttcgcgactgccggcaaagctgcttccaatttaacccgtgctctccaaaatgtaagatacattccattcattttcagccacttgaatgcgattctttacttcataggtgatccccacatgcgtgtatcttatgtcccgggtggcggtgcacatggagatcgagggcactgcccagtgtccatcgcaagtgatgttggcagccgccttgggatgcgaggagctgggcatatccaataagttgctggcacagagcgtgttcggattgtggatgacaagtgctttactggagatgcagctgaaggcccaccactgcccctacatagtgcgagttgcgtggcccaatctcctccagaagttcagcaacagcagtcccagtgatcgaaagttcgatgagcccatgatagttttgaagcggaatgtcttcttctcgaagcgagatgaggagaaaataaagtaataccgatcaataactttagattaacccatttcaaacttgatattatgatatcattttcagggatcatcggatcttggagctcctctatgaagaggccagaaacaatgtgctgacaggcagatatatcatggagccggtgcattcgctaatgttgggtggcattcaagcgcgcatcgaactgggtccttacaactcccacacccatacaataggattctttcggcaagtctaatactaaactaataaaacacgccaagttctaactttgtctgctaatttgatcatttagggagaaccaagctagatttttgcctcctcacgtggccaagagctccacttggctgtggctaccgatcagtcagaagaattctgcggaagtgaagcttctggagcaattcaagcgagtgccccagacggccaccacacgaaagttgatgaggaaatacctggaattctgctgggctctgccattctatgggtaggcttctgatatatatcttacaatatatatttaataattaatttttttatttcatgctcacagcgccgcatattttcatggccaaatagaacaacctgttaggggaattatggcactggtcaaccaaaaggacatggaggttttggtcgctgtcaatgagagaggggttttcgtaatagatccgtacgaatgtgtaagttattttatattaaaataacgtatagttttaatccgcactgtttaatgactcaccacttttgatgcagaccctcttgctgggattgcgatacgaggatttgtcgtgggattacgcaaagccaagtgcaagtgatgatcccgaatgcctcacttgtatcttcctgcaggtacttcgctgtgttttcgctgttataaaaacaagatcttagaatcatttactttgcagttcgatgccgtcgagaacggaatacaagtgtccaaactgatgcaaatattttcaaagcaagctgccatgatagacgcacttatatcacactttacagatcaaatcagaaacaaaaaacaggagggtaacactcaagaaccttttcacgatggtaagccacatactatcagctctatatgtcataatcaaatccaattctgattactaacccttttcagagccaaatcctattcaaaataatggaaatggagtcttatgcaataagctgtctcgattaactttggccaccttcgatgaagagggaggtcgttgcattgggcaaatgggatcattatctataagctattaacatttgttactaacgataaagtaaatttaagttaaggggtgttgaataaagttcgcgcatatattcacgaattgttgatcgatttccataaatatactcacaagtaaatttttagcaaacggaatcttcacactcacagtcaccttcatagcgtattccattaactttaattgttttctaattttacaaaatgtcggtgatcattattcgaattttaatgaatggtacaataagttacttaagacttacactaagttacagaatatatcgctgaaggcactggcaaacgaagattccattatatccacgcacccatcagatattttatttgccgccaaagagttaatattatttatttattattaaattgattgcatttattcccattgatgcccccgaatagttatctctttttagtttaaagttaagataaggcatgcagtatatattaagatatatacttatatgggtatgtgcatttgacgtatgcgttcagaattagtttaataagccttcgactgaaacaaattatgtatataataacaataaagtgtatgtacaaaatgtaagggctaactgccaacataggttatgtatatatttaaatttgtatgtatgtataaattgagacttaaaataaataccgtttcctcatacttatactgcaaatacttataaatctaatgcaatttgatttttccattaaatgtgcacttattttgactttatgtatcagaaagagtatctcaatgcggtatgtcaacaaattgttaattttaatcgataattacgatttgagtacgcttgcaatcgtttatttattgtgtaggtttcatatttaatttaaaacaatccattcattttaaaatacagttttgtgacaaataaacttgaatgaaaattgtttaataataaataatgatatagttataacatacagcaaaacggaaattaatcaatacaagtagatgtaatctaataaattatagttaatagaaaa

SEQ ID NO: 32033 - DNA, 2695 bp, DROSOPHILA
cgaaagtggtgttgtataagtagatattttggtgctaagtcgcctgttttggcattttgtgtactaaaaagttcgggaacttctcgtcatcattcgattcgtcgtgaattgccacaaaatgccaactgatagctaataaattgcttataatggacttttgtggaatatttgcaactgccagataaaatgagggctatcctgattgctcaagcgaaccccgaaaaggcgtcgacagtaactaatcatatttgttagcagcagatctactaaaacagcaaacatggagccaaatcattattactgccggagcgccatgcagcagaatccctcgacttccattccccaacatgcgtcgaacaaactcaactatgggatgaacgctggccaggattatgtgacatgtagctccggccaatcgcaatcgggctacagctccaaggacttggttccgcgcagtgggaacagcaaaacgctcggcgggaatggcaacatggggagtccgtacggaggatctgtgtgcagcaacagtggccaatgcagcaagaatactgccaacgctgggaactatatcaacataatgactgttccactgggaacactgcagtataatcgaaaaaagctatctacacaagactacgaatcgcatttatattacaacactacggatgtgaagtgtcgcgatgattactatatagccaacaatgccgcagcagcaataccgcagcaccaagctcatcaaccgcatcagcagccgcatcagcaccaacatccgcagcatcagcagcagcatcagcaacaccagcaacaccaacagcaccagcaacatcagcaacatctgcaccagcagcagcagcaacaggcaaactttctccacatccaacaatcgctacaacacaaccaccaattgagccacccagaaccaatccatcagttgccccaattacagggcacggtggccgatccaccagatgccttcgacaactgtgcgatcttcccgagcgccggcggcagcagcaacggaagtggacgcgtggcagccactcaaacccatcagaacccatccggtgtggtcacgtgcgaccagcaggtacccgtgtccctgggctcggtgaatatgcccgttcccccaatcatgtataccgtgcatcgtgtggtgaccacagctcagatccaaacggcagcgggcagcaccttcgcctcgtcggctagtgtgtccagtgtggtcagcactggccagaatgatggtgactgcctgtcgccggcacaggtgtcctccgccatggccgcctctggaaatgcttcctgtctgggtggattacccgacatgggcgccaacatgatgagcaatgcaagtgcactttgtcccctttccgacctgaggagcccatccggagtgctcaccaattcctcatacatgccacaacatcacaagtgcaacaatgggaatgatgcccaatccaatcccgcaatccaaaaacgcctgatggcgaccagctcaacttcgaacttcgcgactgccggcaaagctgcttccaatttaacccgtgctctccaaaatgtgatccccacatgcgtgtatcttatgtcccgggtggcggtgcacatggagatcgagggcactgcccagtgtccatcgcaagtgatgttggcagccgccttgggatgcgaggagctgggcatatccaataagttgctggcacagagcgtgttcggattgtggatgacaagtgctttactggagatgcagctgaaggcccaccactgcccctacatagtgcgagttgcgtggcccaatctcctccagaagttcagcaacagcagtcccagtgatcgaaagttcgatgagcccatgatagttttgaagcggaatgtcttcttctcgaagcgagatgaggagaaaataaaggatcatcggatcttggagctcctctatgaagaggccagaaacaatgtgctgacaggcagatatatcatggagccggtgcattcgctaatggagaaccaagctagatttttgcctcctcacgtggccaagagctccacttggctgtggctaccgatcagtcagaagaattctgcggaagtgaagcttctggagcaattcaagcgagtgccccagacggccaccacacgaaagttgatgaggaaatacctggaattctgctgggctctgccattctatggcgccgcatattttcatggccaaatagaacaacctgttaggggaattatggcactggtcaaccaaaaggacatggaggttttggtcgctgtcaatgagagaggggttttcgtaatagatccgtacgaatgtaccctcttgctgggattgcgatacgaggatttgtcgtgggattacgcaaagccaagtgcaagtgatgatcccgaatgcctcacttgtatcttcctgcagttcgatgccgtcgagaacggaatacaagtgtccaaactgatgcaaatattttcaaagcaagctgccatgatagacgcacttatatcacactttacagatcaaatcagaaacaaaaaacaggagggtaacactcaagaaccttttcacgatgagccaaatcctattcaaaataatggaaatggagtcttatgcaataagctgtctcgattaactttggccaccttcgatgaagagggaggtcgttgcattgggcaaatgggatcattatctataagctattaa

SEQ ID NO: 32034 - protein, 793 aa, DROSOPHILA
MQQNPSTSIPQHASNKLNYGMNAGQDYVTCSSGQSQSGYSSKDLVPRSGNSKTLGGNGNMGSPYGGSVCSNSGQCSKNTANAGNYINIMTVPLGTLQYNRKKLSTQDYESHLYYNTTDVKCRDDYYIANNAAAAIPQHQAHQPHQQPHQHQHPQHQQQHQQHQQHQQHQQHQQHLHQQQQQQANFLHIQQSLQHNHQLSHPEPIHQLPQLQGTVADPPDAFDNCAIFPSAGGSSNGSGRVAATQTHQNPSGVVTCDQQVPVSLGSVNMPVPPIMYTVHRVVTTAQIQTAAGSTFASSASVSSVVSTGQNDGDCLSPAQVSSAMAASGNASCLGGLPDMGANMMSNASALCPLSDLRSPSGVLTNSSYMPQHHKCNNGNDAQSNPAIQKRLMATSSTSNFATAGKAASNLTRALQNVIPTCVYLMSRVAVHMEIEGTAQCPSQVMLAAALGCEELGISNKLLAQSVFGLWMTSALLEMQLKAHHCPYIVRVAWPNLLQKFSNSSPSDRKFDEPMIVLKRNVFFSKRDEEKIKDHRILELLYEEARNNVLTGRYIMEPVHSLMENQARFLPPHVAKSSTWLWLPISQKNSAEVKLLEQFKRVPQTATTRKLMRKYLEFCWALPFYGAAYFHGQIEQPVRGIMALVNQKDMEVLVAVNERGVFVIDPYECTLLLGLRYEDLSWDYAKPSASDDPECLTCIFLQFDAVENGIQVSKLMQIFSKQAAMIDALISHFTDQIRNKKQEGNTQEPFHDEPNPIQNNGNGVLCNKLSRLTLATFDEEGGRCIGQMGSLSISY

SEQ ID NO: 32035 - DNA, 3260 bp, DROSOPHILA
ttgtgtgcgaataatcatcagcaaagaactatgcaagttctccatataaggtatgtgctattcttttatattattgtacttcgtgagcacttatacatataaataaaaatatttaaaaaaacgcagtgaattcaaaacttgtgttaataagtttagcctgatcaccttttagtctatatattttctattatcttcataagataagggtgcaatgaaaatatttaccacaaataacggacaaagagtactcatggaaattagtgcaaacacacagatggagagtgcaaataatatagagtggaattgtgttattctcggtagattcgcaacccaaaagtgcaaccaggtccacgtccgtatcagatccgctcacgcacatgcgaatgcgagaaggttggccaaatacacgcacacacactttcgcaggagggaatgtttatgggaggtaaataactggtttttatataaacacacgggcacatacacacacacacacgcagccacgtggaggagccgatttggaaatgtgcatcctgcatgctgaatatctagatccacaacaccaccacacacatacgcagcccgcgaagagggacgcgaatgatggtcaggacatcaaacccgttaagagagccgaacagagcgaatttcgtgagcaggacatgagtaacaagttgttgcactggtgggtggtgggtgcgcgcgcgagagagagagagagagaaaggtgagagtggcgctttgctccgattggtcgagaaaaagcgagaaaaacgtcatgccgttctcttcgccgcaaaatcatcggatcatctcggcggtcgccgttcgcctgtcgccgttcgcagttcgcagctcgcctttcgcggaatcggattcacaatcacatccttctgcgagttcgaggagtgcacaccggtggtcgcatccgcaaagtccgcgcttcgaaaccgctatcgtaatcgcaatcgctatcgccagcgcaaccagaaatagaaccatggatatctccgcctaccagcacatgaacatccggatgagcacgcgcggcaagcgtcctctgaggaacctcacgcccaacgacaaggtgcgtgccatccagcgcatccacaatggtgaaaccaaggcgagtgtgtcgcgggacatcggagtgccggagtccacgctgcgtggctggtgcaagaacgagcagaagctgcgcttcatgtgccgccagctgggccccgatcacctgggtctcgacacgccaccggaaaagcgcgccaagttcgagctgcagctccagctgccaccgaagttcgtggcactgcctccaaactacgaggagctgggcttcggtgcactgccctacagtccagccgattacccagtgcaaaatgaatccctgctggagaagcttagccttgtggaatttgtaaaaaagaacggtggattgcatccggagggtgcactgcatccgggtcaggccggcgtgatggactactccaacaacatgctgcaccagctgaatcttctggccctgctcaactccaaactcaccccacagactgccgatgtcctggtagatgcacagccgaaatcagaggacaacaaagtgattgattcgcccgctgcttccgaggattacagcaaaaacaattaccccttgctgagtgttaagaactgggccaaggatccggccaagcgggtgaactccgccaatcagccggagcaagtgaacgataagaacaacaatgccctggaggccaacagttccgcaccacaagctcttgtcacggagcaggcgaagactcccatgttctcggacaccacaatgcccctactgccagcacccttcccgaatcctgcggatctagcgcctgtgatagcaccagtgactccggcaaacgccccgcccactggaaccgataaccagggagcggctctgctcgactggtgcaagctcttcaatgccagtttgaacttcctggccttcgctgcggccgcagcctccatgcagcccggcggcggaggaccaggtggacccagctacaatcccaaccaaatggccagcggcggatcggagccggatctcgaaacatatcctttcaacgaggcgctactaaagcgactgagtccactggcgcacagtgaggcctccaacgaaagctactgcgacagcgagccggaggatctgtccgtgcgctcctgcgcctccaaggcgtccagcagatcccacactcccgacaagagcgtcgggtccagcgacgccgaacagtagacaccctacattatagcatagttgtagttgtagttcatagtgtaaatacatccatttttattgttattagccacctttagtattaatgaaactcgaatcatttcgcaatgcaaatgccatttgtacttatcaattaacgtattaatatcactgcaacaggtattaatagctcagcatactatagctagtattaactaggaatatcaactgtgtgactacttgtttgaaagccaaattcaattcatctacacgtattataacaaatactaattgtgttaagtagcttaattagttggcacattttgtcagccattccaatcgatttgttttattactgtgtaatctgcgtaactctcaaataagcatataaactaattactaatgaaacgaataaatatttattaacaaaacaaaataaaattcaagtgtcaatctctcaagatcaaaacatttttttacttgatgggttttcaattacagcggttagaaaaatgggtcaattttctacctatgaagaaaatgaaagtcttacccgccaaaaggcttatcgaaaaacaggaattttctatagaattaaagtatttaattataacaaaactaaattaattcatgtggtttttatttaaaacgttcgcaagttaaataaaacttacaggcatttgcaagaaaaacaaatagtcaactttttacccatattttaaaaatatatttcattaaactaattttaaattcattatgcaaattaaacacaaatcgattgaatctttaagttgcaaacaaataaaaacttgaaaatgctaatgaatcctactttgaatttccattagaagtaaaactcttttaccaaaaagcgccttcattggttttttgccatttattttgtagggataaatattaaacttggcatgcaaatgaatacatgtatgtgccgaagcacattccatattctatatgatgaaagggaagcatcattataggtgccatagatggaggtcagcag

SEQ ID NO: 32036 - DNA, 1260 bp, DROSOPHILA
atggatatctccgcctaccagcacatgaacatccggatgagcacgcgcggcaagcgtcctctgaggaacctcacgcccaacgacaaggtgcgtgccatccagcgcatccacaatggtgaaaccaaggcgagtgtgtcgcgggacatcggagtgccggagtccacgctgcgtggctggtgcaagaacgagcagaagctgcgcttcatgtgccgccagctgggccccgatcacctgggtctcgacacgccaccggaaaagcgcgccaagttcgagctgcagctccagctgccaccgaagttcgtggcactgcctccaaactacgaggagctgggcttcggtgcactgccctacagtccagccgattacccagtgcaaaatgaatccctgctggagaagcttagccttgtggaatttgtaaaaaagaacggtggattgcatccggagggtgcactgcatccgggtcaggccggcgtgatggactactccaacaacatgctgcaccagctgaatcttctggccctgctcaactccaaactcaccccacagactgccgatgtcctggtagatgcacagccgaaatcagaggacaacaaagtgattgattcgcccgctgcttccgaggattacagcaaaaacaattaccccttgctgagtgttaagaactgggccaaggatccggccaagcgggtgaactccgccaatcagccggagcaagtgaacgataagaacaacaatgccctggaggccaacagttccgcaccacaagctcttgtcacggagcaggcgaagactcccatgttctcggacaccacaatgcccctactgccagcacccttcccgaatcctgcggatctagcgcctgtgatagcaccagtgactccggcaaacgccccgcccactggaaccgataaccagggagcggctctgctcgactggtgcaagctcttcaatgccagtttgaacttcctggccttcgctgcggccgcagcctccatgcagcccggcggcggaggaccaggtggacccagctacaatcccaaccaaatggccagcggcggatcggagccggatctcgaaacatatcctttcaacgaggcgctactaaagcgactgagtccactggcgcacagtgaggcctccaacgaaagctactgcgacagcgagccggaggatctgtccgtgcgctcctgcgcctccaaggcgtccagcagatcccacactcccgacaagagcgtcgggtccagcgacgccgaacagtag

SEQ ID NO: 32037 - protein, 419 aa, DROSOPHILA
MDISAYQHMNIRMSTRGKRPLRNLTPNDKVRAIQRIHNGETKASVSRDIGVPESTLRGWCKNEQKLRFMCRQLGPDHLGLDTPPEKRAKFELQLQLPPKFVALPPNYEELGFGALPYSPADYPVQNESLLEKLSLVEFVKKNGGLHPEGALHPGQAGVMDYSNNMLHQLNLLALLNSKLTPQTADVLVDAQPKSEDNKVIDSPAASEDYSKNNYPLLSVKNWAKDPAKRVNSANQPEQVNDKNNNALEANSSAPQALVTEQAKTPMFSDTTMPLLPAPFPNPADLAPVIAPVTPANAPPTGTDNQGAALLDWCKLFNASLNFLAFAAAAASMQPGGGGPGGPSYNPNQMASGGSEPDLETYPFNEALLKRLSPLAHSEASNESYCDSEPEDLSVRSCASKASSRSHTPDKSVGSSDAEQ

SEQ ID NO: 32038 - DNA, 2975 bp, DROSOPHILA
ggtgaaaaaggcaatggctccgcgtatttagtctatgaagaatatataccaatccgtgagctagcaactggcacttcgtaattttattatctattctcgagctgagttttagtaattcgctccttggacgactgtatataccggccagctgtatatgcaaataccagttcccgagcctcaagtgtccgaatgggagtccacacctcctccaagtcccaaccccaaatccgctggagaagcgagtggagatggcgactccatacagtacggcaacggtcttggtcaattgcgacgtcggcggcattcgtgaaatagccaactttcgtacatactgcgatggtgaatttttgctgttgctcctcgtgatacgtctccatctccatctccgactccagcttcatctacatctacatctacagctccgtctccgtctttcatcgctagctctttcgctctgcagagatgcacatgtgtgtttgtgtattaatttgcccacccaccatggctatatgcaagctggatacggccaagctggccatagcaacttgaaaagtcgaattttcgccatctcgttcggacgtctcgcgcagctacctcagccaacagaggttgcttttgcttttgctgctcctgctcctgctcctgctgctgccgctgcttccacttggacttcggctttagcatcaggatcccaacaccagcatcagcatgagcctcaacctcaattttagtcctggcaatgacgatggcgacgcagcaaaacgtgacctagcccggttagaacgtagcccccatatagactccatcgccagtggaccagagaaaatctccaccccctaaaatgaccccaacccctgttgcctgcacagcttcgcagcctccttaccccttttcggaaccagcctccttgctggccggacacggagccatcatcctcatcagctttggccgccgatgtagcaagcaatcgcaagccgtatgcaaacaatattttacatagctactgtctggaggttcttgctgcccgacttcgttggccttccttcgtgccgaggccttcttgctccttgcatcccgatcccgatggccgctcgatgtccgagcaatcccactcaccacacacgacaaggagcactgagaaaaataactatatttaacggtataccatacttgatattgaaataatataaatttagaacaggtgtgttaacatattcccacagaagcatataagataaccaaatatcctgatagattgcctctcatttttctgggtgtaaggatatgggggatacggatgcgaagggcccacggagtgctacgtatgctgcgatgtttgtgtttgtgtaaatgtccgcatctaaattcgcatatacagcagcggtcaactatggaaattatcgatcgacttgtttttggtgtcaggtggtcgggcgatggatgcggtggcaagtggcaaggaagcaaaggcagcaaagcagcaaggcagcaaaggcagcatgatggacacgcggctggacgggagtttgggaaatgcgagacgggagatcctgggaggtcctgtgtgccaacgaactgaatttcgggggcggccgatatgccaaggcgaacatgggcgcagcgcgtagattgagatggcagtggccaagtggcaggagtggcgggagtggcaggagttggatggctggaaggagcttgtcacatcctcggcccggttgcccagaagttgcctgcgaattaccactgcttgttcgtcgtggtggaagtggtagttgtagttgtagaactgtcccccttctagctgcttgtgcaacggacactgggcctccaggacaacggacactggacactggacattagagaacggcgacggcgaacggccaacgacaacgacaacgacaacgccaacgacatcgtagtcggcccaacgactaggagatgacgatggccaaaggaatgggtgaatgctctgcatttgcgaagcattcagcggaaatattcatcctagctcgtcttttcagccaaggaccccacatcctttcaccccgttctcgactcgattcgactggactcgactcgactcacacaggcacacacatcaaaaggttgttggttgggtagcagcaaaagcagcagcagcaacagcagccatgtccttttggaccggccgcggccaactcgaatggctggaattcatcgaaggcgaagggagctgcgagggcacggaggccagaaattgcttatgcgacatccacatacacatccacatccctgctatcgcctgcagtattagttatggcagagcagcaaaggcaaagactgaagaagaaggctgtccagacgcatggaaatggtagttcccaggtccgttggatcgctggggtcccttgagccaagtccgcaagtccgagaactgaaatatgtattccgaagtgtgtgtatgtgtttatttaaatggggtttcgactggacaagtgtgggggacggaggactccttcagcatctgaaggcggctgggggggattagcaaatgttcgttagttgctgcggtggttgcccagccacgttgagttgatagtcgctttttccgacaacttgatctggacatgttctcaagttgggaaacacaaccgcgtcgcctctgctcctctccttttcgccggaatctcggcactgcggcggtcttttgaaggtggcgttgcagccggggccatatcctgatcagcgaaccattaacttgaccgtcagatgttgatggaccacctctttttccatttatttctgctattttcagcaaggacgcgagaactcactcggtttttattgaattgcgccctgcgttttgcaatccgtatttgtgtatcaaccgattcgctaaaccgagtccaggtgctaccatcttaaggtccactgggcacacaattgagtttcagactcgaccattaaatggaatttagccactcttatatggcgaa

SEQ ID NO: 32039 - DNA, 498 bp, DROSOPHILA
atgcagagcattcacccattcctttggccatcgtcatctcctagtcgttgggccgactacgatgtcgttggcgttgtcgttgtcgttgtcgttggccgttcgccgtcgccgttctctaatgtccagtgtccagtgtccgttgtcctggaggcccagtgtccgttgcacaagcagctagaagggggacagttctacaactacaactaccacttccaccacgacgaacaagcagtggtaattcgcaggcaacttctgggcaaccgggccgaggatgtgacaagctccttccagccatccaactcctgccactcccgccactcctgccacttggccactgccatctcaatctacgcgctgcgcccattgctccttgtcgtgtgtggtgagtgggattgctcggacatcgagcggccatcgggatcgggatgcaaggagcaagaaggcctcggcacgaaggaaggccaacgaagtcgggcagcaagaacctccagacagtag

SEQ ID NO: 32040 - protein, 165 aa, DROSOPHILA
MQSIHPFLWPSSSPSRWADYDVVGVVVVVVVGRSPSPFSNVQCPVSVVLEAQCPLHKQLEGGQFYNYNYHFHHDEQAVVIRRQLLGNRAEDVTSSFQPSNSCHSRHSCHLATAISIYALRPLLLVVCGEWDCSDIERPSGSGCKEQEGLGTKEGQRSRAARTSRQ

SEQ ID NO: 32041 - DNA, 9176 bp, DROSOPHILA
agagacgagccatggtcttggccctgcccaacgaatgcaaagtacaggtgaagtcagcaccatctgctcctttagtggccagcgttttgataaattgccactcttaaccaacttacagaaattcgtttgcaccaccatcaggccaacggcgtttatttacacgcaactcatatcaagtgtcgaggaaattgccaagtttgtcgccgatttcattcagtatgagccactgcaggatcccataaatttggtaagtctattatggcaaagttgaaccaatcacatatccattattcttatgttccgagctcatgtagcaatatatttaaaagtttatgcgttctaaaatgttcaataacttgaccaaggcaatttatacttgtaaatataaaagtaaaacatttaggtattttagtagatatatatgaaaaaccacttagaccctccaatacgacagcggtaagtaaatacgacgacagttctaagagtttcataaaaattatctaattattttttattgaacatgtatttaaaattacatttaaatttgtaaatgtttttatttaaatatcgcattaattccgaattaagaaaattcttttgagcacatttccatagttattaatatacgaaatttaaaaacgtttgatatcaaatgcatgccattcgcgccaacacaccttgcagttcgaaaagtattttttctttttcgtaacaaaaactaagggctataacatttttctagaatgcatcattgggtgaaaaaacaaactaacaaaacagagtcggttgtctttccgttcaaaaagaaatgcataatagctacaaatagagtttctcgatatatacacgttaaccgtacgattaattaattaatacaatgcaatgcaatgcaatggagtggattcgaattgaattgaaagatactgaaagtatgctcgataggtttcacagctaggagataaattcagtggagtcctccggatgcgtggaaccatgtggtctaactgctggagctcagttcgtcgtactgctggtactcgcccgtgatctggcagtcgtcggggtcatcgtcgaggtcacaatgtacaaattcgtagggagggaagaacagggagctgagtagggtggccgacgatcggtagacggccggcgcatagacatggcacctcgtcgagccctcggcggtatctgcatttgcatctgtagccaggacaccgggtcctggctctgcatcgtgcagagcaccgtctgggctatcctctatctctgtatccgtggctggctccgtgggcgccaactttggcttttcctatttgcgacggcgactcttgccccgcccactgccctcctcctccgcggcgtgctcctcgctgtcctccggcaaagcggatttctcgatcatcggtgtctcgttgcccgacttgatggcggctattaggaaacgaagttgcatcagctgcacggccgtcacgcggggattgctgcaattctccagccactgcaggaacttttcgccatggcggatggcctcgatatcctcgtccgccgtgcagtccagatacttggccttctcctcctcgtccgttttgtttgagttattattgttattgttattgctggcgctcacatcgttgttgttcgtatgcggattgctggtgtcctggaagctgccctccgattcggaggatccctgttccggcatcaacggaccagtggcctccattccgcccatcttgaagagcatattgtctaggatcttcttgcattcgcttgtggaattcgtggtctctggggttttggtcttcgcctttggttcgggactcctgctgcctgatgaatgggcaatgggactttgcgaaggggtcatcactttgccggcggctgagagatcctccggtttcccggatgcctccggctccacttcgccatcgagatcggtttcggtggcctcgtcagcctcgggattctgttcgttggaggacaaacttctcaccgacggcgtctcagtctctttcgtgagatgggagtacagtatgttcgagggatctcccatggatcccccctctgcggccgtggtggccacctgctgctgcagttggttggcttgcagggcggccaaggtggcggcattgggattcagggtatgcagactggcaccgaacgccttgcaccagttgtaccacgccgcgttcttctcgtccagactgcccgacggtgtggacgagggtgttagcggagccgagggtatcggcggagtctgtgccaactgactcatgtgctgcggcgtggaagatctgatagggggactggtcacgcccatgggaattgtgggcggataaaggggattcagacccaacatggtctgctgcgacttgagccagtagagcaagggatcttcggccagattggagagcgtcatgggcccgcccatttgcgaaggagcaatcgaaggactgggactcttgatatcgcctcccttgccctcgttcttgatgctcagattgaggctgccctggccctcccccggcttctgtttggcccagttctttaccgacaatccctgcgccgatcgatctccactatcgctcctggggctctgcacctgcagcggcgtttggccactgggcttcggggtcctcaggttaccagcgcccgctgggaaactgtttagacccgacatggccgccagaccgggattcagctgggccagcaagttgaggtttgtggtcagctcgttgaaactgatcgccagcggggattgtgatatgcccgtgagacccgaaaggtgcgtcaagctagagagcggactaattgcatttagggagggatcggcggcgggtctgttgatatcggcaccaaacactttggccttgaccccgccattaaaggccgcatagtctacgggcagcccattgtacccaagatcggccagattcttgtttgtactgtagtccaggccattcagaggggatcgcttgaaggccagctcatcgaacttcagtttgttggagaagttcaggggcagggcgccgtccaaacgctggcgtttctccggcggtcccagaagacctccgccgcctgctccaccacctcctcctcctcctccatccatcttatcgcccagggcgtcggcgcagaggttatccgtggcagactggcgggacatgaagcggagcttgtcctcgttcttgcaccagccgcgcagcgtggactcgggcacgccgatgtccctggccaccgaggccttggactcgccatcgtggatcctctggatggcatggatcttgtcgcggggcgtcaggctccgcaggggacgcttgccctttgtgcccatgcggatgttcatgtgggggtagctggaaatatccaactttaggccgttgtcgaacagcttggcgtctgcaagaaagaagaacaagcggttcttaattaattaccgtgacacacttggcatatcgcatatcgcacggcggaccgatgcgttcccattcgccagcggtgtagcacatagcgatatatatgtactcgtctgaatggcgaatgccgtgtgcgcgcgtccatgtactttgcaggggaagggggttggggctcaaaaacggtcggaagaagggggtggggggcggtctgtcatggggtgtcaggatgtgccacaatgtaccaggatgtgtcaggatgttcaaggggtggcggctggtgtttcgcatgttcgcacggtgctccaataaaatcgccgcgcgctttaaaattttacagacaactcgcggtgtaaataaaccgcacagccgggcgtatgcgctatattgcgtatacgtgtagatggttccatcgtatctacatatatacgtacatagctatacagctacggctacagtcaggatgacaaaatctctctctacgctcttgcaggcaaatgagctgcgtcacgccccttgccgctttttcgctcggctcacgaaggatgccaaatttgcaaaaaggactcgacagtgtttgtgtgtgtgtaatcgttagttcgacactgtgtgcgagtttgcgagagtgtgtgtgtgtgtatacacggggagacaatggaatatgctaattggtgcgttgccttcgcgccgcgacgcgcctgctccaaaatgcagcgggcaacgcgagctacgaataagcaacaagaacaagccattcgtcggccgaactttcccgagtccgcaaatttataacttgtttacctgtctcgggccacttggcgctgcagcgcagaacatcccccaacttgagatactatgcgatactgttgtgggcatggatgtggatccatgccaatgccaagcacgcctgttgcgccttcctgtccttcccaacctttcagccttgctgccttgctgctttccttcttctagatctgaaatgttgccaaaggcaacagcaggtgcagcagaatcagccgcagcagcaccagcagcagcagcgtcttttgggccagctctcaagtcttttttggcctggccaaaagtcgaaggcaggcagaaaacagaaacctgagcgagcaacaatatgctccgcctccatctctccagaaagtgaggcatgcaaaagagctcgccccatggtgcaattttaaaatgaaaaacacgttttgcgcatgactgacacatgatttctttccctgcatatatatgtacggatatatctgtatatatacatatatatctatatatatatatatatgtgtgtggcattcaaatatactggcagcacaagttggtgtgcgtgccctcgcagagcgaacttctcaaaggaagagaaactttcgagaactaagagagtccagatgaccaaactggaggagtctttcgtttggccatccatcgcaatgctgtttacaaaacgcacatcgctccttggctggctttgaagccacttggaatggagtttacacgttgccagctattaatttgaggctcctgaatcactggacttatctccttcggttgcttgtttaagcagacttgagcttatgatttggaataagcagttggcaaggaccaaaagggataaggtgcatcgttttgccaaatatttaatctggttggtattgttataggatatgctaggatgctttctattatttgttttgtatgcaaagaaaacttaaatgagaaaagtggtactagattccagtatttgaattaaagctatttagttaactctaaagcgtatgcaaatcaaatgtatttatctacaaagtaggtaatctaagtctattattattattatataattaatgtgctacgttggtaatcactgctaatagttatgcgtttgtcacctggttgagtatgcggtttaatgcataccaatctagtttaagcctccatttctcgctccccctcacttgacacccaaaccacaaaaatagacactccgggctgttcataaccaatagagcagcaaataactgtgtcgacggtggtgcatgtgattctgcccctactaccgacaacctaaacagcaaacagcaaacacctaacaccatacaccatacacctaactccattcaactaacaccacccacagatccggagctgcggagatccagagaagcagcgacctgagaacaacctgcacccaaacacatatcgaataaaacttttaccgctgtataaaaattacaaggtctttggccattcagcagcggagtcgaatgggaaatgggaaatggcaaatgggaatgggtgggtctgagatggggtagaaggaaaagaatttttactttcgctttctgcagtgggtccgtccttgtcctagccggctcgccattaaacttttcacgaaccgaactgggacagtgagaagtgtgtaaaaaatctagtaacaacagaaaaagatgaaagaaataaatataaaagaattacaccaagtttgtcagtgtgtgtgtgagtgagtgtgtgtggaaggggcccgtctgtgtctgatgttgctgctgtgcacacatgcacactcacacacccgaacacttacacacacctagtcaggacaggacatatgtatgccggaatggccatacccgtcagtatgtctgtaatggccaaccgtctggccatttcatcgtacacgtgagtgtgtatgtgtgtgtgtgtgtgggctaagagcttctgattttcctatatacaattataattttattgtatttactatttttttcgtttctttggcttcgtattgaactcactcacagacacagaggggcaatgcatgtggcaatgtggcaaggacaccaaggagggtcaaatgggatgggtcgggatgagcgaggcggggggaggggcaagcgaaggggggcaggagagtctggcaaatggaggtcaacgactgaaactagtactaatatgtgcaagcgtttgatagctccattcgtttgtgctaatgcagaaagaaataaaacacaaaaacgaggcaacacataaaaataagaattccgtagataaaagaaaaagttgctttggtccaaacccaatcgtgtgttagtgtgtgtgtgtctgggatgtctgggatgcttccctcaccgcagttaagtgtgtgcaaataaaccatgtgtctgctgtaatgttggacctgttggcaccaatgatctatgtggctttaagcactattgcaccttttttattgtgtgttttcgtttatgattagcccgattaatgttgtgtcggcatttcgcagtggaacgaatttattaattgtcgggggattcaatatgaactttatcaaattatctaactatggtctcatgtatgggcaatactattttaaacaatgaatcgattttcagaattacagttatataataaataaataaaaatatgtaaatcctttgataattttcctagtgttgaaatatcagtgatgttatgaatgatgttgttttacaacactgaaatgctaatgatgtacgagaaaaatataattataaataaaataaaaaataagaaagataataataagcaactttattaaatactttctaatttataaaacaagatgagaatagtgacacagaagcgttcaacaactaaacggataggaaaataactttttaccataaatacaatcaaaaagtattgcatacattaaggggccaataaaaccggtttcctgtgtttgttaatattgcaattcaatataaacttggtagataaaggaaatctaactaaaactctttagttatataaaatttacattttttcaagcttattttacaaaccaagtatcatatggacaaagtaatatttgaatctaaactcggaggtaaaaaaattaaataaaaaattaaaaatattaatttttgatggaaagcaaatttaagtaattgctaacgcagtgttaggaggtaaataataaaattacataagatattaatgttatacacaatatctatcactcctgaatattattataaataaatatgaataaatactttctcgtaaaatatttcctgctcttttgtataaaaaagttgttaagttgttatttgaaggacctactaagatttgtacttattaatttataaaatgtggcaactattcaaatacacaaagaactgcacttatattgttttccaaattgtgtaaaaataattcgtttttgttatgtagaaaggtaaacaataaatcttcaaaactaatctctcgaaaaactttttatgtttggtttccgatttaaataaatattttttgattatttaatattttttcttgtgtcaccaattcttcaagttgtgtttaaaacactcagttaactgttattaattaatgcagaactaacaattacactttacggattgctcaattcaccggtgaaatcaaatactaaccttttagttatcttccgggggcgaaaatggatcggtgccttcttccagcgaaggcgggagaaattcggtgatagcgcaactatttgcagcagttaaattattcttatctcgaccggcgatgtttttaaatcactttacttatagttcacatggatttgaatttattgttttcagttaatgttgttgttcatttgaaagtataacatcactcggtcaatcacaatcgaacactgtgctcgcgatgcggcgtgatgtttaccgctgctgtggcgtgcgaattttagcggcaggacatgcggtgcggtgcggtgcgacctctctctcgcgctcgtcgaaggatattgtgatattgtgacgctgcgtcgctgtgacgtggatgtgcgaacctgagcggctagcgtgcggcgacaaactaccgcggcggacttgagtgaattttgattttagcgcggcgaatttccgcacggcgacgacggcggcgacgtcacgggaaatttaaagtcgcacgtccacgaaatgcggcgtttcgttctcactcacatacacaagcacactcgcagatatatgcgtcctgcagtggtggttgtgtgctggtcagttggtctgccttggtattagtagttttgtagttgtcgtttttgtttctttcacgtgtgcgtgagtcgctctctctcgctccctctctcggactctctttcgcccgctctctttcgctctcactgttgcgaaattcgcggcctttttcggtgacagccaaatgtacaatgattaataacggtcaagacggcggcgaagaagtcctctcgctttggctgccccgttcgcaatattcgcattttggcattttcgcattttggccggcccaaccacaggccagtgtccactcacacacacacatatcgagcacacatactaacacagcacatcctcccacacacacacacacacacgtgcggacacacagctgtgtgcaacgaagacgacgcaatactcgtgctaggctttttgagattgagagacgcacatccttttcggcctcctttcttgcgcccacgtgtgtgtgtgagcacagagagaaaaatcttgataccttagtaaagataatgttattaaatttggtaagaattcgaaatttagtataataatttagcaattttgtatctcttagttatgtacatatattccatgattataactatgaaaatgaaatttcatacaaataaacgaatagatgatacgatcgcttgtgatgaaaagtatatattacttttctgccaagcttatatttccttgtattctgtattagttttaggtaaaatct

SEQ ID NO: 32042 - DNA, 2606 bp, DROSOPHILA
agagaggtcgcaccgcaccgcaccgcatgtcctgccgctaaaattcgcacgccacagcagcggtaaacatcacgccgcatcgcgagcacagtgttcgattgtgattgaccgagtgatgttatactttcaaatgaacaacaacattaactgaaaacaataaattcaaatccatgtgaactataagtaaagtgatttaaaaacatcgccggtcgagataagaataatttaactgctgcaaatagttgcgctatcaccgaatttctcccgccttcgctggaagaaggcaccgatccattttcgcccccggaagataactaaaagacgccaagctgttcgacaacggcctaaagttggatatttccagctacccccacatgaacatccgcatgggcacaaagggcaagcgtcccctgcggagcctgacgccccgcgacaagatccatgccatccagaggatccacgatggcgagtccaaggcctcggtggccagggacatcggcgtgcccgagtccacgctgcgcggctggtgcaagaacgaggacaagctccgcttcatgtcccgccagtctgccacggataacctctgcgccgacgccctgggcgataagatggatggaggaggaggaggaggtggtggagcaggcggcggaggtcttctgggaccgccggagaaacgccagcgtttggacggcgccctgcccctgaacttctccaacaaactgaagttcgatgagctggccttcaagcgatcccctctgaatggcctggactacagtacaaacaagaatctggccgatcttgggtacaatgggctgcccgtagactatgcggcctttaatggcggggtcaaggccaaagtgtttggtgccgatatcaacagacccgccgccgatccctccctaaatgcaattagtccgctctctagcttgacgcacctttcgggtctcacgggcatatcacaatccccgctggcgatcagtttcaacgagctgaccacaaacctcaacttgctggcccagctgaatcccggtctggcggccatgtcgggtctaaacagtttcccagcgggcgctggtaacctgaggaccccgaagcccagtggccaaacgccgctgcaggtgcagagccccaggagcgatagtggagatcgatcggcgcagggattgtcggtaaagaactgggccaaacagaagccgggggagggccagggcagcctcaatctgagcatcaagaacgagggcaagggaggcgatatcaagagtcccagtccttcgattgctccttcgcaaatgggcgggcccatgacgctctccaatctggccgaagatcccttgctctactggctcaagtcgcagcagaccatgttgggtctgaatcccctttatccgcccacaattcccatgggcgtgaccagtccccctatcagatcttccacgccgcagcacatgagtcagttggcacagactccgccgataccctcggctccgctaacaccctcgtccacaccgtcgggcagtctggacgagaagaacgcggcgtggtacaactggtgcaaggcgttcggtgccagtctgcataccctgaatcccaatgccgccaccttggccgccctgcaagccaaccaactgcagcagcaggtggccaccacggccgcagaggggggatccatgggagatccctcgaacatactgtactcccatctcacgaaagagactgagacgccgtcggtgagaagtttgtcctccaacgaacagaatcccgaggctgacgaggccaccgaaaccgatctcgatggcgaagtggagccggaggcatccgggaaaccggaggatctctcagccgccggcaaagtgatgaccccttcgcaaagtcccattgcccattcatcaggcagcaggagtcccgaaccaaaggcgaagaccaaaaccccagagaccacgaattccacaagcgaatgcaagaagatcctagacaatatgctcttcaagatgggcggaatggaggccactggtccgttgatgccggaacagggatcctccgaatcggagggcagcttccaggacaccagcaatccgcatacgaacaacaacgatgtgagcgccagcaataacaataacaataataactcaaacaaaacggacgaggaggagaaggccaagtatctggactgcacggcggacgaggatatcgaggccatccgccatggcgaaaagttcctgcagtggctggagaattgcagcaatccccgcgtgacggccgtgcagctgatgcaacttcgtttcctaatagccgccatcaagtcgggcaacgagacaccgatgatcgagaaatccgctttgccggaggacagcgaggagcacgccgcggaggaggagggcaagccaggacccggtgtcctggctacagatgcaaatgcagataccgccgagggctcgacgaggtgccatgtctatgcgccggccgtctaccgatcgtcggccaccctactcagctccctgttcttccctccctacgaatttgtacattgtgacctcgacgatgaccccgacgactgccagatcacgggcgagtaccagcagtacgacgaactgagctccagcagttag

SEQ ID NO: 32043 - protein, 743 aa, DROSOPHILA
MNIRMGTKGKRPLRSLTPRDKIHAIQRIHDGESKASVARDIGVPESTLRGWCKNEDKLRFMSRQSATDNLCADALGDKMDGGGGGGGGAGGGGLLGPPEKRQRLDGALPLNFSNKLKFDELAFKRSPLNGLDYSTNKNLADLGYNGLPVDYAAFNGGVKAKVFGADINRPAADPSLNAISPLSSLTHLSGLTGISQSPLAISFNELTTNLNLLAQLNPGLAAMSGLNSFPAGAGNLRTPKPSGQTPLQVQSPRSDSGDRSAQGLSVKNWAKQKPGEGQGSLNLSIKNEGKGGDIKSPSPSIAPSQMGGPMTLSNLAEDPLLYWLKSQQTMLGLNPLYPPTIPMGVTSPPIRSSTPQHMSQLAQTPPIPSAPLTPSSTPSGSLDEKNAAWYNWCKAFGASLHTLNPNAATLAALQANQLQQQVATTAAEGGSMGDPSNILYSHLTKETETPSVRSLSSNEQNPEADEATETDLDGEVEPEASGKPEDLSAAGKVMTPSQSPIAHSSGSRSPEPKAKTKTPETTNSTSECKKILDNMLFKMGGMEATGPLMPEQGSSESEGSFQDTSNPHTNNNDVSASNNNNNNNSNKTDEEEKAKYLDCTADEDIEAIRHGEKFLQWLENCSNPRVTAVQLMQLRFLIAAIKSGNETPMIEKSALPEDSEEHAAEEEGKPGPGVLATDANADTAEGSTRCHVYAPAVYRSSATLLSSLFFPPYEFVHCDLDDDPDDCQITGEYQQYDELSSSS

SEQ ID NO: 32044 - DNA, 2776 bp, DROSOPHILA
taaacatatcgatttctgctcactgcggcaacgaaccattcttatatagcagccatataatggctttcgaatcgcatctatttaaatctttagttattagtcagcataaaatgcaacaggttggcattgcatcaaaaacacattaaaggctctattcgggtcgccatttaagccctttaaagtggcttgcaaaatacgcaaactgggagtggaaaggagtagttcatttgggtgcgattctatttttattaccgagcagcaacagcaacagactaattgcgggttaaaactgagcacggcttttatatgttccaagaatccgtggcacaatacggcgcatggtccgctcttctggagcacgtgtttgtgttgttggatcggagcaggagcagcaaactattgtggcaccatatgtccgcctattatggaaatatttgttgtcatgctgccagagaggagtagcaattaaagcagctagtcagctgtttatataatcgttcgattaagtgcgcaatttgcatttaaatgtattaatatacaaatgcttttataaataaataaatttacttagctataagccagtgtttttgtcattaacatgtttgccaaatgatttcaaatatttaagatgagaatatttaccagctccgttgaacaaagctctctgtgtggagaggacatgcgcaggtgtgtttataccaaaagcttgaaggactccgaattgccaaacatataagacaccaactggccaacttcaaacgtcaaacagttataaaccattatcgtttcatttcaaatcttcttagtcactttatttataattttcatgttgaaaaaaaaatatgaaagttatatgctatgctatgttaataaatactcaaacaatcgtttgatttaaagcgcgtttctggcattataaactactctagcctaaagacaagtccaatgccagcatatgaacctctattgcacagccctccatcatcgatagtctagggatttagatgtagtcatcattgtcggggccgtgcaatttggtttcttcgctctcccgctcccactcgttcatcttggcctgcataatgaggtcctggaaggatccgtactcagtgttctggcgcgtcttggccgttagacccacatctccctcgtcgtcgtagaaattatcggattcgtaatcagtatccctggccatgtcaagatcgggataatcgtgctcctcggcgttgcgtggaattccgtgcttcagatagaatgagttcagcaggctctcgatcttccatgatggcatatcggaaaccatcttgacggcgatcttacggcgcggcctttttagggtcttgtgtggcctgtcggccagttcaaagttcaacgaggtcttcagcatgcgcttggatgccgtcagcttcttcaggatggatctgtagagtcccatgaactgatcgggttgtggcttggccttcggcagtgcctttgggttctccagaatgaatcgattgagcagctccttagtgccttgttggtccttttgcgattttagcagttcaactgaagaggaaataatgacaaagttagtgaagagttcaaaatgagctttaatctaagtcgcaacccacctttttcttggcttagtccgagtgtgttcttgaagacgccccaatcgtccttgggcccagtcttggctggattcttctccgcgctcttgatgtagagagccaggcagctttgctggatggccgccagcaaaatcagaatgatagcttttcccaactgcatcttcagatcgatgtgcttcgttcggtggttgtggcgaatgtgatgtcctgtgctcctgcgtagctacccttatatacctcgatcctttcggactgatccgcatccgcgttaattgacataaccgcacatcagcgttgcgtggctgcgataatcagacaatggctgcaaaggcgcttgacactcgagacatccggggcgcctgcgcaaggaccacttttggccaaggagtcagcccaggacgacatgtgcttgattgaacctccgacgcgcagcgcctgcctttgtttttctagggaacacttagcgcgagccgcggcaattaaacggcaaactgagcgcacacaaaaattagtgcttacgcatcttgcctcagacggcggccaggtagaccgcgtccagtcctcagtccttgccacaggaccaagctggacgaggcagagcaaggcgacacccaacgacaggcgactactagcggccaatgtgggaatcaaagtgcgtaattgagtcgcttaaaagcgccaaatggtttcatgaatgtaccgctctcaccaggctcaccaggtagacgctcgcctttcaaatgcgaaaggaagtacaaataaatcctagcgccagccataaacggatcaactgcgccgatctcaatccgctggtctccgctcctgctcatcgacaagttctgcgctcgctaattattcctgaatgcgggttttattgatgcaatataaataatgcaaatgcaatttgtggtgcatgcagacaagggggtggtccctaaaaaatgtgccatctaagtaagccattgccactgtcgctgccactgcagctgcggaagaccagcattgagttttcgacgggtaattatgtaatatgcataatgacaataaataaagttagtcgaaatatacatatgtatgtatgtaggtaaccagggaaaagattaggttgaatgtggaattagctttatttaaattaaatcaacaaaaaatgcacaaggtga

SEQ ID NO: 32045 - DNA, 708 bp, DROSOPHILA
atgcagttgggaaaagctatcattctgattttgctggcggccatccagcaaagctgcctggctctctacatcaagagcgcggagaagaatccagccaagactgggcccaaggacgattggggcgtcttcaagaacacactcggactaagccaagaaaaagttgaactgctaaaatcgcaaaaggaccaacaaggcactaaggagctgctcaatcgattcattctggagaacccaaaggcactgccgaaggccaagccacaacccgatcagttcatgggactctacagatccatcctgaagaagctgacggcatccaagcgcatgctgaagacctcgttgaactttgaactggccgacaggccacacaagaccctaaaaaggccgcgccgtaagatcgccgtcaagatggtttccgatatgccatcatggaagatcgagagcctgctgaactcattctatctgaagcacggaattccacgcaacgccgaggagcacgattatcccgatcttgacatggccagggatactgattacgaatccgataatttctacgacgacgagggagatgtgggtctaacggccaagacgcgccagaacactgagtacggatccttccaggacctcattatgcaggccaagatgaacgagtgggagcgggagagcgaagaaaccaaattgcacggccccgacaatgatgactacatctaa

SEQ ID NO: 32046 - protein, 235 aa, DROSOPHILA
MQLGKAIILILLAAIQQSCLALYIKSAEKNPAKTGPKDDWGVFKNTLGLSQEKVELLKSQKDQQGTKELLNRFILENPKALPKAKPQPDQFMGLYRSILKKLTASKRMLKTSLNFELADRPHKTLKRPRRKIAVKMVSDMPSWKIESLLNSFYLKHGIPRNAEEHDYPDLDMARDTDYESDNFYDDEGDVGLTAKTRQNTEYGSFQDLIMQAKMNEWERESEETKLHGPDNDDYI

SEQ ID NO: 32047 - DNA, 5325 bp, DROSOPHILA
tgagtgcctacagcgttttcaacaagaattgcgagagtatagacggcaccttgaaggccgagcagttcgaaagggaaatccgctatggatccggaagtgtacgatagtcttacgagtatatcatgagataatctaaatactgtagtctagacaattttataatatattcactaacttgtatcttatgtagctatgtggctgtaaaagtatattttattatgtgttattggtttctatccttatcttctcaagagatttttattaaacatgacatgttgatcttaccttttgttaatcatacaaatgtagccgaaataactacagtatactgttctaaggtctctatctttttattggtaatgtataaatctatcaattctcttcgaacgattttcacaacgaaacacaaatttaagtttcgggttttgctcaacaaccgtcacaattttcatcaataaattgattaatttaaataagtgcagacaatatttagataagattctatttattagctaatcttacagtcagcgatgtacctcacaacaggtatttatgtacacttatacatacacatttccatgcgtgcttttcattaaatttagtaaggctgttgaaatattttctgtagagttaatgtttgtaggccttagtgcatagatttgtatggcaaaggataggaaaacaaatatcataacgattaaataactatatccgcctatttatccgtgcatgctttagtgaacattcagtgcttcattgatcaattccaggatctctttagtttaccaactacatctatgagtattgctatgtacaaactaaagtagggactattctactgtactactagatggggtcctgtaacggtcttgttcgccgggagagtgaggaaaagctttggagtaacctatttccagccacgaagtcaccaggctcacatgtgaaactcctgatcctgagccagcaggagctccctggcatgggaacagtactccgcgtgctagcacttcggcaggaaggactttctggagggcagcaggcataggatgctcaacgccataaccatgtgccagatggagtggacgatgtggtagttttgcttagtctgcagaaaggcatagcacaccagaccggcgaccacgagggtcagtccaaagggcagccacaccgataggtatctccttgaagggaacagcttacgagacttggcacatcggaggccccagctggtcgagatcagacagatccccgtcagagctggagccaagaacacccataagctctgtttattcagctccgtaccaaaggccagcagaatggctccaaacatgtgcagtagtgagacgagttccgttcggacatgggccatggccaccagggtcacccagatgctcagcaagccgcagtagaagtcgcagaactgtagcacaccgatcttcaccaggcagaagctgtactcatcctcgccagcgtcgcaggcgtgatagaagatcgagaagaacatggcaaagaagtagattacgccctcggtgtagtagcgccttttgaccgccatgtagatgctcgggaagaatagcaggttgcttagcgtaagcagcagggtggccaacaggatggacatgttggtgggcacctgcgaatcctccgtgcaatcccaaccacgatatcccttcgagcagacgcacgtggagaagacgaatccgccggacatgtaatgatagcaccttccaaatcgtccacatcttccggccacacacggactggaggacaccgagaagaccaccgaagtgttgcagttctccaccgctacatgctgctccattgccgccttgtggtgttccacgaagagtcgtgtcatctgcttgaaattggtactgcacttgtcgtccatgatgcactccttcaccttgagagtttcggtttcgttcatcgcctccaggcaatcgggagactgcaagcagctggtgtagcgagcaacggattcagcacagtcacacggggaacgcatatcagccaacatgtcctggtgcttcctgatgaactccttaacgctctccatgatggacactcgtgcggttccagatccgtggcagaacagccccatggtcacatacctgcagatgtgaaatttgattagtattaagttatgatttcaagtcatccgaactcaccatcgaccactctcggggaatggcacgtggactagacccatgctctccgtgttgttaacaataatggaggcctgcattagccgctgcccgtagcggcacttgtccggatactccggctctcctggttcacccaactgcatgcagaccacaatctgcatgctctgattgctggtcgccgagacggcgggcaccacctcctccttgggatccccgatcagtcgctcggccaggatgccgcccaaatctggcggctgtgtgggcagactcatcttcaggcttgcgcggtgcgcctctttcatggaaagagcgaaggtaagggtgcctccgatatcggacacctggcccagatcaaaggcgaatcccgaatgggttttggccgtaagattgagggtttcgggcaccgttccgtttacatccggccgtagatcgtagtcaaacatgaagaattcgcggtaagtttggcgcaacagcgagtaaaagttcattcgacggaacttagtgggttcccagggatttgcactggaactatttgtgctgttttgcacggtcttggacttctgcatcgcgttatctgagtcctcggtaatataatcaatttgcagtacatacgataagctatgatttgtatgactattgttggcctgagaatgcatttccgattcatccgcctcgttgacgaaggtcaatagggcatagtgccacgaattgggctgcacgccaaactgaatagagatttctgtcgtctggtttggccggatgatggtgccgtgaccatgattgtgatccgtaccgcccagcggatatccattggctcgtacatggaaacccactggcggacactcgtcgcacacttggtcgaacattatccgcgccgtagcatcgcctatatcgtctggcacatagaatctgtaaatgatttcattgtttgcggtcggtgtgctgttgtggttttccgtagtatttgcaaactgagcagctcggctggatttgccctccgcaagggatttggatgcaactttcagtttctgctgcttgggcggaatagagcgcagcggcctggaggtgttaagtgcatccttggttatattggctccattcagttcgggcaaaacatgacttgttaggttgtcctcgtgctcctgaccattatttatgattatcggacggaatcgggaaacggacatctcggcggacagcagagtgtcacacgaagcagcgagtcctgcaaacggaaattaaattcataaatatgcatatgcagtctaaacacaatgccgaaatcatcacaatcggatttttgcatattcaaaaggcttttatctctggggtaacaaagtcaatttttaaaaatattcaaaagtctaaataaaatttatcacaatagaaggattttttttacgttccgctgcaatgtcaattaaatatttgcatattttaaaggaagtctgtaaattgaatggagaaataccttgttgttcaatgcggtcgttattgggatctgaccaactcacaaacgccaccgcaaaccagttgcctatataaggtccttcaatggtaatacgctgctgctgctcatcggatagaaactgtaggtcatataccttaaatctgaaagatattaaattgagttcgttaattttcgaagagtgtacacaatattatatacctctgatccttggtaaagaagttcttgggaaaggttatgttctctggacttatcacgggataactgctcgccttcagatgcagcgtgacatccttgggcttacacttgcgttctaacaaattagttgtactaagttttaagttactctaccttttgtatttgcaatactcacgaaaggcacttttgggatcctcgaacgccttgaaagtaaagtaggcagttcgcgaatcgggtggaacatcaaaatgcaggatggacacatccttgtaggatgtgtactttagcagcgagttcgacggtagtcggacaaccagttcctgatcctctggcaatttgagttcctcaatcggcacatactttgtgtactcttccgatggattttgcagcacaggcacactcgagtccacaatgagacggtggtcgactagaagtaacatgaagaccaccagaggactgaagttgggacgatgtgtgagtatttgaatcattgtgtttctacaagtaatggtaactcctggaatgaaaacaattggcattaattagttgagtaatacgctgaaaaagtgcacatttactttaagtatgatttaaaaagcatccttctcaaactttcataccagtaatttgtttttatttcgcgtgcaatttccaggagcaagttggctcaactagaatgggctacatacaggggatggctttgtgcccacggacaaacccaaacgatgcggacatggataacatataatgctgggcctacggatgagcataaatgtacatattcccaaaccccaaactttctggcacaagtacagacataaagcctttttgttagcttgtgcaagtaaattgcaccgttgcaaaaatgccaaattccggcccatttgtgtggcgcggccaaaaccaatgtagattcggtgctatggagaacttgtccggcaaaagccgaaaataaaaaacttctgcactcgatgcggtgacgctgggcctgaactgtgcattgttggctaacacctactataatttatggccgacttgtagcccccaaagcactaggagagctatctcgaccagactgcagactatccgtgggcttacctcatgcccaccgaaatatatagatactccaccacataatctgtcacataaaaaggcatattgaccaaaaatgaacacaattatttttcatcttgatttatccatacctgttgcagttctacatgcaatttgtttacactcaacaagctaaatattagggccgaattctatattgtttatgagctatatgcatctatattatacatcgctttgagcgagcttttaattagtcaacgtatgtgttttctgaatgagagtcgcgaagcaactgacgcatgctggttcggttcgtagaattcgtgcttgacctaagatcttatcagtaccactcaattctcttatcgaactgttgtggaaacaaacatgctcttatcagtttagctttgagctcat

SEQ ID NO: 32048 - DNA, 2842 bp, DROSOPHILA
atgattcaaatactcacacatcgtcccaacttcagtcctctggtggtcttcatgttacttctagtcgaccaccgtctcattgtggactcgagtgtgcctgtgctgcaaaatccatcggaagagtacacaaagtatgtgccgattgaggaactcaaattgccagaggatcaggaactggttgtccgactaccgtcgaactcgctgctaaagtacacatcctacaaggatgtgtccatcctgcattttgatgttccacccgattcgcgaactgcctactttactttcaaggcgttcgaggatcccaaaagtgcctttcaacgcaagtgtaagcccaaggatgtcacgctgcatctgaaggcgagcagttatcccgtgataagtccagagaacataacctttcccaagaacttctttaccaaggatcagagatttaaggtatatgacctacagtttctatccgatgagcagcagcagcgtattaccattgaaggaccttatataggcaactggtttgcggtggcgtttgtgagttggtcagatcccaataacgaccgcattgaacaacaaggactcgctgcttcgtgtgacactctgctgtccgccgagatgtccgtttcccgattccgtccgataatcataaataatggtcaggagcacgaggacaacctaacaagtcatgttttgcccgaactgaatggagccaatataaccaaggatgcacttaacacctccaggccgctgcgctctattccgcccaagcagcagaaactgaaagttgcatccaaatcccttgcggagggcaaatccagccgagctgctcagtttgcaaatactacggaaaaccacaacagcacaccgaccgcaaacaatgaaatcatttacagattctatgtgccagacgatataggcgatgctacggcgcggataatgttcgaccaagtgtgcgacgagtgtccgccagtgggtttccatgtacgagccaatggatatccgctgggcggtacggatcacaatcatggtcacggcaccatcatccggccaaaccagacgacagaaatctctattcagtttggcgtgcagcccaattcgtggcactatgccctattgaccttcgtcaacgaggcggatgaatcggaaatgcattctcaggccaacaatagtcatacaaatcatagcttatcgtatgtactgcaaattgattatattaccgaggactcagataacgcgatgcagaagtccaagaccgtgcaaaacagcacaaatagttccagtgcaaatccctgggaacccactaagttccgtcgaatgaacttttactcgctgttgcgccaaacttaccgcgaattcttcatgtttgactacgatctacggccggatgtaaacggaacggtgcccgaaaccctcaatcttacggccaaaacccattcgggattcgcctttgatctgggccaggtgtccgatatcggaggcacccttaccttcgctctttccatgaaagaggcgcaccgcgcaagcctgaagatgagtctgcccacacagccgccagatttgggcggcatcctggccgagcgactgatcggggatcccaaggaggaggtggtgcccgccgtctcggcgaccagcaatcagagcatgcagattgtggtctgcatgcagttgggtgaaccaggagagccggagtatccggacaagtgccgctacgggcagcggctaatgcaggcctccattattgttaacaacacggagagcatgggtctagtccacgtgccattccccgagagtggtcgatggtatgtgaccatggggctgttctgccacggatctggaaccgcacgagtgtccatcatggagagcgttaaggagttcatcaggaagcaccaggacatgttggctgatatgcgttccccgtgcgatgaacgaaaccgaaactctcaaggtgaaggagtgcatcatggacgacaagtgcagtaccaatttcaagcagatgacacgactcttcgtggaacaccacaaggcggcaatggagcagcatgtagcggtggagaactgcaacacttcggtggtcttctcggtgtcctccagtccgtgtgtggccggaagatgtggacgatttggaaggtgctatcattacatgtccggcggattcgtcttctccacgtgcgtctgctcgaagggatatcgtggttgggattgcacggaggattcgcaggtgcccaccaacatgtccatcctgttggccaccctgctgcttacgctaagcaacctgctattcttcccgagcatctacatggcggtcaaaaggcgctactacaccgagggcgtaatctacttctttgccatgttcttctcgatcttctatcacgcctgcgacgctggcgaggatgagtacagcttctgcctggtgaagatcggtgtgctacagttctgcgacttctactgcggcttgctgagcatctgggtgaccctggtggccatggcccatgtccgaacggaactcgtctcactactgcacatgtttggagccattctgctggcctttggtacggagctgaataaacagagcttatgggtgttcttggctccagctctgacggggatctgtctgatctcgaccagctggggcctccgatgtgccaagtctcgtaagctgttcccttcaaggagatacctatcggtgtggctgccctttggactgaccctcgtggtcgccggtctggtgtgctatgcctttctgcagactaagcaaaactaccacatcgtccactccatctggcacatggttatggcgttgagcatcctatgcctgctgccctccagaaagtccttcctgccgaagtgctag

SEQ ID NO: 32049 - protein, 794 aa, DROSOPHILA
MIQILTHRPNFSPLVVFMLLLVDHRLIVDSSVPVLQNPSEEYTKYVPIEELKLPEDQELVVRLPSNSLLKYTSYKDVSILHFDVPPDSRTAYFTFKAFEDPKSAFQRKCKPKDVTLHLKASSYPVISPENITFPKNFFTKDQRFKVYDLQFLSDEQQQRITIEGPYIGNWFAVAFVSWSDPNNDRIEQQGLAASCDTLLSAEMSVSRFRPIIINNGQEHEDNLTSHVLPELNGANITKDALNTSRPLRSIPPKQQKLKVASKSLAEGKSSRAAQFANTTENHNSTPTANNEIIYRFYVPDDIGDATARIMFDQVCDECPPVGFHVRANGYPLGGTDHNHGHGTIIRPNQTTEISIQFGVQPNSWHYALLTFVNEADESEMHSQANNSHTNHSLSYVLQIDYITEDSDNAMQKSKTVQNSTNSSSANPWEPTKFRRMNFYSLLRQTYREFFMFDYDLRPDVNGTVPETLNLTAKTHSGFAFDLGQVSDIGGTLTFALSMKEAHRASLKMSLPTQPPDLGGILAERLIGDPKEEVVPAVSATSNQSMQIVVCMQLGEPGEPEYPDKCRYGQRLMQASIIVNNTESMGLVHVPFPESGRWYVTMGLFCHGSGTARVSIMESVKEFIRKHQDMLADMRSPCDERNRNSQGEGVHHGRQVQYQFQADDTTLRGTPQGGNGAACSGGELQHFGGLLGVLQSVCGRKMWTIWKVLSLHVRRIRLLHVRLLEGISWLGLHGGFAGAHQHVHPVGHPAAYAKQPAILPEHLHGGQKALLHRGRNLLLCHVLLDLLSRLRRWRG

SEQ ID NO: 32050 - DNA, 6236 bp, DROSOPHILA
ggcttccttcgtcttgttgttgccatttaggcccggtcttttgggcggtttctttgagagaatctggttgtccgccttgttggctatgtagcgagcgcgagcagccggaggcgccataatccggactttctgagaaaattaccggcggaaaagttgcaaagtattgtatattatcaatattatgtggcgcaggttatcgattgcatcaaagctatcgtggaaacctgcatttcagttggggtattcttgtccctagtaatgtgccctatacaccaactcagatttgttatcgatatatgtgtagacgtgagtatagtaacggctttttgaactggatgtgtgtcaccattgtaatttaaaaagacaacagttttaatattggtgtaaaaatttaataagaaacattaaagaagaaaaatatacaaatacaaaaatgaacaattcattaagctgagttccgaattggtaggtaatgaacgataacaatgcacactgaaatgaaagaaacttgaggtagttaaagttcttccattggtagaattacaatacttaccaattaacgtgcacgtaaacatagcaaaagtggtgttgcaataaggctgcagcataactcccatcaagtttgtagctgcaatgatcccaagtcttcccagtgacatgcagaagctaactgccttggatctgatcggaaaagtgaataattatttcaatattaatagaagtgtagatcatttacctcaaatgtgtagggaccaaatcaacaatggcgccaatcataatagaaatcgaaagcccaggcagaagaatgtaaaggcaaaagagaacaaggactcctgttggactttccataaaatgcaataggactccacttaaagttgcaactgccagagcagctaaaagtacgtttttacggcccaaaggattaagtattagtccttgaatcgagaatccaatcagaaatgcgaaacctacaacgaggttgtcaatataggttttgctactaataggatcggtgcagtcctaaaattaaaattaagtattaagattggttacgtaattttaaaatatgttcataattaccaaagtttctgtaacattgggttgttctacgggtacgctgagaatttcgcatactgttgaagagttattttcggcacctgatgaccgattaacaatttcgggaaaccaaagctgcatgccgtttgaactatgtaaaagattatgtaaaagattatttattaaagaactattaaggtctaacaccatttaagattacctgaaaaacattccgaataatgccaagttgcaaagaataaaattaaatccatgtggcttgtggaaaagtggaatagtggccctgcaaattttggataatataccacatccctggctttcgcccaacaagttttcgcccactggatcctcggacttcagtgtaaattcatcgcagctcaaaacttgttgtatggattttcctctgttaaatttactgatccaagccacagcttctatggcttcgttgttcttttcttgggacagcaggaacttggggctttcaggataatagagtaatatcaagccgccaataaatcctggtagcagactaactagcaatagcaaacgccatggcctaaacacaaaatctcccatggtgatggcccagttcgaggaaagtaccaaccaagcagttgctgtaagttcaaaagaagttagttagtaaatcaattgcatccataagtaatcatgcatacctggaacatatatggccgtaacactgacgaacatcgtcgaatagttaattgccacggcgcgatgtcgtggtatattgaattcacttagatatgcatagagtgctgctgacaccgcgccaacactgtattcatatgacaatcaaaaacttttgcaataaattacgttttagcgctcgtactcacctaattccaacgagaaggtttataatgttaaatagccagacgctggtaacaaacatcagaacgaactggagggcattgctggcgaagttaccatagagtaagacccttcgacgacctatatcatcgctgatgtatccccatatgtaggtcgataggaagatacctgtgcacacaacacgaatttccattgtgatcgccgtgaataccagcccactcacataacgacttacctgtaacactagccgccatcatcacgcccttctcggcctgtgtggtttcaaattcgcactgcgaggcgatcacaatgatactcatggcctgttgggctgcaacggatgtgatggtcagcagtccgctgacgagcaggagcacccactgcgttttgccatagcctggttttgttgttatttattttttgtccaaaacccagttaatagcaccagatacgtcatttgagttagttacctatcttctccagcaccatgtcgtagtcccacacattgggaccgagggtattgctctccagtgagctgtgcatcttgacatacctgagataactggcgactggtcagtaagttagtgcaacacttgcttttaagcattgtattctaatataaccccccctgtagaacaaatgagcgacatgtgaaccgcaaaccagttttgagattaaggcatttgaatttgattcaaattaaacattttgctgagagatctcaggcacatcaatgaattcgattttatatgcaagctggttggagaacatgtgtatgatgccagtggggtctcatcttgctatctaagcataaaaacactcattgaaatcgaatagttcagttgctatagtattcaaactgaagggttttaaaattcgttggatactttaaaataaaatggaacagttaagaatatatgtatatactctctcagcagaacaaaacctgagtgaatttccattgtaaaatgtggtttggattttcgtccggttttgtagagggagtgccagtctcttttttattgtatttcttagagaacaaggttatagaaaaaactggcaacgaatttaatttagcaactaatttaactttaggcaatataagataagataaaataatatagccatacatactttattttatatgccaggttattcggttccatgaaaatactgattttcctaaacattctaatttattttggaacttaaattaaacttagctacttaaactatagtggccaatcttaaataggcaacagtaacgtcagacttgcacatactgtaaagggaaatggaaatctttagctttatatgtatgtacatatagtaactcttaggtgtcttacccagcacaaatccagagaataccccgaaagttagagagcaataggattccaggagcactccgatgatattactaccgaaaacacttcccgtgcgtcccagcatcaggcaaatgcacaccgcttttccgcgcagatgggtgggcaccaaatcgacgactgctccactcagaatggagacacaaagtcccggtagtaccagatacaagcagaagcaaaccactatggccacctcgtcctttataaagatcaatgctattgcacaagctccagctagagttaatccaattgaaatcgaggccttgcgaccaatcgtgtttataacaagacccatcaagatatagccaactattagggccgatccataggtaatggtgtctatatagctcttggtatttatgtggtcgtcgcaaatctgcaatgtgaattgaagaggaaatatacaagatgtatggcctacttatgagctgtttacttactttattggatgcattcgcttgcatttgatctattgacgcatcaataacttggcaaacagtcattgaatcgtccgccgcatttgagcccaatcgattttgaatttctggataccaaagacccatgcccgaagaactgttttcaaaagttatttcttatcattgaaagccaattgcatattgtgtcattatcactcacctgaaaaatagaccacacataatcgtacagctgatgacgaagttcagcaagtgaggtcttcttagcagcggcaaagtttccttccacattttcttgattgttgtaaaccttaaattgttagttaatttgttagtttttcaactcactatttgattagcaataaaaactcacgctgacttggatatgagcagtatattttccccattcgcgttatcttccgtttttagtttatgcaccttgaattcgtgtaagtgtttgcccgaattcgtcactgcaatccaatcgactgccgcaaaagcctcttcagttttgtgcaaggacattaggatcttgggactctcgggaagcgaccacaacatcaatgtgcccacgacaccaggcagcaagtagcatatggtcagcagtctccaaggacgtaaggagaagccatcggttatactgacactccagtccatcgaaagtattagccaggcggtagctacaaggatcaatttctagtctttaaagtaattaggttacatactatagttattacctggaacatagacagtggacacacccacgaagagactggcgtaattaatggcgattggtcgatgacggggagtgaagaattccccaagatacgcataggttgttgatgatgctcccgcaatgctatttaagttagattgataatattgttagagggagatacatgtgttcgatggttagcagataacgtagttaattaacggaattggtgttctattctaaagtttttgcttcacactagtgaaaggtgtgtacctttgcgttaaggtcaattatatccactttacatccatatataacatctaataccatgcaataaccctagtatttgcgttagttctgtcactaaaagagcacgttgttcgttttaaatcttgctaaagtacttacaaaaatccaacaccgaaacgaatgaacacataaagccagtagttcggaatgacggtggagcataaggataagaaattcccggcgatcgtcgtatagattagcactggtctgcgacctatagtgtcactcaggtagccccaaaagtatgatgaacagaatatgcctgttgaatagttaaagcccacgtgaaatatgccactatggaaacgtgaaagataaggttttactaatgctaattaaaagtacctaccgataaaactggcagcactcatgaccgccttatccattgagttcatctcaaaatcgcactgggatactatggtaatataggacatgcccatggtctcgtttatgaccatcatcaggagaagtcctgcggcaaaaaggacgatccattgcactcgcccgaatcctggtacatatccaattaaaaacaaatatttataaggattcacaaggcttccaggacatttgcactaccaataatctgaagcacatcctcgtattcgtgaccagcactggtactccgagccgattttggcttcgattcaacgtcttgttggccagattccgaactcatagtgatcgcctggattgactttcaagatatttggcattcccgaacctgcgacaaacttgaactgatgaaatgtccaagttgaagtgggtataaaagcagtggtggcagtggcagcagccaagaggttggtttatcagacggcacaataaagataaatgagggtctagatgatattctgtttgtctataaaatgtgtatcactcatatactacgactgggagtcttgggcaaaaaaagatcgctccccttcctcgcccaccggaactgtatcgtttattccgttttttcaattcattagagcaaataatacaaagtttcatgttattctccaccacgttctgtcatatattcgcgtgtctgaacactctgcaacatatttttaaatatatatattaagaattgaaaccaatactatctttatttgggttaataaaaatctataatatagaaaactatgttatctggccttacaaaattaatttattacaaaaaaatagtgtgcaaggtatttaaaaaatttccgtaagaaccctgaggtaaacacttatttgctagagagtgatactatgggacaataacagtggctaaatacaattaagtgcagtagttacagttctttcacaaaaaaatattatgtttaattgttaattgtttaccccttcatgtttacgatcattaaaagtgtgaaaacggaacgccacttggggattaccgcaataaatcccttcacacatggcgacatatatgttctcttgcggggaagacgacaccttgaagcgacc

SEQ ID NO: 32051 - DNA, 1752 bp, DROSOPHILA
atgatggtcataaacgagaccatgggcatgtcctatattaccatagtatcccagtgcgattttgagatgaactcaatggataaggcggtcatgagtgctgccagttttatcgctaccgcctggctaatactttcgatggactggagtgtcagtataaccgatggcttctccttacgtccttggagactgctgaccatatgctacttgctgcctggtgtcgtgggcacattgatgttgtggtcgcttcccgagagtcccaagatcctaatgtccttgcacaaaactgaagaggcttttgcggcagtcgattggattgcagtgacgaattcgggcaaacacttacacgaattcaaggtttacaacaatcaagaaaatgtggaaggaaactttgccgctgctaagaagacctcacttgctgaacttcgtcatcagctgtacgattatgtgtggtctatttttcagatttgcgacgaccacataaataccaagagctatatagacaccattacctatggatcggccctaatagttggctatatcttgatgggtcttgttataaacacgattggtcgcaaggcctcgatttcaattggattaactctagctggagcttgtgcaatagcattgatctttataaaggacgaggtggccatagtggtttgcttctgcttgtatctggtactaccgggactttgtgtctccattctgagtggagcagtcgtcgatttggtgcccacccatctgcgcggaaaagcggtgtgcatttgcctgatgctgggacgcacgggaagtgttttcggtagtaatatcatcggagtgctcctggaatcctattgctctctaactttcggggtattctctggatttgtgctggtcgccagttatctcaggtatgtcaagatgcacagctcactggagagcaataccctcggtcccaatgtgtgggactacgacatggtgctggagaagataggctatggcaaaacgcagtgggtgctcctgctcgtcagcggactgctgaccatcacatccgttgcagcccaacaggccatgagtatcattgtgatcgcctcgcagtgcgaatttgaaaccacacaggccgagaagggcgtgatgatggcggctagtgttacaggtatcttcctatcgacctacatatggggatacatcagcgatgatataggtcgtcgaagggtcttactctatggtaacttcgccagcaatgccctccagttcgttctgatgtttgttaccagcgtctggctatttaacattataaaccttctcgttggaattagtgttggcgcggtgtcagcagcactctatgcatatctaagtgaattcaatataccacgacatcgcgccgtggcaattaactattcgacgatgttcgtcagtgttacggccatatatgttccagcaactgcttggttggtactttcctcgaactgggccatcaccatgggagattttgtgtttaggccatggcgtttgctattgctagttagtctgctaccaggatttattggcggcttgatattactctattatcctgaaagccccaagttcctgctgtcccaagaaaagaacaacgaagccatagaagctgtggcttggatcagtaaatttaacagaggaaaatccatacaacaagttttgagctgcgatgaatttacactgaagtccgaggatccagtgggcgaaaacttgttgggcgaaagccagggatgtggactgcaccgatcctattag

SEQ ID NO: 32052 - protein, 583 aa, DROSOPHILA
MMVINETMGMSYITIVSQCDFEMNSMDKAVMSAASFIATAWLILSMDWSVSITDGFSLRPWRLLTICYLLPGVVGTLMLWSLPESPKILMSLHKTEEAFAAVDWIAVTNSGKHLHEFKVYNNQENVEGNFAAAKKTSLAELRHQLYDYVWSIFQICDDHINTKSYIDTITYGSALIVGYILMGLVINTIGRKASISIGLTLAGACAIALIFIKDEVAIVVCFCLYLVLPGLCVSILSGAVVDLVPTHLRGKAVCICLMLGRTGSVFGSNIIGVLLESYCSLTFGVFSGFVLVASYLRYVKMHSSLESNTLGPNVWDYDMVLEKIGYGKTQWVLLLVSGLLTITSVAAQQAMSIIVIASQCEFETTQAEKGVMMAASVTGIFLSTYIWGYISDDIGRRRVLLYGNFASNALQFVLMFVTSVWLFNIINLLVGISVGAVSAALYAYLSEFNIPRHRAVAINYSTMFVSVTAIYVPATAWLVLSSNWAITMGDFVFRPWRLLLLVSLLPGFIGGLILLYYPESPKFLLSQEKNNEAIEAVAWISKFNRGKSIQQVLSCDEFTLKSEDPVGENLLGESQGCGLHRSY

SEQ ID NO: 32053 - DNA, 4163 bp, DROSOPHILA
agcgggagagctatgcggctacagtgcgcagtaagtggaagtcaatcattatcattaccaagggtgccagtcgataacttagttcatccaatttcaaaattaataacgtacaaaaacatgaaattaataagatttgcatctttgatccttcccaacattccgttcccccattctcacccgaaacattcactattaaaagtcttcttgccaggcatagtttcgcgcgcctccgccaatggccagctcttcgaggaggatgagatcgagcacgactcactgcagacggagaacaacaatcggaaagtggcagccacgggagtggcaagcggtggggttaccaccatcagtaccacacccgccaacgcgggctccaatcttctatccgccaccgatgccatgggttcctctgagaacaacttgacggtctacttctagagcgcaggaggggaggcagctactcccggagagcttgtaaatatcgctgctaagtcagtttaggattaggtttaggccccgcacacgtgtatgtacattgagtagaccaaatatagcattgtaaacagacccagcaccagatctaggctaagtccaagcgatttccattgtaaagttttgcttcccagattgtaagaggatccgtccaataaagttttcaactattcaatcacgttggccccttccatgcaaacagtttaccatacgaatctcgttgtttatattcttgacgcttatgttctacttcgattctggtgatcttcacaactttggcatggacaaaacgaaaataacgtgaattaaaaacgcttcactgacttagaacagatattaggatattacaaattcaatgctgggtacgaaagattatttggaatacagacagaggctctcaggggtgtaagatacttggaaatcactataaattcaatatgaattgaagctatagtttcttaagcatatttgcttggcattactttaagattaatgcgttttttttgttttgaaagaataagagagccaccccatatgcattggagtttttgtggcatgaatccagactctttctatctgggcctgcctttacctgccatttcgtttcgtctttcgcttgagcagattaaagtctccgtactgaatgtgattgtcggtcaggaatggcacatagaaggcacgtaacactttgtgcgacttctccggaatgaggaagggcagactcttcatcaccgaccaatctttggatcgttttgaataattgggttccagagccgtatacttgccttcatcaaagtcgacgaggaaatcgcaacggtcgtagtcaaagtacatgtgctcattttcctggttgagatcgttaaaatacggttgcactaccttagtagcattttgaccttcgtcatagtacgcgggcagcatgcctcggaattcggatttcagaaaacgcagccggaagtttttggcgggaaagaagaagctgcccggatatcgatgccaatctttgccaatacacacgttgtatattacatccgggtcgtactgcggtgtcgccttaaactggttcagttccagcatcaaatccatcggagcatggtagttcctatacagggcaaacaccctggaaagtcccaacaatgtgctggtcaccattaccaagatggcaataaacatgctgtggtccagataatgaactcccgccttaattttgaagaccaccgatttcatacggaagaatatgcgctgatacacatccacagtgatggctccgcaaagcgagattaaaggatatatgggaaacagaaagcgctcttccttgtgcggttgggcaaaaaagacgagaagccacaggtacaggggagccagcgagatgtagtgggggaaatttaacgtcgactttgatttggctggcacaatcaaatagtctatgaccagcattatgggtagttgaagtgccaggagctataagggaaaaagttatcataaatttaagagtgtaatagatacaatagctcacccaaataatattaaagttaaggaaaccattgataatgtagtaactgagtggttccgtaccaaatatgtttggtccgtgactggtgaacacattgtaccaaacaatatttagaggagcaaatgtcagtttgccaaaatagctggtatcaattgcaatcatgggaatggcaaccgtggcgcccgatatcagtgtccactgaacaaaggtcttccaatcacgctgccttaaaagcatctccagcaccagcggtatgccaataagcgcagcaaatggccaaccaagcaaagcggatattgctgtcaggaatatggcaaaacagtaattttgttgccaccacgcggccagggcagcacagccaaagtacatggaaaaggaggatggcagtagagcggtgctagacacaaacatgcccacactgaagagctggaatatcagccacagacgaccgatgtgaattccaaactcttgacaaatcgacctaaataaagtttagttagttttgaacaggatttagtaccaatgccatgcttacttgtacatatatcgctccattacggcacaaccgaaacccaacatacatcgcaccatgtagaagatgagtatgggactgggattgaacaacttttggtaaaagtatccgggcacgccctgcagcaataggtaggtgtacgatcggagtccaaactgcgggctgtactcccacgtctggagtccatggccattaatgatgtagtgcagcggctcccagtagttgaacgtctcgtcgcagtcggctatgtacgcccaaatggcgctgcacaaccgggcgctcacgaaggtcttgaaggcggtctgaacactgggcattatggggttgggaagccccttctcttgaccaccacttgtgggttggttgctgcgggtgagaagtaacggcgtttagtgggagtcagggtacataggccaatacttaccgctttttagcatccttatccttttttttgccggccggtgtggcttccttcgtcttgttgttgccatttaggcccggtcttttgggcggtttctttgagagaatctggttgtccgccttgttggctatgtagcgagcgcgagcagccggaggcgccataatccggactttctgagaaaattaccggcggaaaagttgcaaagtattgtatattatcaatattatgtggcgcaggttatcgattgcatcaaagctatcgtggaaacctgcatttcagttggggtattcttgtccctagtaatgtgccctatacaccaactcagatttgttatcgatatatgtgtagacgtgagtatagtaacggctttttgaactggatgtgtgtcaccattgtaatttaaaaagacaacagttttaatattggtgtaaaaatttaataagaaacattaaagaagaaaaatatacaaatacaaaaatgaacaattcattaagctgagttccgaattggtaggtaatgaacgataacaatgcacactgaaatgaaagaaacttgaggtagttaaagttcttccattggtagaattacaatacttaccaattaacgtgcacgtaaacatagcaaaagtggtgttgcaataaggctgcagcataactcccatcaagtttgtagctgcaatgatcccaagtcttcccagtgacatgcagaagctaactgccttggatctgatcggaaaagtgaataattatttcaatattaatagaagtgtagatcatttacctcaaatgtgtagggaccaaatcaacaatggcgccaatcataatagaaatcgaaagcccaggcagaagaatgtaaaggcaaaagagaacaaggactcctgttggactttccataaaatgcaataggactccacttaaagttgcaactgccagagcagctaaaagtacgtttttacggcccaaaggattaagtattagtccttgaatcgagaatccaatcagaaatgcgaaacctacaacgaggttgtcaatataggttttgctactaataggatcggtgcagtcctaaaattaaaattaagtattaagattggttacgtaattttaaaatatgttcataattaccaaagtttctgtaacattgggttgttctacgggtacgctgagaatttcgcatactgttgaagagttattttcggcacctgatga

SEQ ID NO: 32054 - DNA, 1996 bp, DROSOPHILA
atactttgcaacttttccgccggtaattttctcagaaagtccggattatggcgcctccggctgctcgcgctcgctacatagccaacaaggcggacaaccagattctctcaaagaaaccgcccaaaagaccgggcctaaatggcaacaacaagacgaaggaagccacaccggccggcaaaaaaaaggataaggatgctaaaaagcgcaaccaacccacaagtggtggtcaagagaaggggcttcccaaccccataatgcccagtgttcagaccgccttcaagaccttcgtgagcgcccggttgtgcagcgccatttgggcgtacatagccgactgcgacgagacgttcaactactgggagccgctgcactacatcattaatggccatggactccagacgtgggagtacagcccgcagtttggactccgatcgtacacctacctattgctgcagggcgtgcccggatacttttaccaaaagttgttcaatcccagtcccatactcatcttctacatggtgcgatgtatgttgggtttcggttgtgccgtaatggagcgatatatgtacaagtcgatttgtcaagagtttggaattcacatcggtcgtctgtggctgatattccagctcttcagtgtgggcatgtttgtgtctagcaccgctctactgccatcctccttttccatgtactttggctgtgctgccctggccgcgtggtggcaacaaaattactgttttgccatattcctgacagcaatatccgctttgcttggttggccatttgctgcgcttattggcataccgctggtgctggagatgcttttaaggcagcgtgattggaagacctttgttcagtggacactgatatcgggcgccacggttgccattcccatgattgcaattgataccagctattttggcaaactgacatttgctcctctaaatattgtttggtacaatgtgttcaccagtcacggaccaaacatatttggtacggaaccactcagttactacattatcaatggtttccttaactttaatattatttggctcctggcacttcaactacccataatgctggtcatagactatttgattgtgccagccaaatcaaagtcgacgttaaatttcccccactacatctcgctggctcccctgtacctgtggcttctcgtcttttttgcccaaccgcacaaggaagagcgctttctgtttcccatatatcctttaatctcgctttgcggagccatcactgtggatgtgtatcagcgcatattcttccgtatgaaatcggtggtcttcaaaattaaggcgggagttcattatctggaccacagcatgtttattgccatcttggtaatggtgaccagcacattgttgggactttccagggtgtttgccctgtataggaactaccatgctccgatggatttgatgctggaactgaaccagtttaaggcgacaccgcagtacgacccggatgtaatatacaacgtgtgtattggcaaagattggcatcgatatccgggcagcttcttctttcccgccaaaaacttccggctgcgttttctgaaatccgaattccgaggcatgctgcccgcgtactatgacgaaggtcaaaatgctactaaggtagtgcaaccgtattttaacgatctcaaccaggaaaatgagcacatgtactttgactacgaccgttgcgatttcctcgtcgactttgatgaaggcaagtatacggctctggaacccaattattcaaaacgatccaaagattggtcggtgatgaagagtctgcccttcctcattccggagaagtcgcacaaagtgttacgtgccttctatgtgccattcctgaccgacaatcacattcagtacggagactttaatctgctcaagcgaaagacgaaacgaaatggcaggtaaaggcaggcccagatagaaagagtctggattcatgccacaaaaactccaatgcatatggggtggctctcttattcttt

SEQ ID NO: 32055 - protein, 623 aa, DROSOPHILA
MAPPAARARYIANKADNQILSKKPPKRPGLNGNNKTKEATPAGKKKDKDAKKRNQPTSGGQEKGLPNPIMPSVQTAFKTFVSARLCSAIWAYIADCDETFNYWEPLHYIINGHGLQTWEYSPQFGLRSYTYLLLQGVPGYFYQKLFNPSPILIFYMVRCMLGFGCAVMERYMYKSICQEFGIHIGRLWLIFQLFSVGMFVSSTALLPSSFSMYFGCAALAAWWQQNYCFAIFLTAISALLGWPFAALIGIPLVLEMLLRQRDWKTFVQWTLISGATVAIPMIAIDTSYFGKLTFAPLNIVWYNVFTSHGPNIFGTEPLSYYIINGFLNFNIIWLLALQLPIMLVIDYLIVPAKSKSTLNFPHYISLAPLYLWLLVFFAQPHKEERFLFPIYPLISLCGAITVDVYQRIFFRMKSVVFKIKAGVHYLDHSMFIAILVMVTSTLLGLSRVFALYRNYHAPMDLMLELNQFKATPQYDPDVIYNVCIGKDWHRYPGSFFFPAKNFRLRFLKSEFRGMLPAYYDEGQNATKVVQPYFNDLNQENEHMYFDYDRCDFLVDFDEGKYTALEPNYSKRSKDWSVMKSLPFLIPEKSHKVLRAFYVPFLTDNHIQYGDFNLLKRKTKRNGR

SEQ ID NO: 32056 - DNA, 3271 bp, DROSOPHILA
gtagcaaatcttcttattcaccttaatcttcatcaatcagttacatcgaaaatccgctcaatgaatttaagtatcagacagattatgtccaattaaaagtcatggtattaagttctcccttaacaaagttaactggcaagtgtgcaactcacaaaagggccagttccaaatatagccgaattgagatgcgaaaacaacgcagtcatcgtgaccaccagttctttagttggctttagttcttgcgaatcgaagtgaagggcagtggaggagtagcggtggagtagtagctcggaacaggtcctagactttgggttaacttaatgaccaagtgtcccgctttaaagtccagcccccgtggagaacaaaagcaacttgtttcgctcggaatcgctgcagttgattgctcgctcgtggaagattttcactgacccaaggccaactgggtgtccgattccctgggatcgggatggcagctataccgttggctactcttgaacttggacagtgaaatgagttcgcaatgagtgacagcacagttgtgttcagattaatagcactgccatttagttagttcttgattctaagacaagcagatcttagtcatatatcatatcatcatatcatatactaattttagtgcactttgggctaaattagttgcacaggatgtaggagtagtagtaggagcatgcatcttcgtcttttttaagacacaaagtatttgctcataataattaaggtgtttatttcaatttgttggatgttttaatactttaagcgtatgtataactacgcttttatccacaagtatagtcaccttagcaataatgcctttgtcatgcaaatttcgaatcaatcgttccatcacgtgagctgcctgttgattgctgattgctggccaaaaatgaaacaaaaagtgtatgcgacacttgtgcggaaatagtgagatccacgttttagctaacaatggccccccgcagaagcagaaccagttttttttcgaatgtttttgtttattctacaagttaaagcttagcttagcagatacgatgatacgatgatgatgtgtcaatggccggaatgccggaatgcaacgccccatgtgagtgagaatagcttggataggtgaggaaatactcgtacacttagcctaaagtcctagggcgcctgatggcgactaggacgactagtgctcagttctcgaggaataaatcctcgtaggcgaagcgcttgaagagctgcgagagaacgctcttcatgatctcggcgatggccacatgaatggagggatgcagctcgttccacacctccgtccagttgtcgttgaggaactgattcagattggtgcccaatgcctggtcgccattaaagaggttctccagccgaatgttcatcctgtgggaacacaaatatgttagtatatctcagctaaaatccgaactgcacctacttttgtggctccaccagaaccttgagcttatccacgctcaggtaggtgcgtccattgcgctgctgtgtgcccggcttgaatttcaccgaaaacttgggattgtgcaacacgatctcggcatcgccatcgccacgaatcggcaggatcaggatgcgtccatccgccacgtacttgcccttcagcacgatcttgggaaaggatccgtacatctcaaacttgctggttgcaggatcagcgccaaagccactgaaaaatacgattatgatggataagtgcaatcaacttaatatatcttcttctgttaataaacatgagaacttcttcacttttgcttaagaaggaaatcacttttcatttcacttgctacttacacggctctgtcgaacttcacactggacaggccctccacattcacgtccctgaagttgagctttagattcagggagccagtgcgtccgtcggagatgtcgaagcgcttgatcaggaagggctccacctgggggaatccagcggacggatagccggtcctcgcgtgctgtctgatcagcatgtgcgacacgttgatgatgcagctggtgtcgcccatgtggcagcgcggcagttcgggagctgcaaggataagctggcgattagcgaagcactgggattgttggccaaaggactcacggaaattcgaggcaccgctaaccaagcagcagaagagggccacgcagcccagctggagcagcatcattctggatatggatctagttacgtacgaaattcaagcgccccgaaattcaaccgctcgacgatttggcgaatgcccgaccaggttcaatggcaaactgtaaatcggctctggacagacggcggcatttataaaatttctgatcggccagaacgatggagcggcaacaaatgtggccaacaacaaccagtacacttcatagtttattcattcctgacttgtcgcgtcttggcccttgtttttcttgttgttgctgctgctgctgttgttgttgtctgtctgattgctggctatttttatttatattttttttttatttattcgtatgtgtatatctctttcgcttcgtgttatggattctcctcatcatcatagacatcgcagtctttatctttatcgcagctacccctaaccagaattggcagcagcattattattaattaatattattagcatgcagcaacaaataacaataaacaataacaatggcaacgcgcacaaaaggcagcgaaactcaaaattttaatgctcaatccagtcagttttcaagcaattaaccaatatatttccacttatcctgcaatgcattatatatatatataatttaattatacatatataatttgcactatatttcggcatcttgtgtactttttatagattcaaactccgtgaaatggaatccgcgctttgttcacacttttaataaagtgcaaatatcaattcgtacttattggcttatgatattattcatcccatatttgctttgagatcagcacttggaattgggaacctacctctgggggaattcctaagtgtgctaaatggccaggcaatctgaaagggaatgataatgaataggtcatggttaaggatccacgataaaaatcacttaagttatgaaattgtattccgaccagaaggaagaatgcatcccaaggctcccaactatgaaatttccgttttggacatatgtacgaagataaatctttttgtggccaacacaactcaattccgacataaaccaattagacatagtcgggcattttggacgacatcaaacaggttccaacggcatcgataatcgataa

SEQ ID NO: 32057 - DNA, 1011 bp, DROSOPHILA
attgaacctggtcgggcattcgccaaatcgtcgagcggttgaatttcggggcgcttgaatttcgtacgtaactagatccatatccagaatgatgctgctccagctgggctgcgtggccctcttctgctgcttggttagcggtgcctcgaatttccatgggcgacaccagctgcatcatcaacgtgtcgcacatgctgatcagacagcacgcgaggaccggctatccgtccgctggattcccccaggtggagcccttcctgatcaagcgcttcgacatctccgacggacgcactggctccctgaatctaaagctcaacttcagggacgtgaatgtggagggcctgtccagtgtgaagttcgacagagccgttggctttggcgctgatcctgcaaccagcaagtttgagatgtacggatcctttcccaagatcgtgctgaagggcaagtacgtggcggatggacgcatcctgatcctgccgattcgtggcgatggcgatgccgagatcgtgttgcacaatcccaagttttcggtgaaattcaagccgggcacacagcagcgcaatggacgcacctacctgagcgtggataagctcaaggttctggtggagccacaaaagatgaacattcggctggagaacctctttaatggcgaccaggcattgggcaccaatctgaatcagttcctcaacgacaactggacggaggtgtggaacgagctgcatccctccattcatgtggccatcgccgagatcatgaagagcgttctctcgcagctcttcaagcgcttcgcctacgaggatttattcctcgagaactgagcactagtcgtcctagtcgccatcaggcgccctaggactttaggctaagtgtacgagtatttcctcacctatccaagctattctcactcacatggggcgttgcattccggcattccggccattgacacatcatcatcgtatcatcgtatctgctaagctaagctttaacttgtagaataaacaaaaacattcg

SEQ ID NO: 32058 - protein, 220 aa, DROSOPHILA
MGDTSCIINVSHMLIRQHARTGYPSAGFPQVEPFLIKRFDISDGRTGSLNLKLNFRDVNVEGLSSVKFDRAVGFGADPATSKFEMYGSFPKIVLKGKYVADGRILILPIRGDGDAEIVLHNPKFSVKFKPGTQQRNGRTYLSVDKLKVLVEPQKMNIRLENLFNGDQALGTNLNQFLNDNWTEVWNELHPSIHVAIAEIMKSVLSQLFKRFAYEDLFLEN

SEQ ID NO: 32059 - DNA, 3161 bp, DROSOPHILA
gacgtgcagcggatcgagggggatcaagcccagctccttgataccgcttttggcgtagttcctgagcacgaagttcaccctgtcctccaggcactgctcgtccattatggcgcacctctcgatgcccgaggctgtaaattggggcgtggcgattgtgaaatatacataaacattatatattacggaaagggggtgtgtgcaactcacggaaatcggaggcgtgtccgtaggtggacgcacatccgaacagcaggacgagggcgagagttagctccataattgctggcggcgaacgtaatcgagtactgatccattagccgcgggcgttaacacttatatagtcactttcgtcaattgaaatgtatcatgtttttgttgccgtaaaccgcttttgcgtttcagccgcacagaatttgactttagaccgtttggcagttgagtcagttaaatggattataaaccgaaaccggcaggctggctgtatggcaaagtggctggttatagccggcgaattcattttacgattccctttaatgaactcccaagttcccaactcccaagccagacatcgaccccgtcccattcaatcgctcctaatcgcgttttgggtgcaatttgctcgatatatgcaaattggatcggccttccccaaaacgcacattaattcccgtttcaacgtctaattaatggctaagtcaacaaagattgtttatcaagcttttttttaatgtaactgccttttccagttacagatattccctgcctttcggaatctccgcgcgcgaataacacatactttcaggcggtccttcatcttttggatcaacctgatctatagggttccactcactgtaacttaattaataatgggtcatagttttaaatgtttttatggtattttacagaattctttgtatcacttataaataatttacaatgtgctaactacatatatgtaacttttattgccacacaacacttacagattatttagctgagatggcttaatagtagttacttgtgttctcactttcaaacgcgaaacacgaactccattaaacctaatgatgattgctagcctcaaaacttagatctgtcagtacgcaaacaacatgatctagtatctttatgtggactctgcccactttgaagagctaactcacgattcatccgcaaaaaacttggcatacggcagtttggagaacacacctttgacgacgcccaggtaaagtttgccaaaggatcggtcgattgctttggccgtctccttgtaaatggcctccgagttttcgttgaggaagacattcatgttgtcacccagcgccttgtccccattgaacagattactgaaatggtagtggctggactccggcttcatcgttattttcagatcggtaacgtccaggtaggtctccccattcttcaccagcggtttgcccgagaagctgacgattgccctgacgttaactggacaggatttttagttcctcgaaatctgaaaaatcaattggcatagcttacccattgtcatgttactctgtccagttccgctgatcggtagaatgagtaccttgccctggatgttatagggtccaacgagtgagaaggttttcgtgacaattttcacttcgtgcttggcggtgagatcccttccgaaacccctgcaaagatcaaggcaagttgaatcacatccttctcatccaaacaaagtgttgttcctgcacccactttactttgacgatcctttggtccttgatcccatacaacagattgtcggtgaaggttagagttatgcccacgggactggagctctcaccctggctaataaccatccgatccaccttcaacggatccagctgcatcaggttcagaccaggatccccctccgccgagttttcgctgaacagggtgttgcacagcttcatgatacattcgccatcaccatacttacaaggttttggatcttcggctgtgaggaacacaaaggattattttggaaccgaaaagtagaggtaggtgtctatctaggtttcccagattattacttcattggcaaggtcttgttttaaaggactttctcttacggaatttggcatccaccgagaccaaaaggcacaaaaccactgcgaatgcgattgcgaacatgctaacacgtctataactttaagttactgaatacgaacgggattttcgcctagtatttatagtggtccactaagtgcaactcaaataacgtctaatggcaacctttgatatagctcttatctgtgccgtaaccgtctgtctgtcaattccagagctcgtttcagaatcatcaactaataacgaatagcaactgaatcatctgatggtattaggtaagaaaacgttgttctaatttcaatacaagccttagtttatcacctcatttgggtgcactttagacagcaagtagatcatgtagcaaatcttcttattcaccttaatcttcatcaatcagttacatcgaaaatccgctcaatgaatttaagtatcagacagattatgtccaattaaaagtcatggtattaagttctcccttaacaaagttaactggcaagtgtgcaactcacaaaagggccagttccaaatatagccgaattgagatgcgaaaacaacgcagtcatcgtgaccaccagttctttagttggctttagttcttgcgaatcgaagtgaagggcagtggaggagtagcggtggagtagtagctcggaacaggtcctagactttgggttaacttaatgaccaagtgtcccgctttaaagtccagcccccgtggagaacaaaagcaacttgtttcgctcggaatcgctgcagttgattgctcgctcgtggaagattttcactgacccaaggccaactgggtgtccgattccctgggatcgggatggcagctataccgttggctactcttgaacttggacagtgaaatgagttcgcaatgagtgacagcacagttgtgttcagattaatagcactgccatttagttagttcttgattctaagacaagcagatcttagtcatatatcatatcatcatatcatatactaattttagtgcactttgggctaaattagttgcacaggatgtaggagtagtagtaggagcatgcatcttcgtcttttttaagacacaaagtatt

SEQ ID NO: 32060 - DNA, 1040 bp, DROSOPHILA
ttatagacgtgttagcatgttcgcaatcgcattcgcagtggttttgtgccttttggtctcggtggatgccaaattccgtaagagaaagtcctttaaaacaagaccttgccaatgaagtaataatctgggaaacctagatagacacctacctctacttttcggttccaaaataatcctttgtgttcctcacagccgaagatccaaaaccttgtaagtatggtgatggcgaatgtatcatgaagctgtgcaacaccctgttcagcgaaaactcggcggagggggatcctggtctgaacctgatgcagctggatccgttgaaggtggatcggatggttattagccagggtgagagctccagtcccgtgggcataactctaaccttcaccgacaatctgttgtatgggatcaaggaccaaaggatcgtcaaagtaaagggtttcggaagggatctcaccgccaagcacgaagtgaaaattgtcacgaaaaccttctcactcgttggaccctataacatccagggcaaggtactcattctaccgatcagcggaactggacagagtaacatgacaatggttaacgtcagggcaatcgtcagcttctcgggcaaaccgctggtgaagaatggggagacctacctggacgttaccgatctgaaaataacgatgaagccggagtccagccactaccatttcagtaatctgttcaatggggacaaggcgctgggtgacaacatgaatgtcttcctcaacgaaaactcggaggccatttacaaggagacggccaaagcaatcgaccgatcctttggcaaactttacctgggcgtcgtcaaaggtgtgttctccaaactgccgtatgccaagttttttgcggatgaatcgtgagttagctcttcaaagtgggcagagtccacataaagatactagatcatgttgtttgcgtactgacagatctaagttttgaggctagcaatcatcattaggtttaatggagttcgtgtttcgcgtttgaaagtgagaacacaagtaactactattaagcca

SEQ ID NO: 32061 - protein, 214 aa, DROSOPHILA
MKLCNTLFSENSAEGDPGLNLMQLDPLKVDRMVISQGESSSPVGITLTFTDNLLYGIKDQRIVKVKGFGRDLTAKHEVKIVTKTFSLVGPYNIQGKVLILPISGTGQSNMTMVNVRAIVSFSGKPLVKNGETYLDVTDLKITMKPESSHYHFSNLFNGDKALGDNMNVFLNENSEAIYKETAKAIDRSFGKLYLGVVKGVFSKLPYAKFFADES

SEQ ID NO: 32062 - DNA, 3205 bp, DROSOPHILA
ccaactgcaggtgctgtgcaccaaagtagagcgcttccttgtccagcagcgccgcaccttggaggcgaatcgccacttcgatttcgagaaatacgacgagtgtgacaagttgcttaagggtttcgcatcctatttggacaacttcaaactgcttttaaagcccaaaatgcgcaatcgaaacggaaactcggggagcaatgcggacaagtgtaagctgtagatttgcaagcaaccattcagctattcctgcaacgattttattatttacagtccatactcagcgcatggagagattgctaattggtctgcgcgattggatcaaggctgcgcatctcagtgtgcacgtatttaactgggaaatggatctggagcaccgctactccggggccatgaccgaaagccacaagtcgttgaacgagcgggccatccttttgtccggtgccgagctaagggcggccgaagcgcgtggaatcagtgcggaggatctgttcatcgcccagagatacaaactgggaggtccgatctattgcgttctggagcagcatgagttcctctccgctctgatcgccaatccagagacctatttcccgcccagtgttgtcgccatttgcgggccacagaagcttggcgcagtgagcatggagcagccgtcagcgtcggaggaggagtttgaggagaccgaggaagtgccatcatcgccacctcgtcacaccggacgtgtacctcgcttcagaagctaaactaatgctgtgcacatcgataaaagaatgacagcaaatatgcaatttaaaaaagctactcttctcatgggaagcaataatttcgtaaagtaaacatatctatagtgtaagatatatttgtccaatagtgcggactccatatttgtattcgtgaataagcttatataagctttttaaaaatatttatcaaatcgatacaaacaaaatcaaaatgaaaacgatttattacccctgttttgagattgataacaaatttatataagtttaactgtgtttacatttatttggcaaaactacaaatgtgtttgcttttcacttttataaatctgtattttacttaaactttagaaataagaaatcctttagtgcctgaatttattttgcaactacgttttatttgtatgaggaacttaccagtttttcttatttgctttgcatttgtattttgaaagtcaaataaatatttacgatttgtgtttggactaattagggtgtttgtactaaggtcttagactacaaagagctgttcgagcggcagtttgccaaagatcctgtccaccaccgacttggctatcagtccgaaggcctcgccaatgcccggtttcagttcattgaagatgtccttccagttctcattgataagcgcgtgcatgttctcgctgagatctttctggccgttgaacagattttccagctggtaggtcacatgggatggatccagctcaacctttatgttcatcacctcggcgtaggtttgatgatcgcccttggagacgcgcttcaatttgatctgtgcacgtacctttgttctagctgcgaattccagaaacacattaaaaattttagatttcaaagctgtgggaggcaaatcttactgaggcgtatgtcagcaatgccatttccggtgatgggcagaatgagtattcttccgtccaccgagtagggtcctctgactcctatttctggaacttccatgaccagctcgatggagcggctgagatcccttgtgaatccgctaaaatccgaaacagaaaaatgtagtaagcagagcgatcataaaatgaaatgaggatccactcacctcactcgcttcgcaactccctgatgcagacccaagatgtccatctcgtggaagctgagatcgatgttgaccggactgtgcggattgcgtccgattttgaacttcttgacgtgcagcggatcgagggggatcaagcccagctccttgataccgcttttggcgtagttcctgagcacgaagttcaccctgtcctccaggcactgctcgtccattatggcgcacctctcgatgcccgaggctgtaaattggggcgtggcgattgtgaaatatacataaacattatatattacggaaagggggtgtgtgcaactcacggaaatcggaggcgtgtccgtaggtggacgcacatccgaacagcaggacgagggcgagagttagctccataattgctggcggcgaacgtaatcgagtactgatccattagccgcgggcgttaacacttatatagtcactttcgtcaattgaaatgtatcatgtttttgttgccgtaaaccgcttttgcgtttcagccgcacagaatttgactttagaccgtttggcagttgagtcagttaaatggattataaaccgaaaccggcaggctggctgtatggcaaagtggctggttatagccggcgaattcattttacgattccctttaatgaactcccaagttcccaactcccaagccagacatcgaccccgtcccattcaatcgctcctaatcgcgttttgggtgcaatttgctcgatatatgcaaattggatcggccttccccaaaacgcacattaattcccgtttcaacgtctaattaatggctaagtcaacaaagattgtttatcaagcttttttttaatgtaactgccttttccagttacagatattccctgcctttcggaatctccgcgcgcgaataacacatactttcaggcggtccttcatcttttggatcaacctgatctatagggttccactcactgtaacttaattaataatgggtcatagttttaaatgtttttatggtattttacagaattctttgtatcacttataaataatttacaatgtgctaactacatatatgtaacttttattgccacacaacacttacagattatttagctgagatggcttaatagtagttacttgtgttctcactttcaaacgcgaaacacgaactccattaaacctaatgatgattgctagcctcaaaacttagatctgtcagtacgcaaacaacatgatctagtatctttatgtggactctgcccactttgaagagctaactcacgattcatccgcaaaaaacttggcatacggcagtttggagaacacacctttgacgacgcccaggtaaagtttgccaaaggatcggtcgattgctttggccgtctccttgtaaatg

SEQ ID NO: 32063 - DNA, 1001 bp, DROSOPHILA
atggagctaactctcgccctcgtcctgctgttcggatgtgcgtccacctacggacacgcctccgatttcccctcgggcatcgagaggtgcgccataatggacgagcagtgcctggaggacagggtgaacttcgtgctcaggaactacgccaaaagcggtatcaaggagctgggcttgatccccctcgatccgctgcacgtcaagaagttcaaaatcggacgcaatccgcacagtccggtcaacatcgatctcagcttccacgagatggacatcttgggtctgcatcagggagttgcgaagcgagtgagcggattcacaagggatctcagccgctccatcgagctggtcatggaagttccagaaataggagtcagaggaccctactcggtggacggaagaatactcattctgcccatcaccggaaatggcattgctgacatacgcctcactagaacaaaggtacgtgcacagatcaaattgaagcgcgtctccaagggcgatcatcaaacctacgccgaggtgatgaacataaaggttgagctggatccatcccatgtgacctaccagctggaaaatctgttcaacggccagaaagatctcagcgagaacatgcacgcgcttatcaatgagaactggaaggacatcttcaatgaactgaaaccgggcattggcgaggccttcggactgatagccaagtcggtggtggacaggatctttggcaaactgccgctcgaacagctctttgtagtctaagaccttagtacaaacaccctaattagtccaaacacaaatcgtaaatatttatttgactttcaaaatacaaatgcaaagcaaataagaaaaactggtaagttcctcatacaaataaaacgtagttgcaaaataaattcaggcactaaaggatttcttatttctaaagtttaagtaaaatacagatttataaaagtgaaaagcaaacacatttgtagttttgccaaataaatgtaaacacagttaaactt

SEQ ID NO: 32064 - protein, 250 aa, DROSOPHILA
MELTLALVLLFGCASTYGHASDFPSGIERCAIMDEQCLEDRVNFVLRNYAKSGIKELGLIPLDPLHVKKFKIGRNPHSPVNIDLSFHEMDILGLHQGVAKRVSGFTRDLSRSIELVMEVPEIGVRGPYSVDGRILILPITGNGIADIRLTRTKVRAQIKLKRVSKGDHQTYAEVMNIKVELDPSHVTYQLENLFNGQKDLSENMHALINENWKDIFNELKPGIGEAFGLIAKSVVDRIFGKLPLEQLFVV

SEQ ID NO: 32065 - DNA, 3127 bp, DROSOPHILA
ttcgaattatttttggcggtcttacaaattcagcgctcactctagcagattgatatggtacacataacctcaaatatctaatttgatttatacagagaaggcgaaagccatgcagctgcgaaaaaagcgttctatttgtcaagtatatgaaatgcagccgttgaaagaaaagcgcgcaatttcttattcaatctcaaaaacgacggccaagtgacgccgactcacacacacaaacacaagcagacgccgcacgcacacaacggtgtgctttcaatggcggcgcctgaagatttcgcaatgattttctttttggaaattccgatgcacactttggccgtttatttacctctcttcccggctgaagttttcccaacattttgtggacgtgtgcgtccacttcttttcgcgttgtaaacatatctgtacttttttaaacacgtccaatttgcagtggacgagaccttgcaaaaatgtgcttcgcgttagattcttcttcactcgtcatccgattgaagcagattcctcgaacggttaattgccccggccggaaaatcacgtagattcggatgggcaattccagtcgcaacaaactgcactcgtttgcggtgtagattggaacgtaaatatcactaaattccaattaaaacttaagctgaacagcacggaaaccaaaaaatttgtgcaaacttagtgctggaacaaaaaacgatgactacgcgttttcatcgatgggcgcgaatatatcgcgtcaccgatgttttaatgactatagcaactatcgattgctacgattttttttcgaacaaacaaataagtataagggatttaataaataaattaaagaaggttcaagaataatataaaacttatgatagtttaacgaaattatgaaatataaatatagaaatagagtgtagatcattgatattcttctgataaatcttttttatatcatattttttatattcttttatttattattcatacaattttatataaattacttcatttgcactttccagaagagcagtttcctatcggaaaccgcactaatgtacggcaatcgctggtgccaggccattcccccataggatttcagggaggcctccagcagaggaacggtcgacttggccgcgaacactttgagagtcagcccgatgaccatggcgataaccatctcggagctgcctggcgcgaagcgcaccacccggccgcaatcctcgtggacctgcttgacatccgcgggcacatagggtcggttcaggtcccaggtaaccacatctccgccggccagcgaggtgatgaagagccggttgctgtgggcccagtccgccgacatcagggggaatttgggcgactccacggagatgactgtctgcttgagcgtcacattgtatagatgaatgatgcctgcaaggagtttccttagttacaccgcgggctaaacactggtaatagcaagcacacccttcttttccgccacaagaaccttgttgggatcctcggggtgactcttgacggacattccagcggaggacaggccaaaggttatgacattctccccgccgcctgtcgtcgtccagaatctgcaggtgaagtcatcgctaacggaggccagcagttcgccgtcgcaaacccaggatacatcgttgacgtagtccccatgcccacggagcacctggagcgaggtgaactggcccagatcggtgcggtatagtttaagctggctgccgttggccgcgcacaaagtcacattgttgggcgtgcagttgagcgaggtgtccggcgagaaggccagtgcgctcacgctccgctgctccttttcgcccaggtccatgtcctgcaggcgtgtgtacccgaactcgccgctctcctcctgcggattaagggttaaccattcaaaatcattcaaccttcactggtcttatgcatggaaacccaccggcagtccaacgagcagcagactcaagtgtttcctgaaggccactgcgattaggttgtaggcaaagtcattggtgcatatatcgtagcagtagatggcttcattaagctggatgctgtggtcgggctcgatgacagatcgcatctttctataaatattgtttgttattcgcgggatatatgcaacaattagccggcgccaaaaaaatgtttattttagtatgaccaaaaatcagtggaagaattttccaagattttacacttttaaaaaacagaatacgcaaagaaatgttattcgaaaatatattcgttattatgtttaatgcttacattattgtgcctcaagttttaataaaaatggctagtcttaaaaagaaacataacaatatttaagtagtcatacgtcggcgaactttttaatgatagtaatagtagtaatgcctaatatcgactgtgtagcgtttgctttttataaaatttattgctaatacacgaataaagtcagaataaattttgaactcaagcaacacacactccagtattggaaagcgtgagcagcagagttgccatcgcccagctgttcagcattatttagtgcattctcgggcaagttaagttggctgcgatttaccccacttccttttccgtgttagctgtgaaagaaaaaacatgccggtgggttccgaattgcgttaaaattgaatttaaacacagaaaactcaaccgaatgataaccaaaaacggccgcttattaccgccaaagtgtccagtgtaaacggagcaagtgtcggccgataataacggccctgaaagactgtaaaacaaatgtctggcccgcttccattgaatgtgtgcgatacaagccacgcatggcgtgcgccagtgaaattgcaaacagttgtgaaatggccaaatgagatttaaatggaatcttgggacttacaggaggaattgattgcactgtcatgtgaaatcgacggatatccttgcacataacctagaacacgcatttgcgaatttatgttgttgttgcctggagtctgctctgcatttgttgatacaccgagagaaaatgtgccaattgtctggcttagaatcgtcaagtggcctgataacattgtattcaattctattgttatctatttcccaaatgaattgttaattgagaacttaaagatcaaagtag

SEQ ID NO: 32066 - DNA, 1004 bp, DROSOPHILA
ttgcatatatcccgcgaataacaaacaatatttatagaaagatgcgatctgtcatcgagcccgaccacagcatccagcttaatgaagccatctactgctacgatatatgcaccaatgactttgcctacaacctaatcgcagtggccttcaggaaacacttgagtctgctgctcgttggactgccggaggagagcggcgagttcgggtacacacgcctgcaggacatggacctgggcgaaaaggagcagcggagcgtgagcgcactggccttctcgccggacacctcgctcaactgcacgcccaacaatgtgactttgtgcgcggccaacggcagccagcttaaactataccgcaccgatctgggccagttcacctcgctccaggtgctccgtgggcatggggactacgtcaacgatgtatcctgggtttgcgacggcgaactgctggcctccgttagcgatgacttcacctgcagattctggacgacgacaggcggcggggagaatgtcataacctttggcctgtcctccgctggaatgtccgtcaagagtcaccccgaggatcccaacaaggttcttgtggcggaaaagaagggcatcattcatctatacaatgtgacgctcaagcagacagtcatctccgtggagtcgcccaaattccccctgatgtcggcggactgggcccacagcaaccggctcttcatcacctcgctggccggcggagatgtggttacctgggacctgaaccgaccctatgtgcccgcggatgtcaagcaggtccacgaggattgcggccgggtggtgcgcttcgcgccaggcagctccgagatggttatcgccatggtcatcgggctgactctcaaagtgttcgcggccaagtcgaccgttcctctgctggaggcctccctgaaatcctatgggggaatggcctggcaccagcgattgccgtacattagtgcggtttccgataggaaactgctcttctggaaagtgcaaatgaagtaa

SEQ ID NO: 32067 - protein, 320 aa, DROSOPHILA
MRSVIEPDHSIQLNEAIYCYDICTNDFAYNLIAVAFRKHLSLLLVGLPEESGEFGYTRLQDMDLGEKEQRSVSALAFSPDTSLNCTPNNVTLCAANGSQLKLYRTDLGQFTSLQVLRGHGDYVNDVSWVCDGELLASVSDDFTCRFWTTTGGGENVITFGLSSAGMSVKSHPEDPNKVLVAEKKGIIHLYNVTLKQTVISVESPKFPLMSADWAHSNRLFITSLAGGDVVTWDLNRPYVPADVKQVHEDCGRVVRFAPGSSEMVIAMVIGLTLKVFAAKSTVPLLEASLKSYGGMAWHQRLPYISAVSDRKLLFWKVQMK

SEQ ID NO: 32068 - DNA, 11142 bp, DROSOPHILA
cgagttggcagattgggtccctcgtcctcgtcatcctgcgaatacggatcgaactccgggtcgatcttgggcgttaaaaaagcgataaacaggttcaagtggtaaatgccaagcgcatagcacacgatgtaccagccctgatagatgaagatgcgcagcacaaagagcaggagcagaaagccggcgaacacccagcgcattcgtgtgtgcggtgtgctacggtccaaggcggattggtaggtctgcggaagcaaaggatgcgggttagttcccggcacgtacgggctatccacaattacttacctgtgagaggcgctgaaagaacttcttaaccccgccgccgccggcagcactgctgtcctcgttcatcatggtcgtcgtcggtagtctctcattaatctccggccctcgacttttattgttgactttgacgctgtcgttgttctcgctgcacacgtgtatcgattcgggaattgcaaaattttccgggacgggggcaggggctgccggaaaggggctaacaaaacacgaaatgggccaactggcaaactagacgcgcttcaatcgctaattattctctaattcatattctgcaccgcccgtcgtcgccttcttcttcttcctccttgttgtagggctgtttcaactgtcagtttcctgagattgctatatagacagtattcgggattcgtaaagttctggccacagtttagtgcgtttctatgcggtaactaatttaattacactagagatttgtcggcaatttattgttcttttttcacacagagttcaccacgtcattatgctctctcagtggcagggctgtcaaactatcggctggggatggaacaatcgggagttgagcgattatcgcgaaaggtaattgtttgttttaattttttatctaagtgctgtcgatattttaaaaataggtagaggtacatttaatatataaaaacatagccagtttccttgtgctatatggttgtacgtccgaatttgtctcctctctaatatatcgattgctttattcaatagtcaaatttatttcaaatgtaatattaatgtttatcgaaattttattagcaaaatgtgaaatagccattgtcgctactgttttggatgaatattctaacacaatcctagacatgctacatatatttagatccggtttgcttatgagctcgcctgctcctccggcgcgtcgtcattcttgttctcctcatcaccttgcaaggccttggctcgttttatgcacgaattgaccgtgttgaggaactcactggcgatctcttccttggcgaatcgacaggcaaggcgttccaggacgccctcggtgtcaactttaccctctgcgtccaccgcgtagttgtagccggcccacaggaagctcttcatctgcgcgttcatgtaatccatttgcagggaggcggagatattcatgttaagcaccagcttgtggatctgctcctgccgcatgatcagtcggaatgtctgcagctccgggtgctccagcacctttatctcaccgacaccttttttttttttttttggttttataaaaacttttagtgtgaataagaaagggactattactacagcttacctcgctccttccattgtttcgattcggcgtcatagcgataaagcttcgcccgctcgccaaacagcttagtctcgttctcctctcccgtggtgacaactatctcatccggcagctctacaatggcatcatagtgcggatcgtagttgtcatcagtggtcgcgtcgccgtcatcatcgcactcttctgtggcttgcggcgactcgaagttcttgaaagcgttctgatgcgtgaggttataaaagccgcccccggcggacttgttgaatcccacggtagtgccctggctattggccgacaggttggcaaagtcgttgcccgtcttgttcgctaagtccgcaaaagtgccgcccggattgcttgccaaatctgcaaacgtgctgcctgtcttggccaaatcggcaaatgtgctggtcgtctccggcaccaactccttcttttccttgccttcggctttaagatcagtggtgttattcgaggttatgtccttttccttttcattttttgcagctgtaaatgagaaggttgccatttgtccaaaagcgggtgcactgccaaacacaaagtctttagcaggtgactgggtttcaattttgggtattccaaaggcgttggaccctccaaataacaatggggttccgccaatgatagattttggttcttccttgccatctgatttttgcaaattaactttgtggcctccaaaaggattggcgtctccgaacacaggtgcggcaattccaccgaaggccaacttcggtgcttcttgggtcgctggcgattgggaatccgctttattgcctccgaagacagactctgaggaatctttcttctgttgctcagccgctttatttccacccccgaaaaagaacttgacagaaccgtcagacgaattttcgtttgacgagccgctacggaatatagatcccaaaacgtttccttgtccttcgcctgatgctagtttttgaagattagctaatgggccagcatcctttccaggctccgatttatctgaagtgaacataaaaagcggttagatccttttatcttgaggtcaacgtcgaattatacatacccgtgctaccgaaaatgaatgctgaactaggcgttttgcttgcctcagaagccgaagagttatttctgctcagcgaactgcctttgaacaatatggtggcaggtgtttggtaatcgttaggcttggccaatggctgggggagagtcagtaggggaagggtcatgggaagtggagggattacttcgtgcgtggttggccttacagaagaggttttgccaacatcaagtacttccgattcgcctcctctgctctttgccgccccatcatttttttgggacggtttatttgcttccgtcgattgggaaacggagccgaccactgggctatcttctatcggctttgcggtttcattaagagcatttttgatcgcttccataaatccttgtgccacctccttgtttttaaaacgcaaagtgaatcgctctaggacactctcgccctcgctaaaatcgtgtacagcaaacatccacgacgtttcagtcttctccctgtacaccacattctcgttaagcacatggttaagacagatcttgaacacctgctcccgacgcatgaccacgcgcagctttttggtctgcctatggcgcaggatcttcacatcccccaagccgcgctctttccaatcgctctcgtttaggcggtacaacttggccttatgcacatacaatagctcctcgtcctcctcacctgtttttacatcaatctgaaataaacatttgttaaataagaaaacaaatatggtttatggcatcaaataattgtaccttatcgggtaatgggattactggtgaaaagtaagtgttgttctcctcctcctccacctcttgcgaatcgttatcttcatcctccttagctgctgtactatttggctgctgctggtcgggcttgggcttggtcatggagaaggtgaagctgctggatccaattgaggtagtcggagcaacagctgcgggcatcgcagcgaagttgaacgtggctccatcgccagcctgatctttgtcaccagccgctgcggctccgaaaccaaagctaaacttggaggtaggtggcagattaagtcccgatcctagtgacttctccttctgtggtaccgtgtcattcttgggtgcatcacaggcgctgcagtaaagagactctccgggattgttcacatagcatgcgctacatgaccaactaccgactgcaggtttgaaggcgtccccgaatccagaagtcattgaagactttccaaatccaagggctgccgtttgaactgacgtaggtgccgaagccgaggcggtaacaactgccactgctggcttctcctttggctgtgtggcgccaccgaaactaaatccacctgtggctggaagagtcgctgaggaggcaaagccaaacgaaaacttgtttgaggagctagtggtaagatttaacgcgttcccttggtctaaccccgattgcttggggggaacagtggcatctttgggctcctggcaggccaagcagtagagctgatcctggccattgttggtatagcaggcttggcagttccaactgcctgccttaggcttaaaggcatctccaaagcctttaattggcttctccttttctccagcggcagaagggacctcctcctttttgggttcatttccaatactttgttgagccttttgcacggcctcgaggaattgctgacagatgtcttgcgacttaaatcgcacagcgagcaatgcggtggttaactcctcatcggaataatcctgagcaccccatgtgacggccgctttacagttcgttgcataagtgaacttggtctcaggcaacagtcgctgattgcagcacagcttatggacctgctcgcgccgcataagcaggcgaaccttgttgggatcagtgcgatcccgaaggagcttcatattaccaaggccgcgctccttccactcattcgcttccttatcccaacgcagaagcttggcacggtgctcgaagagcacatcctcattctcttcgccggtgaccacctccactatatcgggcagggcaataacaggcacgaactgagcggtgggcacatactcctcctcagcgtccgaggagtttgacttgtttaattgtgactcctgctgaagcgttttgccttgaactgtattgtccttgatcaaagccgtggtgaataaagtagtgttgttgccgctgcccaccgcagaagcggtaccaaaagaaaggtttccgaacggagaggcggtggaagttccaaatcctgatgacccattcggcgtgaagctaaagctggcaaatggtgtggcagaggctggcgcagatgttgcaggagcagcactgactgacagggttccaaacagtgacttagctgctgttgctggtgggtccggattaggctgagtttttgtctgctcctgaggcttattgattagcgaattggctgctggggtgctggttacaaagctcttgaatgccgctggagcagtcgcagttgatcctttctccgctgtgtttaccgtcggtttcacggtttccttcgacttggcggcctcgcttgcctttgtaaaagccaccctgaactcttcagccaactcccctgttttgaaacgcaccaggaatctctccaatgtaacttgctcatccgcaaaatcatttgccgcccacagaagggatttcttatccttgtcctggttggcaacatttatcgtaatgtctgcagtgattgtgtgattagcacacactttgtgagtttgatcgcgacgcatcaagactcgcgaaacgccggtggctttgtcgcataaaattttgatcacccctgtcccgcgctccttccactccttgtccacatatcgaaagagcttggctcggctggtaaacttgatatcctcgccctcctcccctgttcgaacctccacttcatcgggtagtggaatgatgggcttgaaatcgggacgaggatcgtaatcatctgctgaagtatcttgtggcagagttttgttgggatcagtagccccactttggttttgctcagcttcctcttgttccttttgtttttcggctgctgccttagccacctgtgtcttgaatgaaaaaggactttcggaagacttactgccaaagttaaagctgagtgatcctactcctgacaccgatggctgtgccggttgtgccgattgtgccggctgttccggtgcttgaaccaaacttggcttgatatgctgtgctggaatggtcacacttaaagtgggttggacactggcagtcgtgggtttcggcaacggatctgaactggttatgaccacattggctggcggctccttttccacgggctgattgttcaacgcacggttaaacatagacggcacactaacaggggcgggtgcgggtggctgtgcaggaacagaaggagccacttgaggtatatgaacaggaggcggaacagcagttgttgccggtggattcacagttccagcaattggtggagcaggagcagtactaggtattggcaccgttggaacagttaatggtttcgactgcggaacttgaatgggcgaagctccaaagaccggtgttgtcgtattgaagaatcctggagttggcagtgcaaccacaggcttggactcaagaatattcaagggagccggaggagctgctggctgagcgggaggaggtatcaaacttgggggaggctgggtaaagttgcccatggcgtcaatgtaaggtgctaccgaaggcacggtcggcgggggaaacatactgggcaggccaaagtttggatttcgaggacctacataaaattaaacattatcaattcatccaaatcaaatttaaaacggtgcttaccaaacatattcggaggtggaattgatcctggagctggaggagtccgcaagaactgcgcttgcgcttgagcctgagcttgggcagcgtagtagttgtacatctggttttggttaaacatgggactcccgtatggtccctgcagaaagcgctcttgggcggatggcgtgtttggcatcccgttgtagaagccagaagtatatggatttggtacgactgggtgtattgcaccttggttgtggctctgctgctgctgatgctgttgctgctgctgatgctccgcaagtgcatcctcaattatgaagaggtcgtccaggcctaaggcagctgcgggatcgacatctcgtgtaggcgtgtctcgactgctgatcttgatcttcttaagcagatcctccaggccagtgaacttctcagtaagaactttgatatcctgccgcatggcttccattcccacactcacatcgtccttgagcacacacagtgacttgctgatctgcttgacagcctgctccatttcctgactcggttgtgccataacaatgggagtgactggggtgacttctaactgacgacgtgatcgattggcagagaaggctgcatgggaatagaaatcatcttctgcgtcctcgtaggcggatgaattgttatgaacatccggactgccgaagctattatcgataccccgactattgcggtcctgttgatgtctatgcatggccgctatgagtgggtgcttatcatcatttttgattaacttttgcgttttctgcaggcattcacgtcttcgctctgagtaacgatctcgggaagttcgaggcagcttggaagattcctcaagatgatgacacgcctccgattgcaaaaagtaggccatgggcagatgaagtccccggacctcgtccaaaaactgctcatactgtccaatcctaaacattttctcgctaaaataggtgacggcttcctcagccaacgactgaagatcttgccatgctgccgttgagccggcggatccgtacttaaagacgcggacataggattccatctgctggttgtgttggtggcgtaaaattgaaaatccttgcctgtacagggtatcgatacgcgcttctagagaagaacgatccgatcgggaatttaaaatctttcccaattgaaaaatgatgatggcatctgcttttgggccattaacgccgcgcaccgcttccaatccatgttgtagttgagctcgttgctcggcgcgattgccttcagtgataagctggttcgagttaagtcgcaccaccagatcccaccagttactttgctccggtgcgcctagttgacccactagattggcaaatggcatcatatgtggccgggcggcagcattgcggtttcccaaattggaggagtcatacacctcacgctggatttgcaatttacgtctggtctgaatggttgtggcataaaggtagaggtccacatctacctggctgattgaatcttgcccacagtagtttagattctgcttaacatcccgttggaaaccctcataaaagaccacgcgtggcgcatctccaagtttgttcgggtcggtgcccagagccaggtagacatgttgggctaaggagtgtggcggcagcaccaacgcttgcagttcgtagttctcgatatgcgccagattcggccactcaaaaagaggcagctgcagacgcaggttccgcaccagatgcgaagacgtatcctttagcttgtgttcggcgtgggtaaagagctgttggtaaatttgacttcgccagctcttgtccaagcattgctggtgagcgctggccaacagctcttcggagtcggcaaataatcccggcatagaatttcccgaattcttattctcatcaaactcggcattttctctatcgtttttaatttccatttgtgaccggtccaagcagcccaaaagggttcgtccaagctgggcacatcgaaaggcgccctgagggcgccacatctgtatcaactgcttctgttccgcgtcgcagtgttttatccattggttggtactcgaatcatcgatcggtcgcacctggtaaccaaggagcagaagtggcaaagcggagcgaagcgtgctcatccatttgtttttgtttgccagaacctcacgtttgaaaatcagtgtcaccgcgtgaagcagaagctggccggtaaagtggtcaatacaagcctggtggagatcccgctgcggagcgtcccctgacctctctatcgaagtgctaaacttgaatagatattgatcaagtctgaacaactgcttgctgctgtctgccagtccactgccctccaggcttagctgcacgagacgatcgagagtgtgcaaggcgaagtgccaaaatcgccagttcttctttacatccttggccatttctatcttgaaaaggaccatccagatctgctcgtaccattcgttcgactggctcgtgcagtttttcgactccagttccgtttttagagcatagttgaaggcctggtctattttcattttttcaacatagctgcgcagcagttgtatgcgtatattaacatcctggggacgcgcctgcagctccttgtacataagaatctcgagggtattttgctcgccgtctccgccactggtgtcatctctttcgccgttactgtccgcaagatttacacgcattcgcaggttgaagacttgcttgttgccgcttaaatcaaggctattagcctgatccaaccagtacctggcgcactccgtgatcgatgcgttgttctccttcaccagaagttcgcaggcgtcaatgacaacctctgactgacgcggatcaatttgaatagaacgttggtagtgctgcagggcctctgtcacatcgggcgggttcagcctactgtagcaagtggcaatcatgttatggcctacagcgtcgtccctcacccggagatagccgttcaaatactcgatggcttttgggtattcctgaactttcatgtacaatcgagctacagccaagcctttgatatcgcgctacaatatacattttattgattagtacgttaggttcaaaaaagtctgttaaatttttagacaatcactgtgagctggataagaataactttgtaagatttgacttattgtgtgcttattatttagatagagctacgttagaccgcaaaaaatcattcaaatccacaatggaaattcgaattatttttggcggtcttacaaattcagcgctcactctagcagattgatatggtacacataacctcaaatatctaatttgatttatacagagaaggcgaaagccatgcagctgcgaaaaaagcgttctatttgtcaagtatatgaaatgcagccgttgaaagaaaagcgcgcaatttcttattcaatctcaaaaacgacggccaagtgacgccgactcacacacacaaacacaagcagacgccgcacgcacacaacggtgtgctttcaatggcggcgcctgaagatttcgcaatgattttctttttggaaattccgatgcacactttggccgtttatttacctctcttcccggctgaagttttcccaacattttgtggacgtgtgcgtccacttcttttcgcgttgtaaacatatctgtacttttttaaacacgtccaatttgcagtggacgagaccttgcaaaaatgtgcttcgcgttagattcttcttcactcgtcatccgattgaagcagattcctcgaacggttaattgccccggccggaaaatcacgtagattcggatgggcaattccagtcgcaacaaactgcactcgtttgcggtgtagattggaacgtaaatatcactaaattccaattaaaacttaagctgaacagcacggaaaccaaaaaatttgtgcaaacttagtgctggaacaaaaaacgatgactacgcgttttcatcgatgggcgcgaatatatcgcgtcaccgatgttttaatgactatagcaactatcgattgctacgattttttttcgaacaaacaaataagtataagggatttaataaataaattaaagaaggttcaagaataatataaaacttatgatagtttaacgaaattatgaaatataaatatagaaatagagtgtagatcattgatattcttctgataaatcttttttatatcatattttttatattcttttatttattattcatacaattttatataaattacttcatttgcactttccagaagagcagtttcctatcggaaaccgcactaatgtacggcaatcgctggtgccaggccattcccccataggatttcagggaggcctccagcagaggaacggtcgacttggccgcgaacactttgagagtcagcccgatgaccatggcgataaccatctcggagctgcctggcgcgaagcgcaccacccggccgcaatcctcgtggacctgcttgacatccgcgggcacatagggtcggttcaggtcccaggtaaccacatctccgccggccagcgaggtgatgaagagccggttgctgtgggcccagtccgccgacatcagggggaatttgggcgactccacggagatgactgtctgcttgagcgtcacattgtatagatgaatgatgcctgcaaggagtttccttagttacaccgcgggctaaacactggtaa

SEQ ID NO: 32069 - DNA, 8301 bp, DROSOPHILA
tccactgcaaattggacgtgtttaaaaaagtacagatatgtttacaacgcgaaaagaagtggacgcacacgtccacaaaatgttgggaaaacttcagccgggaagagagcgcgatatcaaaggcttggctgtagctcgattgtacatgaaagttcaggaatacccaaaagccatcgagtatttgaacggctatctccgggtgagggacgacgctgtaggccataacatgattgccacttgctacagtaggctgaacccgcccgatgtgacagaggccctgcagcactaccaacgttctattcaaattgatccgcgtcagtcagaggttgtcattgacgcctgcgaacttctggtgaaggagaacaacgcatcgatcacggagtgcgccaggtactggttggatcaggctaatagccttgatttaagcggcaacaagcaagtcttcaacctgcgaatgcgtgtaaatcttgcggacagtaacggcgaaagagatgacaccagtggcggagacggcgagcaaaataccctcgagattcttatgtacaaggagctgcaggcgcgtccccaggatgttaatatacgcatacaactgctgcgcagctatgttgaaaaaatgaaaatagaccaggccttcaactatgctctaaaaacggaactggagtcgaaaaactgcacgagccagtcgaacgaatggtacgagcagatctggatggtccttttcaagatagaaatggccaaggatgtaaagaagaactggcgattttggcacttcgccttgcacactctcgatcgtctcgtgcagctaagcctggagggcagtggactggcagacagcagcaagcagttgttcagacttgatcaatatctattcaagtttagcacttcgatagagaggtcaggggacgctccgcagcgggatctccaccaggcttgtattgaccactttaccggccagcttctgcttcacgcggtgacactgattttcaaacgtgaggttctggcaaacaaaaacaaatggatgagcacgcttcgctccgctttgccacttctgctccttggttaccaggtgcgaccgatcgatgattcgagtaccaaccaatggataaaacactgcgacgcggaacagaagcagttgatacagatgtggcgccctcagggcgcctttcgatgtgcccagcttggacgaacccttttgggctgcttggaccggtcacaaatggaaattaaaaacgatagagaaaatgccgagtttgatgagaataagaattcgggaaattctatgccgggattatttgccgactccgaagagctgttggccagcgctcaccagcaatgcttggacaagagctggcgaagtcaaatttaccaacagctctttacccacgccgaacacaagctaaaggatacgtcttcgcatctggtgcggaacctgcgtctgcagctgcctctttttgagtggccgaatctggcgcatatcgagaactacgaactgcaagcgttggtgctgccgccacactccttagcccaacatgtctacctggctctgggcaccgacccgaacaaacttggagatgcgccacgcgtggtcttttatgagggtttccaacgggatgttaagcagaatctaaactactgtgggcaagattcaatcagccaggtagatgtggacctctacctttatgccacaaccattcagaccagacgtaaattgcaaatccagcgtgaggtgtatgactcctccaatttgggaaaccgcaatgctgccgcccggccacatatgatgccatttgccaatctagtgggtcaactaggcgcaccggagcaaagtaactggtgggatctggtggtgcgacttaactcgaaccagcttatcactgaaggcaatcgcgccgagcaacgagctcaactacaacatggattggaagcggtgcgcggcgttaatggcccaaaagcagatgccatcatcatttttcaattgggaaagattttaaattcccgatcggatcgttcttctctagaagcgcgtatcgataccctgtacaggcaaggattttcaattttacgccaccaacacaaccagcagatggaatcctatgtccgcgtctttaagtacggatccgccggctcaacggcagcatggcaagatcttcagtcgttggctgaggaagccgtcacctattttagcgagaaaatgtttaggattggacagtatgagcagtttttggacgaggtccggggacttcatctgcccatggcctactttttgcaatcggaggcgtgtcatcatcttgaggaatcttccaagctgcctcgaacttcccgagatcgttactcagagcgaagacgtgaatgcctgcagaaaacgcaaaagttaatcaaaaatgatgataagcacccactcatagcggccatgcatagacatcaacaggaccgcaatagtcggggtatcgataatagcttcggcagtccggatgttcataacaattcatccgcctacgaggacgcagaagatgatttctattcccatgcagccttctctgccaatcgatcacgtcgtcagttagaagtcaccccagtcactcccattgttatggcacaaccgagtcaggaaatggagcaggctgtcaagcagatcagcaagtcactgtgtgtgctcaaggacgatgtgagtgtgggaatggaagccatgcggcaggatatcaaagttcttactgagaagttcactggcctggaggatctgcttaagaagatcaagatcagcagtcgagacacgcctacacgagatgtcgatcccgcagctgccttaggcctggacgacctcttcataattgaggatgcacttgcggagcatcagcagcagcaacagcatcagcagcagcagagccacaaccaaggtgcaatacacccagtcgtaccaaatccatatacttctggcttctacaacgggatgccaaacacgccatccgcccaagagcgctttctgcagggaccatacgggagtcccatgtttaaccaaaaccagatgtacaactactacgctgcccaagctcaggctcaagcgcaagcgcagttcttgcggactcctccagctccaggatcaattccacctccgaatatgtttggtcctcgaaatccaaactttggcctgcccagtatgtttcccccgccgaccgtgccttcggtagcaccttacattgacgccatgggcaactttacccagcctcccccaagtttgatacctcctcccgctcagccagcagctcctccggctcccttgaatattcttgagtccaagcctgtggttgcactgccaactccaggattcttcaatacgacaacaccggtctttggagcttcgcccattcaagttccgcagtcgaaaccattaactgttccaacggtgccaatacctagtactgctcctgctccaccaattgctggaactgtgaatccaccggcaacaactgctgttccgcctcctgttcatatacctcaagtggctccttctgttcctgcacagccacccgcacccgcccctgttagtgtgccgtctatgtttaaccgtgcgttgaacaatcagcccgtggaaaaggagccgccagccaatgtggtcataaccagttcagatccgttgccgaaacccacgactgccagtgtccaacccactttaagtgtgaccattccagcacagcatatcaagccaagtttggttcaagcaccggaacagccggcacaatcggcacaaccggcacagccatcggtgtcaggagtaggatcactcagctttaactttggcagtaagtcttccgaaagtcctttttcattcaagacacaggtggctaaggcagcagccgaaaaacaaaaggaacaagaggaagctgagcaaaaccaaagtggggctactgatcccaacaaaactctgccacaagatacttcagcagatgattacgatcctcgtcccgatttcaagcccatcattccactacccgatgaagtggaggttcgaacaggggaggagggcgaggatatcaagtttaccagccgagccaagctctttcgatatgtggacaaggagtggaaggagcgcgggacaggggtgatcaaaattttatgcgacaaagccaccggcgtttcgcgagtcttgatgcgtcgcgatcaaactcacaaagtgtgtgctaatcacacaatcactgcagacattacgataaatgttgccaaccaggacaaggataagaaatcccttctgtgggcggcaaatgattttgcggatgagcaagttacattggagagattcctggtgcgtttcaaaacaggggagttggctgaagagttcagggtggcttttacaaaggcaagcgaggccgccaagtcgaaggaaaccgtgaaaccgacggtaaacacagcggagaaaggatcaactgcgactgctccagcggcattcaagagctttgtaaccagcaccccagcagccaattcgctaatcaataagcctcaggagcagacaaaaactcagcctaatccggacccaccagcaacagcagctaagtcactgtttggaaccctgtcagtcagtgctgctcctgcaacatctgcgccagcctctgccacaccatttgccagctttagcttcacgccgaatgggtcatcaggatttggaacttccaccgcctctccgttcggaaacctttcttttggtaccgcttctgcggtgggcagcggcaacaacactactttattcaccacggctttgatcaaggacaatacagttcaaggcaaaacgcttcagcaggagtcacaattaaacaagtcaaactcctcggacgctgaggaggagtatgtgcccaccgctcagttcgtgcctgttattgccctgcccgatatagtggaggtggtcaccggcgaagagaatgaggatgtgctcttcgagcaccgtgccaagcttctgcgttgggataaggaagcgaatgagtggaaggagcgcggccttggtaatatgaagctccttcgggatcgcactgatcccaacaaggttcgcctgcttatgcggcgcgagcaggtccataagctgtgctgcaatcagcgactgttgcctgagaccaagttcacttatgcaacgaactgtaaagcggccgtcacatggggtgctcaggattattccgatgaggagttaaccaccgcattgctcgctgtgcgatttaagtcgcaagacatctgtcagcaattcctcgaggccgtgcaaaaggctcaacaaagtattggaaatgaacccaaaaaggaggaggtcccttctgccgctggagaaaaggagaagccaattaaaggctttggagatgcctttaagcctaaggcaggcagttggaactgccaagcctgctataccaacaatggccaggatcagctctactgcttggcctgccaggagcccaaagatgccactgttccccccaagcaatcggggttagaccaagggaacgcgttaaatcttaccactagctcctcaaacaagttttcgtttggctttgcctcctcagcgactcttccagccacaggtggatttagtttcggtggcgccacacagccaaaggagaagccagcagtggcagttgttaccgcctcggcttcggcacctacgtcagttcaaacggcagcccttggatttggaaagtcttcaatgacttctggattcggggacgccttcaaacctgcagtcggtagttggtcatgtagcgcatgctatgtgaacaatcccggagagtctctttactgcagcgcctgtgatgcacccaagaatgacacggtaccacagaaggagaagtcactaggatcgggacttaatctgccacctacctccaagtttagctttggtttcggagccgcagcggctggtgacaaagatcaggctggcgatggagccacgttcaacttcgctgcgatgcccgcagctgttgctccgactacctcaattggatccagcagcttcaccttctccatgaccaagcccaagcccgaccagcagcagccaaatagtacagcagctaaggaggatgaagataacgattcgcaagaggtggaggaggaggagaacaacacttacttttcaccagtaatcccattacccgataagattgatgtaaaaacaggtgaggaggacgaggagctattgtatgtgcataaggccaagttgtaccgcctaaacgagagcgattggaaagagcgcggcttgggggatgtgaagatcctgcgccataggcagaccaaaaagctgcgcgtggtcatgcgtcgggagcaggtgttcaagatctgtcttaaccatgtgcttaacgagaatgtggtgtacagggagaagactgaaacgtcgtggatgtttgctgtacacgattttagcgagggcgagagtgtcctagagcgattcactttgcgttttaaaaacaaggaggtggcacaaggatttatggaagcgatcaaaaatgctcttaatgaaaccgcaaagccgatagaagatagcccagtggtcggctccgtttcccaatcgacggaagcaaataaaccgtcccaaaaaaatgatggggcggcaaagagcagaggaggcgaatcggaagtacttgatgttggcaaaacctcttctccattggccaagcctaacgattaccaaacacctgccaccatattgttcaaaggcagttcgctgagcagaaataactcttcggcttctgaggcaagcaaaacgcctagttcagcattcattttcggtagcacggataaatcggagcctggaaaggatgctggcccattagctaatcttcaaaaactagcatcaggcgaaggacaaggaaacgttttgggatctatattccgtagcggctcgtcaaacgaaaattcgtctgacggttctgtcaagttctttttcgggggtggaaataaagcggctgagcaacagaagaaagattcctcagagtctgtcttcggaggcaataaagcggattcccaatcgccagcgacccaagaagcaccgaagttggccttcggtggaattgccgcacctgtgttcggagacgccaatccttttggaggccacaaagttaatttgcaaaaatcagatggcaaggaagaaccaaaatctatcattggcggaaccccattgttatttggagggtccaacgcctttggaatacccaaaattgaaacccagtcacctgctaaagactttgtgtttggcagtgcacccgcttttggacaaatggcaaccttctcatttacagctgcaaaaaatgaaaaggaaaaggacataacctcgaataacaccactgatcttaaagccgaaggcaaggaaaagaaggagttggtgccggagacgaccagcacatttgccgatttggccaagacaggcagcacgtttgcagatttggcaagcaatccgggcggcacttttgcggacttagcgaacaagacgggcaacgactttgccaacctgtcggccaatagccagggcactaccgtgggattcaacaagtccgccgggggcggcttttataacctcacgcatcagaacgctttcaagaacttcgagtcgccgcaagccacagaagagtgcgatgatgacggcgacgcgaccactgatgacaactacgatccgcactatgatgccattgtagagctgccggatgagatagttgtcaccacgggagaggagaacgagactaagctgtttggcgagcgggcgaagctttatcgctatgacgccgaatcgaaacaatggaaggagcgaggtgtcggtgagataaaggtgctggagcacccggagctgcagacattccgactgatcatgcggcaggagcagatccacaagctggtgcttaacatgaatatctccgcctccctgcaaatggattacatgaacgcgcagatgaagagcttcctgtgggccggctacaactacgcggtggacgcagagggtaaagttgacaccgagggcgtcctggaacgccttgcctgtcgattcgccaaggaagagatcgccagtgagttcctcaacacggtcaattcgtgcataaaacgagccaaggccttgcaaggtgatgaggagaacaagaatgacgacgcgccggaggagcaggcgagctcataagcaaaccggatctaaatatatgtagcatgtctaggattgtgttagaatattcatccaaaacagtagcgacaatggctatttcacattttgctaataaaatttcgataaacattaatattacatttgaaataaatttgactattgaataaagcaatcgatatattagagaggagaca

SEQ ID NO: 32070 - protein, 2659 aa, DROSOPHILA
MKVQEYPKAIEYLNGYLRVRDDAVGHNMIATCYSRLNPPDVTEALQHYQRSIQIDPRQSEVVIDACELLVKENNASITECARYWLDQANSLDLSGNKQVFNLRMRVNLADSNGERDDTSGGDGEQNTLEILMYKELQARPQDVNIRIQLLRSYVEKMKIDQAFNYALKTELESKNCTSQSNEWYEQIWMVLFKIEMAKDVKKNWRFWHFALHTLDRLVQLSLEGSGLADSSKQLFRLDQYLFKFSTSIERSGDAPQRDLHQACIDHFTGQLLLHAVTLIFKREVLANKNKWMSTLRSALPLLLLGYQVRPIDDSSTNQWIKHCDAEQKQLIQMWRPQGAFRCAQLGRTLLGCLDRSQMEIKNDRENAEFDENKNSGNSMPGLFADSEELLASAHQQCLDKSWRSQIYQQLFTHAEHKLKDTSSHLVRNLRLQLPLFEWPNLAHIENYELQALVLPPHSLAQHVYLALGTDPNKLGDAPRVVFYEGFQRDVKQNLNYCGQDSISQVDVDLYLYATTIQTRRKLQIQREVYDSSNLGNRNAAARPHMMPFANLVGQLGAPEQSNWWDLVVRLNSNQLITEGNRAEQRAQLQHGLEAVRGVNGPKADAIIIFQLGKILNSRSDRSSLEARIDTLYRQGFSILRHQHNQQMESYVRVFKYGSAGSTAAWQDLQSLAEEAVTYFSEKMFRIGQYEQFLDEVRGLHLPMAYFLQSEACHHLEESSKLPRTSRDRYSERRRECLQKTQKLIKNDDKHPLIAAMHRHQQDRNSRGIDNSFGSPDVHNNSSAYEDAEDDFYSHAAFSANRSRRQLEVTPVTPIVMAQPSQEMEQAVKQISKSLCVLKDDVSVGMEAMRQDIKVLTEKFTGLEDLLKKIKISSRDTPTRDVDPAAALGLDDLFIIEDALAEHQQQQQHQQQQSHNQGAIHPVVPNPYTSGFYNGMPNTPSAQERFLQGPYGSPMFNQNQMYNYYAAQAQAQAQAQFLRTPPAPGSIPPPNMFGPRNPNFGLPSMFPPPTVPSVAPYIDAMGNFTQPPPSLIPPPAQPAAPPAPLNILESKPVVALPTPGFFNTTTPVFGASPIQVPQSKPLTVPTVPIPSTAPAPPIAGTVNPPATTAVPPPVHIPQVAPSVPAQPPAPAPVSVPSMFNRALNNQPVEKEPPANVVITSSDPLPKPTTASVQPTLSVTIPAQHIKPSLVQAPEQPAQSAQPAQPSVSGVGSLSFNFGSKSSESPFSFKTQVAKAAAEKQKEQEEAEQNQSGATDPNKTLPQDTSADDYDPRPDFKPIIPLPDEVEVRTGEEGEDIKFTSRAKLFRYVDKEWKERGTGVIKILCDKATGVSRVLMRRDQTHKVCANHTITADITINVANQDKDKKSLLWAANDFADEQVTLERFLVRFKTGELAEEFRVAFTKASEAAKSKETVKPTVNTAEKGSTATAPAAFKSFVTSTPAANSLINKPQEQTKTQPNPDPPATAAKSLFGTLSVSAAPATSAPASATPFASFSFTPNGSSGFGTSTASPFGNLSFGTASAVGSGNNTTLFTTALIKDNTVQGKTLQQESQLNKSNSSDAEEEYVPTAQFVPVIALPDIVEVVTGEENEDVLFEHRAKLLRWDKEANEWKERGLGNMKLLRDRTDPNKVRLLMRREQVHKLCCNQRLLPETKFTYATNCKAAVTWGAQDYSDEELTTALLAVRFKSQDICQQFLEAVQKAQQSIGNEPKKEEVPSAAGEKEKPIKGFGDAFKPKAGSWNCQACYTNNGQDQLYCLACQEPKDATVPPKQSGLDQGNALNLTTSSSNKFSFGFASSATLPATGGFSFGGATQPKEKPAVAVVTASASAPTSVQTAALGFGKSSMTSGFGDAFKPAVGSWSCSACYVNNPGESLYCSACDAPKNDTVPQKEKSLGSGLNLPPTSKFSFGFGAAAAGDKDQAGDGATFNFAAMPAAVAPTTSIGSSSFTFSMTKPKPDQQQPNSTAAKEDEDNDSQEVEEEENNTYFSPVIPLPDKIDVKTGEEDEELLYVHKAKLYRLNESDWKERGLGDVKILRHRQTKKLRVVMRREQVFKICLNHVLNENVVYREKTETSWMFAVHDFSEGESVLERFTLRFKNKEVAQGFMEAIKNALNETAKPIEDSPVVGSVSQSTEANKPSQKNDGAAKSRGGESEVLDVGKTSSPLAKPNDYQTPATILFKGSSLSRNNSSASEASKTPSSAFIFGSTDKSEPGKDAGPLANLQKLASGEGQGNVLGSIFRSGSSNENSSDGSVKFFFGGGNKAAEQQKKDSSESVFGGNKADSQSPATQEAPKLAFGGIAAPVFGDANPFGGHKVNLQKSDGKEEPKSIIGGTPLLFGGSNAFGIPKIETQSPAKDFVFGSAPAFGQMATFSFTAAKNEKEKDITSNNTTDLKAEGKEKKELVPETTSTFADLAKTGSTFADLASNPGGTFADLANKTGNDFANLSANSQGTTVGFNKSAGGGFYNLTHQNAFKNFESPQATEECDDDGDATTDDNYDPHYDAIVELPDEIVVTTGEENETKLFGERAKLYRYDAESKQWKERGVGEIKVLEHPELQTFRLIMRQEQIHKLVLNMNISASLQMDYMNAQMKSFLWAGYNYAVDAEGKVDTEGVLERLACRFAKEEIASEFLNTVNSCIKRAKALQGDEENKNDDAPEEQASS

SEQ ID NO: 32071 - DNA, 3216 bp, DROSOPHILA
ccgtattatcattcatttttatatatatatttgtatgtgcatttgaacttttttattattgccgtgctagggttttaactatttgtatcgtgttttctagactagatgacgtgtgctcgttttgttggtgtgtgcttcgttttaacaaaaataaaatgtatttactgttcagaaaatgagtcgtttttaaataaccacttagtgattgtgctaatcgctaaagcaatttcacgcattggcctaatcaaaattggtttcgtatcttaaaatcgaacagcaaactacatgcagaagcgattagataaatacaaaaaccacgccacaaaagccatcaaccttttccaaatggttcaaaattcaacgataaattatttggttttcttttgtctttctttattcataagacgcacccagtgtacacttcctatagtttcagttttcaattcgcctttttttaacattctgtatagttaacgctaacaaaaattgtataatcataatgcaaaatatatatatatatatgtttgtatatatatttagacatattattatagcatcttagcacgataatcaaaaataattggattcaaatacagtaagtctactttttggatagaagagttattaaattattgttaggattaggatgaaaaactaaattagagctgatctgcagtatttcggtatcgtttgggatttacaatagatagaaagcattgtaaataaatataaatttaaacaagcagttagattaaacaataaacaaggtattttgcacaagacgccgtacgacaactcaacagtgaaacgaaaaatgctacacaaaccgaaaaggaaaatcatattataagcttgtttctggttgatgttatgctgctggttcccattccgggctgctttcggtagctttctctagtagtcctcaatggcaatgatctgcggtggtttgatggacgatgctgttggcgaccccacatccttggtcgctgcgctgtcgctggttggtgatggtggcgctgcagctgcagaagaggcatttgaaggatcacccgatcccgctgccgtcgcccgcgtgtccgacgtctgtgcggctaattgtcactttgagttgcccgccacggaaccgggtccggaacccgccagatcattcacccgctggtagcgcggtttattgcgggtaaacggcaagtacttgtacttgatcatatgcttgatctggcgcttcatcgtgatgcagaagagcgtgataaagtacatgaccaggatgggccagaataccggcacgttgaagaaatcgaagaacgtacaaatcagaccgatgagcgtgctcttcgccaccgacagccagaacttgaactccggcaggcggcgaatgaatggccggaactcttcgttgctgcgagttggcagattgggtccctcgtcctcgtcatcctgcgaatacggatcgaactccgggtcgatcttgggcgttaaaaaagcgataaacaggttcaagtggtaaatgccaagcgcatagcacacgatgtaccagccctgatagatgaagatgcgcagcacaaagagcaggagcagaaagccggcgaacacccagcgcattcgtgtgtgcggtgtgctacggtccaaggcggattggtaggtctgcggaagcaaaggatgcgggttagttcccggcacgtacgggctatccacaattacttacctgtgagaggcgctgaaagaacttcttaaccccgccgccgccggcagcactgctgtcctcgttcatcatggtcgtcgtcggtagtctctcattaatctccggccctcgacttttattgttgactttgacgctgtcgttgttctcgctgcacacgtgtatcgattcgggaattgcaaaattttccgggacgggggcaggggctgccggaaaggggctaacaaaacacgaaatgggccaactggcaaactagacgcgcttcaatcgctaattattctctaattcatattctgcaccgcccgtcgtcgccttcttcttcttcctccttgttgtagggctgtttcaactgtcagtttcctgagattgctatatagacagtattcgggattcgtaaagttctggccacagtttagtgcgtttctatgcggtaactaatttaattacactagagatttgtcggcaatttattgttcttttttcacacagagttcaccacgtcattatgctctctcagtggcagggctgtcaaactatcggctggggatggaacaatcgggagttgagcgattatcgcgaaaggtaattgtttgttttaattttttatctaagtgctgtcgatattttaaaaataggtagaggtacatttaatatataaaaacatagccagtttccttgtgctatatggttgtacgtccgaatttgtctcctctctaatatatcgattgctttattcaatagtcaaatttatttcaaatgtaatattaatgtttatcgaaattttattagcaaaatgtgaaatagccattgtcgctactgttttggatgaatattctaacacaatcctagacatgctacatatatttagatccggtttgcttatgagctcgcctgctcctccggcgcgtcgtcattcttgttctcctcatcaccttgcaaggccttggctcgttttatgcacgaattgaccgtgttgaggaactcactggcgatctcttccttggcgaatcgacaggcaaggcgttccaggacgccctcggtgtcaactttaccctctgcgtccaccgcgtagttgtagccggcccacaggaagctcttcatctgcgcgttcatgtaatccatttgcagggaggcggagatattcatgttaagcaccagcttgtggatctgctcctgccgcatgatcagtcggaatgtctgcagctccgggtgctccagcacctttatctcaccgacaccttttttttttttttttggttttataaaaacttttagtgtgaataagaaagggactattactacagcttacctcgctccttccattgtttcgattcggcgtcatagcgataaagcttcgcccgctcgccaaacagcttagtctcgttctcctctcccgtggtgacaactatctcatccggcagctctacaatggcatcatagtgcggatcgtagttgtcatcagtggtcgcgtcgccgtcatcatcgcactcttctgtggcttgcggcgactcgaagttctt

SEQ ID NO: 32072 - DNA, 1155 bp, DROSOPHILA
ccactgagagagcataatgacgtggtgaactctgtgtgaaaaaagaacaataaattgccgacaaatctctagtgtaattaaattagttaccgcatagaaacgcactaaactgtggccagaactttacgaatcccgaatactgtctatatagcaatctcaggaaactgacagttgaaacagccctacaacaaggaggaagaagaagaaggcgacgacgggcggtgcagaatatgaattagagaataattagcgattgaagcgcgtctagtttgccagttggcccatttcgtgttttgttagcccctttccggcagcccctgcccccgtcccggaaaattttgcaattcccgaatcgatacacgtgtgcagcgagaacaacgacagcgtcaaagtcaacaataaaagtcgagggccggagattaatgagagactaccgacgacgaccatgatgaacgaggacagcagtgctgccggcggcggcggggttaagaagttctttcagcgcctctcacagacctaccaatccgccttggaccgtagcacaccgcacacacgaatgcgctgggtgttcgccggctttctgctcctgctctttgtgctgcgcatcttcatctatcagggctggtacatcgtgtgctatgcgcttggcatttaccacttgaacctgtttatcgcttttttaacgcccaagatcgacccggagttcgatccgtattcgcaggatgacgaggacgagggacccaatctgccaactcgcagcaacgaagagttccggccattcattcgccgcctgccggagttcaagttctggctgtcggtggcgaagagcacgctcatcggtctgatttgtacgttcttcgatttcttcaacgtgccggtattctggcccatcctggtcatgtactttatcacgctcttctgcatcacgatgaagcgccagatcaagcatatgatcaagtacaagtacttgccgtttacccgcaataaaccgcgctaccagcgggtgaatgatctggcgggttccggacccggttccgtggcgggcaactcaaagtgacaattagccgcacagacgtcggacacgcgggcgacggcagcgggatcgggtgatccttcaaatgcctcttctgcagctgcagcgccaccatcaccaac

SEQ ID NO: 32073 - protein, 203 aa, DROSOPHILA
MMNEDSSAAGGGGVKKFFQRLSQTYQSALDRSTPHTRMRWVFAGFLLLLFVLRIFIYQGWYIVCYALGIYHLNLFIAFLTPKIDPEFDPYSQDDEDEGPNLPTRSNEEFRPFIRRLPEFKFWLSVAKSTLIGLICTFFDFFNVPVFWPILVMYFITLFCITMKRQIKHMIKYKYLPFTRNKPRYQRVNDLAGSGPGSVAGNSK

SEQ ID NO: 32074 - DNA, 2452 bp, DROSOPHILA
tggctgtgcaacgctttgggtatctactgcccggtgcagtgggaatacggtaggctgaacatgaactacgcacttgtgtcaaagcgcaagattgcaaagctgatcacggagcagattgtccacgactgggacgatcccaggctgtttactctgacggctctgagacgtagaggcttcccagcagaggccatcaacaacttctgcgcccagatgggcgtaacgggtgcccagatcgccgtcgaccccgccatgttggaggcagcagtgcgggatgtgctaaatgttacagctccccgtcggttggttgtcctggaaccgctcaaagttaccataaagaatttccctcatgcagcgcccgtgcagctagaagtgcctgatttcccgcaaaacccacagcaaggaactcataagatcaccctagacaaggtgatctatattgagcagggagacttcaagttggagcctgaaaagggataccgtcgtctggcaccgaagcaatctgtgggtctccggcacgcgggtctcgtaatcagcgtggatgagatagtaaaggatccggcgactggtcaggtggtggaactaatctgcaccagccaacctgccgagcaggccgagaagcccaaggcttttgtccagtgggtatcgcagccgatacagctggaagtgcgtctgtacgagcagctcttcaagcacaagaatcccgaggatcccaacgaggtgcccggcggtttcctgagcgacatcagtgagcaatccatgtcggtggtggtggcattcgcggatcgggccctaaaccaggccaaggtttacgacaagttccagttcgagaggattggcttcttctccgtagatcctgacaccagtgcgaaccacctagtgttcaaccgcactgtgggattgaaggaagatgcgggcaagaagtgaacgggatttcgggaacccacaaatgaaaagaaacaaaatccgtatcacattaaaattcgatttataaaatcaatgttcatttctttccctccaccatgatgatgtggtagccaaacttggtcttaatcgggggatctgtgtacacgggattgttgacagtggagatgggcaatgcgaaggcggcgtcctgaaatgggcccaccatcgctcctcggatctgccatccgagatcgccgccttgtcgcgccttgtcctcgctgtaagcagccgctacctcggggaatttttggcctgcctttagcttctccatcgcttcggtgatcttgccctgcttctcgcacaagatgtgacgaacctttacagcattgcctcccttcttctccttaccggcagctgcagatggcaaaattcatttgaaggataggatttttgctttagtcgtaagcacttacacttgtcttcggcggctggctttttgccacctttccctgcatcctttccactcttcgcatcctttttcggtggcattttcgttcaatgtttttaaattgcaaattcgaaacaagtaaacagtttggttggagcagacacatgcggtcagtgctgcgcactaagatctaaccttttttatcaaaccactttatttcaagatctagtaaatatttatgttgttgattcatatgggtagccattgcacatttaatttattatgaataaaattaaacaaaaagttttgaagaacaaaatatttgcttggccgcttatagccacatttgcatctctgatgtgcgtcgaaagctttcgatagaaatccggtttgcgtcaacggtcacacttagatgcactttctaatcagacgtttaactttgggtgcagataagccagcgtaagagattagagaatccgggaattatcgcaccctcttgaaattgtcatcatggaactgagctgggagatagtgttctgcgtgggcattgcggtgctggttcatgttctggtctacgtgttcgtcatggccaagaaaccgaggagcattgtgggtcgtcatgtggtggtcaccggcggctccaagggaatcggactctgtctggcggtggagtgcgccatgaaaggcgccaatgtgacggtgatagcgcgcgacgagaaaatgctgagtgagtaatgttctggctaggaaaccccacccaaaatactcttatctttgatatacgatcttttttgcaggcggagcagtggctctgatggaagtgattcgccagcggccagatcaaaagttccagtacagaagtctggacataagcggcgattatgaccaggtggccaaagtgcttggcgagatcgaagatagcttcggccccatatacactttaataaactgtgccggaatggccatttgcggtgtgttcgaggaggtctcagtccaggatgtccacaagctgatgaacgtaaacttcttcggcacctataactgcacccgttatgtcctgcccaaaatgaagaaagccggcgacggcattattgtaatcac

SEQ ID NO: 32075 - DNA, 393 bp, DROSOPHILA
atgccaccgaaaaaggatgcgaagagtggaaaggatgcagggaaaggtggcaaaaagccagccgccgaagacaagtctgccggtaaggagaagaagggaggcaatgctgtaaaggttcgtcacatcttgtgcgagaagcagggcaagatcaccgaagcgatggagaagctaaaggcaggccaaaaattccccgaggtagcggctgcttacagcgaggacaaggcgcgacaaggcggcgatctcggatggcagatccgaggagcgatggtgggcccatttcaggacgccgccttcgcattgcccatctccactgtcaacaatcccgtgtacacagatcccccgattaagaccaagtttggctaccacatcatcatggtggagggaaagaaatga

SEQ ID NO: 32076 - protein, 130 aa, DROSOPHILA
MPPKKDAKSGKDAGKGGKKPAAEDKSAGKEKKGGNAVKVRHILCEKQGKITEAMEKLKAGQKFPEVAAAYSEDKARQGGDLGWQIRGAMVGPFQDAAFALPISTVNNPVYTDPPIKTKFGYHIIMVEGKK

SEQ ID NO: 32077 - DNA, 3780 bp, DROSOPHILA
tcggtatgggtatttttttctgacattatggatccgaacgttagcgctatagtttaagcagtgaagacagtttgcgatatttcccaaagtcttatcatcttaattacgactaactacgctaatccctctggttaggggcccccaataaaatcgtaaagtacattttattcagagtgttagcattcttcttacttatgtaacgtaatcgtttgtacaaatttacatgtcatccagcaatccccactgatcaagatacggaagtgtttgctgaagctttagcctgacggactcctgctggaacacatcgtctttgaatctcataccacctttgctctccgaaatgatgtggtccagggaaaccttttcttttccatcatacaccataaagggttcaaaaattagagaagcgaacacagctgtaaatcagagtagatttgtatcagatcttaaatatatatacttctctttttttagtgcatccctcagtttgtagaagtagaactggaccagctctggttgattgtttaggcggagcttgtcatggatggaagtggagaagaagtgaagtgaagatcgagggctggtgagttccacacgctaaactggaaatcgatgaaggcagcattaatgggatgtccctttgcacagatctccgtgattgagaatcacaaaatcgccatatagcctgaagctcatctcgctccgactaagttaaataccctagatagaaaattaataacataaagtatgttatagtcaattttaatatattttccgtttctcaattacttttatatattttcataaccataacccattattataaaagctatcatcttattaaatcattttggcgactcatgaaaatgcctttattattatttattattattatttatttattacctagagtagttaaaacacaatttgcgatgtcttgatgaaatgttttaattttaaatatacatatcactatttttatttaatagattaacatgatctagaagtcccagccagcatactccttaaccacatccttgttctccttgcgatgacgatgcacagcactagcctctcccttggccacacacttctttcgctgctcccgcttctccttaatgtccatgttgcgtcgtatccggtcggtaatcacagacggagctattgtgctggttgtggtagaataggagcgttgacttctcgcatcatttagcatttgctcgaccattttgagacgatacatgcgggagttaggatccaggccaactagctcgggaacttcatccgtatctaaatcattggaactgatggacttgacgtcttcttcaacggtattagttgccgaagtttcagcttcgaatggaataacgtctggagtttcagccggcagggaaatgtccaactttttgggcattgtttgatcgggaacttctggacctacgctgagattacccagatattgcgtacacgattcaatgtaccgacgcactgcgtcatccgacttctgagtgggcttggcttcgctataaatgacttcgttctccacctggcgtcggcactcgtcaatctctacagatgctgcggtaaccaaggtgggaggctcttcctcctcttccaaatcctctccctcatcctcctcatctgcctgatccaccatgccgtactcctcaagaagatcctgctccatctccttagtgaagccatagcctgtgcaatgtacctcggcatccaaatcatcctcacgcaccaggtcgctgaacttggggtagtcttcgctttcgtaaccaaatttgcgacggaacatttcacgcacgcagttaacatcgcgttcgaagaaactaaaatatatttttctattaatacttgaatactataatcacaaagaaagcttacaattctgcattttcatgcgaggtggacatcatctgagggaaatcaatcagtatgggcttgccggcgtctgtcaccattaaattaaactcattaaaatcgccatgaataactccagaatttcccagacgcacaataaggttcataagatcatcgtaaacttgtggagcgtctagaagttcgtgaacttgggtcctataaaaatgatattcaaaaatacgaataatgataaaagtgactagcttacatgggccagcccttgacgaggtccattaagacgcagtggcggttgaaatcgatgggttttggcactggaaacccacgatcatagagtgccgacatgtaggcaaactcgcgggtagccgagatgcgagataagtacaaccaggaggccttgtgtcggcgaccgtggtagtctcttttggcttttacattcctgaaacaagttcgacccaatcggtgtagtttgaggcaaattggagtgccctcctcatcagccaccacgtagatgttggactccttgccaattccaatctggttgccaaaggaactgaccgatccccgcagtgtgagagacttcagagccagatagtcgtagcccgtgtttgtcaagcggtagccatcatctgtgagccaataattgttaatgaccataaaaacttcaatctgcagccatacatacatttctttccccgttcgtaggccaatagcttgtgcttgcacagctccttgagcagcttgtggactccacccgacttcagattcgcaatggcagcagccaggggaccagggaccagctcgtggttcttcatgcccatctcgatggcggtgaggacgcggaagtcctctttggtgagatatcgcagcactgtcacgtttaatttacccattttcgttctattttgacagtttaacaacgcatttagcaatgttttcgtttcacacgtgcaggcacgataggtggtgagaaatcggtatgcatcgattgtagcaagagtatcgcttataattatatcattttccaactaccgaacattgtaatgcaactggtgttttacatcccggtccggaacggtcacactgacctgcacatcgtcatcaggaagagacaaaatcggggaaatggctggagatgatctgattgcgaaattccaggcgctcggcatgagcgagcaaaaggcgaaggaaactttgaagaatgccaacgtgacaaagaatctccagctgtcgctggcggcggcgggaagcgccaccctatccgacggcactggtatgctgatctaccacatggctaccaagctgaagccgcagactgcggaccatctgcctcttctggtgcgctacatagtggagcacaagctggacaacactcagcgcgttgatgccgccctggagtacctgctcaagtgcggtcagagcctgaatgccaacatagatctgcaggcgcttgagaaggagtgcggcgttggagtggtggtcactccggagcagatcgagcgcactgtgcaggccaagatcaaggccagctacaaggaggccttgttggagcaacgctaccattttaactcttttaaaatcctgcaagatgtccggggagaactcaagtgggcggatgccaagtccgtgaaggcggccatcgatgtggagatcttcgatctgttgggtcccaaaacagaagcagacttgaaacctcagacaaaagcaaacgataagccgaaggctgcaaaaccgaaagctgaagtaactcctgccgctcaaacggctgaagctgcatccgatggagccaccaccatttcggaactcatgaaaaccaaggtacacttccatgctcccggagagaacttcaaggcagatggctacgtggtcaccgagcacacggagcggctacta

SEQ ID NO: 32078 - DNA, 1617 bp, DROSOPHILA
atgggtaaattaaacgtgacagtgctgcgatatctcaccaaagaggacttccgcgtcctcaccgccatcgagatgggcatgaagaaccacgagctggtccctggtcccctggctgctgccattgcgaatctgaagtcgggtggagtccacaagctgctcaaggagctgtgcaagcacaagctattggcctacgaacggggaaagaaatatgatggctaccgcttgacaaacacgggctacgactatctggctctgaagtctctcacactgcggggatcggtcagttcctttggcaaccagattggaattggcaaggagtccaacatctacgtggtggctgatgaggagggcactccaatttgcctcaaactacaccgattgggtcgaacttgtttcaggaatgtaaaagccaaaagagactaccacggtcgccgacacaaggcctcctggttgtacttatctcgcatctcggctacccgcgagtttgcctacatgtcggcactctatgatcgtgggtttccagtgccaaaacccatcgatttcaaccgccactgcgtcttaatggacctcgtcaagggctggcccatgacccaagttcacgaacttctagacgctccacaagtttacgatgatcttatgaaccttattgtgcgtctgggaaattctggagttattcatggcgattttaatgagtttaatttaatggtgacagacgccggcaagcccatactgattgatttccctcagatgatgtccacctcgcatgaaaatgcagaatttttcttcgaacgcgatgttaactgcgtgcgtgaaatgttccgtcgcaaatttggttacgaaagcgaagactaccccaagttcagcgacctggtgcgtgaggatgatttggatgccgaggtacattgcacaggctatggcttcactaaggagatggagcaggatcttcttgaggagtacggcatggtggatcaggcagatgaggaggatgagggagaggatttggaagaggaggaagagcctcccaccttggttaccgcagcatctgtagagattgacgagtgccgacgccaggtggagaacgaagtcatttatagcgaagccaagcccactcagaagtcggatgacgcagtgcgtcggtacattgaatcgtgtacgcaatatctgggtaatctcagcgtaggtccagaagttcccgatcaaacaatgcccaaaaagttggacatttccctgccggctgaaactccagacgttattccattcgaagctgaaacttcggcaactaataccgttgaagaagacgtcaagtccatcagttccaatgatttagatacggatgaagttcccgagctagttggcctggatcctaactcccgcatgtatcgtctcaaaatggtcgagcaaatgctaaatgatgcgagaagtcaacgctcctattctaccacaaccagcacaatagctccgtctgtgattaccgaccggatacgacgcaacatggacattaaggagaagcgggagcagcgaaagaagtgtgtggccaagggagaggctagtgctgtgcatcgtcatcgcaaggagaacaaggatgtggttaaggagtatgctggctgggacttctag

SEQ ID NO: 32079 - protein, 538 aa, DROSOPHILA
MGKLNVTVLRYLTKEDFRVLTAIEMGMKNHELVPGPLAAAIANLKSGGVHKLLKELCKHKLLAYERGKKYDGYRLTNTGYDYLALKSLTLRGSVSSFGNQIGIGKESNIYVVADEEGTPICLKLHRLGRTCFRNVKAKRDYHGRRHKASWLYLSRISATREFAYMSALYDRGFPVPKPIDFNRHCVLMDLVKGWPMTQVHELLDAPQVYDDLMNLIVRLGNSGVIHGDFNEFNLMVTDAGKPILIDFPQMMSTSHENAEFFFERDVNCVREMFRRKFGYESEDYPKFSDLVREDDLDAEVHCTGYGFTKEMEQDLLEEYGMVDQADEEDEGEDLEEEEEPPTLVTAASVEIDECRRQVENEVIYSEAKPTQKSDDAVRRYIESCTQYLGNLSVGPEVPDQTMPKKLDISLPAETPDVIPFEAETSATNTVEEDVKSISSNDLDTDEVPELVGLDPNSRMYRLKMVEQMLNDARSQRSYSTTTSTIAPSVITDRIRRNMDIKEKREQRKKCVAKGEASAVHRHRKENKDVVKEYAGWDF

SEQ ID NO: 32080 - DNA, 2453 bp, DROSOPHILA
gcggactggttatcctttgaatccttcgtaatgtactccacactgatgcgggtcatcacgctggcgtagttctctccattcgctgtcgccggcttgatcgtcagtttcttcagattcaaggtgtcattcttaaagtagactcttaactttttctccacgtactcctctgtcagccacgcgggcgcattgtgggtcgttttctccggcataatgttgaaattctactagctttcgtcagaggtgggcatggcttttatacactgacgagatgctcatgattagatgagacggcacagagcgtatctcatgagtcgtaagctccttaattgccggcaattgaaaagataggcgacagcacatctgaaaaaatttattaggatagggctctgcactgtgtgaaagatcatagaatagcgactgttgttcagctaggctaactagctagaccaacttataagtaaaaaaaataaaacttcacatatcgtctaacaacccctgctgatccagaaacggcagagtgagtagcattttttctcggatgtggtcagcatgatacacagaatctctgaaccggactccactggcggcagtggacaatccttgtgcaatagacgcttcctcagttccggtgtaaagcatgcagggctcggaaatcagtgagcagaaaacagctaaaagaatttcttaaattaaaatttattttcactataacttgcatatacttaccatagaaagatctagccctaaactgcagttgaaattcaaataagctcggaatacgacgcgaatactgtagtttcttcagagattccaccagcctgtagtaataaaactggaccaattcaggctgatgtttccagcgaagatggtcctggatcgaagtggagaagaagtagtgcaaatcgatggccggagagttccacacactgaactgaaaatcaattaggacggcattgatgggatgaccctgttcgtcgtactgaaacatcacatttgttgtctaaagatccccgtgggctagggttaggaaatctcctggattggtcaatgtcgatcgatcgccgtaatccattattgtatccactagccggtctatcttgctctgataacgatcgtttaaatacaaattcagctccagggagcgagatagagcctgtagtaggttcctaaagattggctgaaagcctcgaaaatgtttgttaaagaatcctcgatcgtagttcttctcaaagattccaggctttcgctcggcaagaactgctgcagctgcatggaaatcagccagtttctccaggaccagatgtgtgtgctccaaatccagttttttaagccggcaagcgactttgtagtcctccaacgacaggtcctcaaaaaggattgagtcccgctcgcgatctacattgacggtagctgcaaacatctttcgggaatcctcgagctcgcccctcaccattctggccaggttggttgttgttggtacatgtccatttctctgatggaaaccccgtagccggccagtatattggctgccggatccttggcggcaaaggtggttttcagtaggaaagtagcgctctgagtgtcctttgaatcctttgtgctgtactccagattgatgcgggtcatcacactggcgtaattatctccttttgatgtagccggctcagtctctagtttcttcaactgtagagagtcgtcttcaaaatatctgcataacttatactccacatattcctttgtgagccattcaggatcggtatgggtatttttttctgacattatggatccgaacgttagcgctatagtttaagcagtgaagacagtttgcgatatttcccaaagtcttatcatcttaattacgactaactacgctaatccctctggttaggggcccccaataaaatcgtaaagtacattttattcagagtgttagcattcttcttacttatgtaacgtaatcgtttgtacaaatttacatgtcatccagcaatccccactgatcaagatacggaagtgtttgctgaagctttagcctgacggactcctgctggaacacatcgtctttgaatctcataccacctttgctctccgaaatgatgtggtccagggaaaccttttcttttccatcatacaccataaagggttcaaaaattagagaagcgaacacagctgtaaatcagagtagatttgtatcagatcttaaatatatatacttctctttttttagtgcatccctcagtttgtagaagtagaactggaccagctctggttgattgtttaggcggagcttgtcatggatggaagtggagaagaagtgaagtgaagatcgagggctggtgagttccacacgctaaactggaaatcgatgaaggcagcattaatgggatgtccctttgcacagatctccgtgattgagaatcacaaaatcgccatatagcctgaagctcatctcg

SEQ ID NO: 32081 - DNA, 453 bp, DROSOPHILA
atggtgaggggcgagctcgaggattcccgaaagatgtttgcagctaccgtcaatgtagatcgcgagcgggactcaatcctttttgaggacctgtcgttggaggactacaaagtcgcttgccggcttaaaaaactggatttggagcacacacatctggtcctggagaaactggctgatttccatgcagctgcagcagttcttgccgagcgaaagcctggaatctttgagaagaactacgatcgaggattctttaacaaacattttcgaggctttcagccaatctttaggaacctactacaggctctatctcgctccctggagctgaatttgtatttaaacgatcgttatcagagcaagatagaccggctagtggatacaataatggattacggcgatcgatcgacattgaccaatccaggagatttcctaaccctagcccacggggatctttag

SEQ ID NO: 32082 - protein, 150 aa, DROSOPHILA
MVRGELEDSRKMFAATVNVDRERDSILFEDLSLEDYKVACRLKKLDLEHTHLVLEKLADFHAAAAVLAERKPGIFEKNYDRGFFNKHFRGFQPIFRNLLQALSRSLELNLYLNDRYQSKIDRLVDTIMDYGDRSTLTNPGDFLTLAHGDL

SEQ ID NO: 32083 - DNA, 3312 bp, DROSOPHILA
cacagatccggctccagctccagggatcgggacaaagccatcaaaagattcttcatgatgggctcgtagccgcgggtatgctggttaaagaatccacgatcgaaattcttcgcaaagattccaggctggcgctcagccaaggctgctccggcagcatggaaattggccagcttctcgagtaccagatgagtgtgctccagatccagtttcttgagccgatcggccactctgtaattctccagggacatatcctcgaagatgatcgagtcccgtttccgatcaacataaacagtgcctgcaaatagtttccgggaatctgccagctcatttcgcaccacttccgccatctggggcaggatgcgctcatacagatccaattccctgttgtacactccgtagctcaggagaacctgcgccgccggacctgcgtcggcaaatctggtggaatctggtggattgtttatcctttgatttatccgtcgtatactccacatagatgcgagttatcacgcttgagtagttctccccgttgccaagggccagcttgatgtccaggttcaccaggcggagggagtcatttctaaagtaggaacgcagcttctgctccacatagtcgcgagtgagccaagcgggcaccacttgtgcgcttctattgatttcctggtgatcaacactgcggatttttcatcggtggggttccgcttttatacctcgtcggttaggtaagtacacatttattattcaagtcttatctatcattctatctgacattcctgttatctttcaattcaaccatttgaattagctattagaaatcgtcattgagcttattacatacatatccatttgatgccagcgaactactagaaatttctaaacaattaattgctaaaaataacgaaactatttttaagctaaatttctaggtagatagcagtgataatttgattaattgacttatactgataaggagcatttatttattgtgtggagcattttcttacatttcgtctagtaagcccagttgatcaaggaacggcagagtcaggtgcaacttttttaggttctcctccgtctgatacactgcatccctcagtcgcacgcccttctcatcgctggtcatgaactgctctatggacggctcctccttgccattgtagaccatagtgggctcaaaaatcaacgacgcaaacacagctgagtaaaataaagaaattaaaaattgtataacattttatatacttcgcaaacttaccataaaaacctttggtccgaaactgctgttggaactcaaataaactcggaaccttacccgaatatttcaccctttctagagccaccactagtttatagaagtagaactggaccagctcggtctgacgctccagacgaaggttttcgtggatcgaggttgagaaaaagtattgcagatcgatggccggagaattccaaacgctgaactggaaatcaatgaagatggcattaactggatgaccttcgtcatcgtactggaacatgacattggttgtccaaatatctccatgggccagagtcacaaaatcgccgggagcgacagatgtcgatctttcgccgtagtccattacattatcaattaacctgtcaatcttcgcctggtatcgctcctttagatccggactcaaatcgagggtacgcgacaaggccttaaggatatttttcatgatgggctcgtagcctcgtacatgtttgttaaagaatccacggtcgtagttcttttcaaagattcccggttgccgctgagccagagctgcccccgctgcatggaaatctgccagtttctcaagaaccagataagtgtgctccagatccagtttcttcaccctgcacgcaaccttatacctctccagcgaaaggtcctcgaacataatcgagtcccgctcacgatctacacccacagtagctgcaaacagcttccgagaatcgtggagctcattcttcactatatccgccaatcggggcagtatctgctcgtacatgtcgatctccctggtgtaaatgccgtagttgatgagcaaatgggccgccgggtctttgtcggcgaaggtcgtcttcagcagaaaggttgcggactggttatcctttgaatccttcgtaatgtactccacactgatgcgggtcatcacgctggcgtagttctctccattcgctgtcgccggcttgatcgtcagtttcttcagattcaaggtgtcattcttaaagtagactcttaactttttctccacgtactcctctgtcagccacgcgggcgcattgtgggtcgttttctccggcataatgttgaaattctactagctttcgtcagaggtgggcatggcttttatacactgacgagatgctcatgattagatgagacggcacagagcgtatctcatgagtcgtaagctccttaattgccggcaattgaaaagataggcgacagcacatctgaaaaaatttattaggatagggctctgcactgtgtgaaagatcatagaatagcgactgttgttcagctaggctaactagctagaccaacttataagtaaaaaaaataaaacttcacatatcgtctaacaacccctgctgatccagaaacggcagagtgagtagcattttttctcggatgtggtcagcatgatacacagaatctctgaaccggactccactggcggcagtggacaatccttgtgcaatagacgcttcctcagttccggtgtaaagcatgcagggctcggaaatcagtgagcagaaaacagctaaaagaatttcttaaattaaaatttattttcactataacttgcatatacttaccatagaaagatctagccctaaactgcagttgaaattcaaataagctcggaatacgacgcgaatactgtagtttcttcagagattccaccagcctgtagtaataaaactggaccaattcaggctgatgtttccagcgaagatggtcctggatcgaagtggagaagaagtagtgcaaatcgatggccggagagttccacacactgaactgaaaatcaattaggacggcattgatgggatgaccctgttcgtcgtactgaaacatcacatttgttgtctaaagatccccgtgggctagggttaggaaatctcctggattggtcaatgtcgatcgatcgccgtaatccattattgtatccactagccggtctatcttgctctgataacgatcgtttaaatacaaattcagctccagggagcgagatagagcctgtagtaggttcctaaagattggctgaaagcctcgaaaatgtttgttaaagaatc

SEQ ID NO: 32084 - DNA, 1197 bp, DROSOPHILA
atgccggagaaaacgacccacaatgcgcccgcgtggctgacagaggagtacgtggagaaaaagttaagagtctactttaagaatgacaccttgaatctgaagaaactgacgatcaagccggcgacagcgaatggagagaactacgccagcgtgatgacccgcatcagtgtggagtacattacgaaggattcaaaggataaccagtccgcaacctttctgctgaagacgaccttcgccgacaaagacccggcggcccatttgctcatcaactacggcatttacaccagggagatcgacatgtacgagcagatactgccccgattggcggatatagtgaagaatgagctccacgattctcggaagctgtttgcagctactgtgggtgtagatcgtgagcgggactcgattatgttcgaggacctttcgctggagaggtataaggttgcgtgcagggtgaagaaactggatctggagcacacttatctggttcttgagaaactggcagatttccatgcagcgggggcagctctggctcagcggcaaccgggaatctttgaaaagaactacgaccgtggattctttaacaaacatgtacgaggctacgagcccatcatgaaaaatatccttaaggccttgtcgcgtaccctcgatttgagtccggatctaaaggagcgataccaggcgaagattgacaggttaattgataatgtaatggactacggcgaaagatcgacatctgtcgctcccggcgattttgtgactctggcccatggagatatttggacaaccaatgtcatgttccagtacgatgacgaaggtcatccagttaatgccatcttcattgatttccagttcagcgtttggaattctccggccatcgatctgcaatactttttctcaacctcgatccacgaaaaccttcgtctggagcgtcagaccgagctggtccagttctacttctataaactagtggtggctctagaaagggtgaaatattcggctgtgtttgcgtcgttgatttttgagcccactatggtctacaatggcaaggaggagccgtccatagagcagttcatgaccagcgatgagaagggcgtgcgactgagggatgcagtgtatcagacggaggagaacctaaaaaagttgcacctgactctgccgttccttgatcaactgggcttactagacgaaatgtaa

SEQ ID NO: 32085 - protein, 398 aa, DROSOPHILA
MPEKTTHNAPAWLTEEYVEKKLRVYFKNDTLNLKKLTIKPATANGENYASVMTRISVEYITKDSKDNQSATFLLKTTFADKDPAAHLLINYGIYTREIDMYEQILPRLADIVKNELHDSRKLFAATVGVDRERDSIMFEDLSLERYKVACRVKKLDLEHTYLVLEKLADFHAAGAALAQRQPGIFEKNYDRGFFNKHVRGYEPIMKNILKALSRTLDLSPDLKERYQAKIDRLIDNVMDYGERSTSVAPGDFVTLAHGDIWTTNVMFQYDDEGHPVNAIFIDFQFSVWNSPAIDLQYFFSTSIHENLRLERQTELVQFYFYKLVVALERVKYSAVFASLIFEPTMVYNGKEEPSIEQFMTSDEKGVRLRDAVYQTEENLKKLHLTLPFLDQLGLLDEM

SEQ ID NO: 32086 - DNA, 3319 bp, DROSOPHILA
gaggcagttcgtcctgcagctcgaaaggggcagattctttggtgagtcccatctggaatgattttcaaaaacccattataattgtttatattattgtatctaacagctgtcacagtcgctctggtctgccaggccatattgaccaatgaccaaaacgccgatgccgactttaatgctttgatgaaggatgacgaacgaggccgtaacttccggaaggtattgtacaccaacaagaggttgcaggacaatctcaaacgcgagctgccacgcttcgatcggagtggtctactagacgtaattgactgaatggaagccatcatatactacgagtatttgataaaaaataaaaacaaattttattttgaagttaaaaccatatgaaaagcagttcatttttattgcaagttggtaagcaataagattagaaatagaacacacaatggttctattgtaaatgtttgtattcataaaactatattaaatgtgacgttttaaagcaaacgataagcgggccaacggtgcgtatgagttataagggggacgcaacaattcacttacaagttttttcctcagtagtacaccttgacttgttaaatacattcgtattcgtatttatttgttgtaggtaaatattagtttcttttattagctaaaacatctgcggcttatcttttggcgtatcgcgattgtttctatttcaccacgattcaagggcttgtaattgttatcttctgagatttttagtattgcttgcaccttttgtttgtcaagagtttagcactatcttgccgaaataaactcgaaagcgctattatcagtcatgaacactgtatttcatataaaaaggtcagttattgccgaattacacacataaagtgcaatcaagctattagataagtattttcccaggaaattaaaagcaacgacgtagttgagccaatacgtagtagtacttaaacttttatttattttaactatttacacaagttcaagattatcattacatgtcatccagcaatccaaactgatccagaaaaggcagtgtgacacttaatttcttttttatattttccgattcataaactgagttcttgaatcgcattccactctcggaactggataggacctgctcaatagaagcatcctctttgccctcgtactgcatgacaggctcaaaaatcaaggaacagaatacggctgcggataaattatttaaaaaactattttgaaagagagttaagaactgtacccaccatagaatcctctcgagcggaactgcagttggaagtcgaacaagctgggtatccgaccagcatattttaacttccttagggcctccgtcagcctatagtaataaaactgaaccaattctgtttgatgttccaagcgaagattatcctgcaacgaggtggagaagaagtagtggagatcgatggccggcgagttccacacgctgaactggaagtcaatgaagatggcattcgtgggatgctcttttgcatcgtactggaacataaagttggtggtccaaagatctccatgggccagagttaaaaagtcgccaggactactagtcgtcgatctttcgccatagtccatcaaacgttccacaagcctgtcgatcttggccttgtaccgctgtcccaactcctcatccgaagcaagggagcgggacagagcctccagaagattggtcatgatcggggcgtatgcccgggtgtgtttgttgaaaaagccacgatcatagttcttgtcgaagatacccggctgtcgctcggcgagaactgatgaagctgcatgaaagagggccagtttctccagtaccaggtgggtgtgttctaggtccagcttctttcgacggcatgcaaccttgtaatgatccagtgacatgtcctcgaagatgatcgagtccctttcgcggtccacattcatggtggccgcaaagagcttcctggagtctttaagctccttcctcaccatatccgccagctggggaaggatgtgctcgtatatatccatttcacgggtgtagacaccatagtggatgagcacatcgccggctggatcccggtcagcgaatgtggtcttaaccagaaatgtggtggactgtttccctttcgataccttggtcgtgtactccacattgatgcgggtcatcacgctgccgtagtttcctccattggccacggctggctttgtatccaacgtcgccagcttcagtgagctatccttgaagtaggtgcgcaacttatcctgcacatattccgaggtgagccaaactggcgctgggtgaactttgtgggtagatttctcagtcatgatcctatccgtaactcagggctttcgcttctgcgacattgcgaacggagtccgaccacttttatagccaactttagtgtatatatgataagtttagtgcaagtatctcgtggcaactggcttcgtcatggacaaacaacacttgaacaatttcgagtctggtcgaacgctcacgttttttgcaatgcactttttattaagtattcctggtaaccaaaatttcgcaacttatcaccatatacagattcatcgcaacaaatttataattaattcattttgttttacatttcccaaagaagagaaatacaacttaatattttttattgtttgttatcgaatatcgtaaaaagtaagtgaattaatttagtgggttgccttgatagtttttccaagaattcccccgtatcgtcgtctgtagctaattttaatgtcaatatcaacaaaaacaattagaaaactttttaatacggattttgtcccgttttcatgttttctaaacatttacctacaattagcacctgtgaattgtcattcataagtgcatacacaattaataaaagttagtaatagcagggaaagtaatcgaaattattttgtatttattatattttataagcaaatataaaatctataattacgataataatattactattttcgctttacatcacgtctagtaaacccaaatgatcaagaaagggcaaagtgagacgcatctttttcctggtctcctccgcctgaaatgcgtcatccttaaagcgcattcccttctccgaaagggatattatctgatccattgatgcctcttccttgcccgtgtacgtcatcgttggttcaaagatcagtgatgcgaaggcagctgaatgataacataaatgaatataaattccttaaccaggcacgttagtatacccaccatagaaggatctgttcctgaactgctgatggaagacgaataggctcggaacatttccggaatactggactttcttcaaggcag

SEQ ID NO: 32087 - DNA, 1263 bp, DROSOPHILA
atgactgagaaatctacccacaaagttcacccagcgccagtttggctcacctcggaatatgtgcaggataagttgcgcacctacttcaaggatagctcactgaagctggcgacgttggatacaaagccagccgtggccaatggaggaaactacggcagcgtgatgacccgcatcaatgtggagtacacgaccaaggtatcgaaagggaaacagtccaccacatttctggttaagaccacattcgctgaccgggatccagccggcgatgtgctcatccactatggtgtctacacccgtgaaatggatatatacgagcacatccttccccagctggcggatatggtgaggaaggagcttaaagactccaggaagctctttgcggccaccatgaatgtggaccgcgaaagggactcgatcatcttcgaggacatgtcactggatcattacaaggttgcatgccgtcgaaagaagctggacctagaacacacccacctggtactggagaaactggccctctttcatgcagcttcatcagttctcgccgagcgacagccgggtatcttcgacaagaactatgatcgtggctttttcaacaaacacacccgggcatacgccccgatcatgaccaatcttctggaggctctgtcccgctcccttgcttcggatgaggagttgggacagcggtacaaggccaagatcgacaggcttgtggaacgtttgatggactatggcgaaagatcgacgactagtagtcctggcgactttttaactctggcccatggagatctttggaccaccaactttatgttccagtacgatgcaaaagagcatcccacgaatgccatcttcattgacttccagttcagcgtgtggaactcgccggccatcgatctccactacttcttctccacctcgttgcaggataatcttcgcttggaacatcaaacagaattggttcagttttattactataggctgacggaggccctaaggaagttaaaatatgctggtcggatacccagcttgttcgacttccaactgcagttccgctcgagaggattctatgccgtattctgttccttgatttttgagcctgtcatgcagtacgagggcaaagaggatgcttctattgagcaggtcctatccagttccgagagtggaatgcgattcaagaactcagtttatgaatcggaaaatataaaaaagaaattaagtgtcacactgccttttctggatcagtttggattgctggatgacatgtaa

SEQ ID NO: 32088 - protein, 420 aa, DROSOPHILA
MTEKSTHKVHPAPVWLTSEYVQDKLRTYFKDSSLKLATLDTKPAVANGGNYGSVMTRINVEYTTKVSKGKQSTTFLVKTTFADRDPAGDVLIHYGVYTREMDIYEHILPQLADMVRKELKDSRKLFAATMNVDRERDSIIFEDMSLDHYKVACRRKKLDLEHTHLVLEKLALFHAASSVLAERQPGIFDKNYDRGFFNKHTRAYAPIMTNLLEALSRSLASDEELGQRYKAKIDRLVERLMDYGERSTTSSPGDFLTLAHGDLWTTNFMFQYDAKEHPTNAIFIDFQFSVWNSPAIDLHYFFSTSLQDNLRLEHQTELVQFYYYRLTEALRKLKYAGRIPSLFDFQLQFRSRGFYAVFCSLIFEPVMQYEGKEDASIEQVLSSSESGMRFKNSVYESENIKKKLSVTLPFLDQFGLLDDM

SEQ ID NO: 32089 - DNA, 3409 bp, DROSOPHILA
atggtaaatgcagggaacaaatagctttgtatcgtctccggattcccgcagaattctctcgaattccggaagaacctggcagtacattccgatctcggtttcgaatagatgcgattcgctgagcatatccttcttgtgtccatcctgctcgggcatcgccttgatgattagtggcctactgaactttcccttcgcggtggtacactctgcagttgttcggaacataacgctggcatagtgatctccctgggcacttgcgggtgtgattttaagatcgacaacttttagttccggggaatcttcgtacgcgctcagaatttcctctataaattgacgattcagccaagcaggtgcctctagttcgtcgtcgttaaattgttccgcatctaacttgtcagtcatattgctcgctgttgcacaatctagtagataagtgccacgactattctgagtggcgttgtagtttattatggaaaaccctattacaggcttgtcccattttaagcaaaatgctcgagctttcaaaatgttttgctcaagctttgggtatacaccaccacccactgttcgataatcagttgtaacctctaaggtggggctgatcccatgtcaaggtataaatagaaaagctatcaattagtattcttttataagtcattgcacctaaaccggtatctttcattacagatctttacatcgtatcttcatttcactaagcacttagttaaaaaaaaaaaaaacaaaccacatcaaagcaatatgtataccttttcgattactatagtttctactgattagatcggtgtcagaatgacccatccaatgaagtgacgaaaggtaaacaaaacgcttgatatgattacggttagttttattacaagtggtatatagaatgtgctttatattactttactaaaatatcttaacttaatatataattttctttggatacattttggctagctaatactacataacacagttatattgtaaagatttctcactggtcggcatcaagaagaccctctgcctcgaaatcaggcagaagttcccgcaagatcctttgagcaatcggattcctatagcaggcatccttgaaattcatggcccgttggttgttctccattagggcattaaaatcggcatctgctgtttccacatttcgctgaactggaaacaccgaaatggatgtgtgggcagctgaaaatcaagagatgaatttggtaattagcaacagaaggtctaatctggttacattttaactcaccgtagaatttcttctgctgcaattgctggtggaactgatgcaagcttggaattgtggatcggtactgcagttttttcaatgtatctgcgaaatgcctaaagtagtaggcaatcagctgctcctgatggttctgatgaagatcgaactccaacgaggagttcatgaagtaaaacagatcaagtgccggcgatccccaggccgtgtattggaaatcaataataaccacgtcaattggctcaccggtctgcttgtcgtacttaaccagcacattattggtccaaagatctccgtgagccaggacattaatgtgcccaggactaatgtcgaagattcttttgcccagttccatgtagatgggcaccagagcctttaacttctctgcgtacttttcgtatcctggccactgagccacacgcctagtggccgcctggagcatgcccacaaatgctggttcatagttatcggtatagcggttgaagaaccctcgatcgtagctctcgaggatgtggttctcgcgttcgttcaggaccgccgaagtggcatgcattttggccagcttacggagcacaattcgagctagcttctggtccaatccgaccaagcgatccggcattacaaagccacgagcattcagatcttcgaaaatcagcgccgagttatctatgtccaccgccatggtttcggcaaagatctgctccgcatcaccgatttcccggaggagggccttctgcttgggcaagacctgctcgtagatgatcatctcacgattgaagatgtcgtacggcttcatggcattctgggcgaactcattcccctcaaatgtggactttacaatgtagtgacccagttgggagctaccatcgctccgagtgaactgtgccttcacacgggtgaggactccaccgtagttttcacccttgcccaaggcaggattaaccttgacccagttgatcctaatgagttggtccttgtagtatttgcgcaaggcatcctgcagatagctttcggtcagccattcaggagcatccaggaaaaccgaagtttcttccggcacaagagactcgggaacggtgagcttgggaatggcatcaagggcaccaatcagatccgaaaccgacatattgaaaatgatctttaactgtaagacttgtgaatgagattgtgcctaaaactcagagtacctgcgcttttatggcaaaatttcagacgctgtaaactgttcccacagctcctagatatgaaaccgtatatatccgagggccctccgtcacaactgtgattaatataaccataaaatctcagattttgtagctgtgaacgtatgcacacaacgggcgtacagaacagattacactttttattggtcaccccacccccagaacccatttcgggatccgtcccgtgcctctagtctggtaatctgaatacccagattcacctctcgcgccgtggctaccgcctaattgtaaattgtttgagtttgccaaaggcaagccagttaatctttatagcacctgctgtggatttagggatgcagcagccttctagtaattaacctggctcgcaaatgctaaacgattcccagccatatcattccaaaagcgagtgatttgtttgaatgctaacgtcaaacgctgggagaaatcttagggatatacgcaaaaaaaagtactatatctaagtgatagactggcatccataatctttttacaaagttcaatacactcagggcttaagttacttacttccttattgtatacatattcaaaccattattgttatctattatatccaataatacctttttataagaacatatttaaaatgaaaaggttgaaatatttaacattctgtctgtaaaatcggtttatatatatgcatttcccacaactaactttttatacagtctgcttatcttaatttagcttaataaactttgttagccttatactgactgataaacttagttttctttgtctaggtacatacaagtgagtttgtaaactatttttcaatggtttatagcttccttaagaaaattcgcttaagtaagtcgataatttaaagcataagagctttaaacaaaaatgtattttttcaaaaatttatttcaaaccatgctttttaaaactgtagcacttt

SEQ ID NO: 32090 - DNA, 1342 bp, DROSOPHILA
acagttaaagatcattttcaatatgtcggtttcggatctgattggtgcccttgatgccattcccaagctcaccgttcccgagtctcttgtgccggaagaaacttcggttttcctggatgctcctgaatggctgaccgaaagctatctgcaggatgccttgcgcaaatactacaaggaccaactcattaggatcaactgggtcaaggttaatcctgccttgggcaagggtgaaaactacggtggagtcctcacccgtgtgaaggcacagttcactcggagcgatggtagctcccaactgggtcactacattgtaaagtccacatttgaggggaatgagttcgcccagaatgccatgaagccgtacgacatcttcaatcgtgagatgatcatctacgagcaggtcttgcccaagcagaaggccctcctccgggaaatcggtgatgcggagcagatctttgccgaaaccatggcggtggacatagataactcggcgctgattttcgaagatctgaatgctcgtggctttgtaatgccggatcgcttggtcggattggaccagaagctagctcgaattgtgctccgtaagctggccaaaatgcatgccacttcggcggtcctgaacgaacgcgagaaccacatcctcgagagctacgatcgagggttcttcaaccgctataccgataactatgaaccagcatttgtgggcatgctccaggcggccactaggcgtgtggctcagtggccaggatacgaaaagtacgcagagaagttaaaggctctggtgcccatctacatggaactgggcaaaagaatcttcgacattagtcctgggcacattaatgtcctggctcacggagatctttggaccaataatgtgctggttaagtacgacaagcagaccggtgagccaattgacgtggttattattgatttccaatacacggcctggggatcgccggcacttgatctgttttacttcatgaactcctcgttggagttcgatcttcatcagaaccatcaggagcagctgattgcctactactttaggcatttcgcagatacattgaaaaaactgcagtaccgatccacaattccaagcttgcatcagttccaccagcaattgcagcagaagaaattctacgctgcccacacatccatttcggtgtttccagttcagcgaaatgtggaaacagcagatgccgattttaatgccctaatggagaacaaccaacgggccatgaatttcaaggatgcctgctataggaatccgattgctcaaaggatcttgcgggaacttctgcctgatttcgaggcagagggtcttcttgatgccgaccagtga

SEQ ID NO: 32091 - protein, 439 aa, DROSOPHILA
MSVSDLIGALDAIPKLTVPESLVPEETSVFLDAPEWLTESYLQDALRKYYKDQLIRINWVKVNPALGKGENYGGVLTRVKAQFTRSDGSSQLGHYIVKSTFEGNEFAQNAMKPYDIFNREMIIYEQVLPKQKALLREIGDAEQIFAETMAVDIDNSALIFEDLNARGFVMPDRLVGLDQKLARIVLRKLAKMHATSAVLNERENHILESYDRGFFNRYTDNYEPAFVGMLQAATRRVAQWPGYEKYAEKLKALVPIYMELGKRIFDISPGHINVLAHGDLWTNNVLVKYDKQTGEPIDVVIIDFQYTAWGSPALDLFYFMNSSLEFDLHQNHQEQLIAYYFRHFADTLKKLQYRSTIPSLHQFHQQLQQKKFYAAHTSISVFPVQRNVETADADFNALMENNQRAMNFKDACYRNPIAQRILRELLPDFEAEGLLDADQ

SEQ ID NO: 32092 - DNA, 5225 bp, DROSOPHILA
aatatcatcacctgatgaggttccaagctgtgatagatacaaggcgcatagagcttggtagtatcccctgcctcccggagaattctctcgagctctggaagagctttgctgtacattaagatctccgttttgaatatcggcgaatttgacagcatatcctttttgtgaccttcctgttccggcattgttttaactatcagtgccttggagaaattccccttggcggtggagtagtgggaaacagctcggaacatgacgctggcataatgatctccctgcagagtcgcaggactaattttcaaatcagttacatgcaattcaggatccttttcataagctcttagagcgccctcgataagttccgcatttagccaagctggggcatccacctcatccgcattaaattgtgctgaatctacgttttccgccatacctctaccaactttgcaagcttttactaaactgactactgatcatttgagttttcaagagcgttattgagggcctacttatgatattaaaagaataaagataacaatttgcaaagcttttttttgtctgtgtacggagataatgtattttgagtagaagagacaagttaatatgcggaagcttcataacaataattttcttgaaatatctgaagcttaaaaagtttaaaccaattgagcttttactatgcacaataacgtcaagtcatgatgttaggcgaaattaatttcaacaggaacgcaaagcaataataattgttatgattcccttttctttcgtaattcataccaaaattgtgtaaatagtgacaaaaacttaccttgaattgacacttaaggaccatttacaataagtacttaaaaaaataattacagatagtgatgagttttgcgcaaacatcagaatcaattctaaatttaatatctaaagtattattatgcatgaaatttaaaggtgaatttgtattgctagtttattgaaattcctattacataaatcattaattacattatagatccttaaagtatcctagttgttcatacttggtcaaaagcttatagacatcttgaacatagtcgtctaggaagtaggacttcagtcgggcctgggaatcttggagtgcctcatgcattttcaaatcatttgatttaacgcccaccattataggaagaaaggtgcttatcagaaagaaatctgaaatgagttgaatatggtgttactgctaaagctttgagttcccacttgaccgactctcttaccataatacttgttattttgtatttgctcccacaattctctttgggtaggcatatcccccttgtatccaattttcctgagggtggctaccaaaaccgaaaaatattcattgatcaagttctctcccatttcccagcgctgttccggctccatcagcatatatacggagtatgtcaagtccactgtaatggggcacagattgctcaattgaaagtcgactaacatcacgtcatcgtaggctcccaactccttattgtgtctaaacatcatattgcgaagatggaagtcaccgtgacacaggacgtagtaccgatcgtttcgccgatatttgtgatattcatgcatctcaacctctaggcgttgcatgtaattatctttaatcttttcaaaatgatgtttatactttcttagttccggcattttgtccagcatttcaataaagtttgtcatgcctgttgttataaaaggatcagtatcgattgtgggcatttcgaataagccatactgaaattcctttaggaagtatggttgctaaagggaaaaaagatgtgaaaaggatatttgtcacgcaaccaatgaatcctacctcattgatgactttcatgctgaccgcatgccacttggccagcttgtcgaaggccaatttcaaatcccccagtgagggcgggctatcgcggatgacggtgtacccctgcggaaccagatcctcgaatatcatcacttgccgcggcttcaagctgtgataaatgcagggcacaaacagtttggtattgtcccctgcttctcggaggatcctttcgaactctggaagggcatggcagtacattccgatttccgtttcgaataaatgcgattcggacagcatgtcctttttatgtccttcctgctctggcatagttttgatgatcagtggcttgaagaactttcccttaggtgttgtgtactccactttggtgcggaacataacgctggcatagtgatctccctgggcagtggcgggtgatacctgcagatcggttactttaagatccgggagttgctcgtactctctcagaatatcaccgataaactgagcatttagccaagctggcgcctgaagttcgtccgcattatattcaatatttttgccttccattttcaaaatgttctattgggttttattagaatcagtagtataaccgttccgagagctctgcgaactaccagtataataagtctgtcaagtgacgatcattttaaagaaaacctgaggagcttttattaagcttttaatttattaaggtatatttaaaaatatttcaattgctcgtcaaactgcttaatcttatcattccttccaataaactttgcaaaacattgtttaggccttcaacttaggccaaacaaaagtggaggtgataagcaaagttgttgtatccttgctgaaaaaagtctttccgtttcatgtttcagtaataatcttttattggaagaaatgttcctttcgtaagtacttatgtacatatgtatttcaaccggaaaacaaaataatggaataaacaaaataagggcaacatatttatgtaaataaatgagagctatagacatttaaagtagccaagttgctcgaatttcggcaatagtttggaaacatctttaacatatgtatccaaaaagtaggttttttggcgggtttccggatcctgtataaggtcgttcactttaaaactcttcgatttgatggccaaaatcaagggcagaaaagtgctcaacaaaaagaaatctaaaagttaattaaagaacgcattattataatttttcacaattcattttttgataagtggctgactcaccataatacttgttcttatggatttcatcccagagtttcgcttgggttggcagttcacctgggtatccaatgctcttgagggtggcaaccaaaacggttaagtagtgattaatcaagtcctttcccatttctctgcgttgttccggctccatcagcatatagatggaatatgtgagatcaattgtgatgggacaaaggttgctaatctggaaatccaccagcatggtatcctcgtgggctcccgtccccttgttgttcttgaacatcatattgcgaagatggaagtcaccatgacagaggacatagaaggcatcactctttcgattttcatggtattccttcatcacagcttgtagtcgttgcatgtacttatcttttatcttttcgaaatgaggcttatactttcttagctctggtaatctgtccagcatttcaatgaagctctgcatgccagttgtaataaaagggtcggtctttacagtgggcatctcgaagaggccatacttaaactcctttaggaagtcaggttgctgtttgagtcaaaaacatattggaatatagaactcccataattacctaaattaaacctacctccttaatgtatttcatgctaattgcatgccatttggccagtttagcaaaggctgttttgagttcttcctgagcaaccggacggtctcgaatgacataatatccctggggcacaaggtcctcaaatatcatcaccttacgcggctccaggctatggtaaatgcagggaacaaatagctttgtatcgtctccggattcccgcagaattctctcgaattccggaagaacctggcagtacattccgatctcggtttcgaatagatgcgattcgctgagcatatccttcttgtgtccatcctgctcgggcatcgccttgatgattagtggcctactgaactttcccttcgcggtggtacactctgcagttgttcggaacataacgctggcatagtgatctccctgggcacttgcgggtgtgattttaagatcgacaacttttagttccggggaatcttcgtacgcgctcagaatttcctctataaattgacgattcagccaagcaggtgcctctagttcgtcgtcgttaaattgttccgcatctaacttgtcagtcatattgctcgctgttgcacaatctagtagataagtgccacgactattctgagtggcgttgtagtttattatggaaaaccctattacaggcttgtcccattttaagcaaaatgctcgagctttcaaaatgttttgctcaagctttgggtatacaccaccacccactgttcgataatcagttgtaacctctaaggtggggctgatcccatgtcaaggtataaatagaaaagctatcaattagtattcttttataagtcattgcacctaaaccggtatctttcattacagatctttacatcgtatcttcatttcactaagcacttagttaaaaaaaaaaaaaacaaaccacatcaaagcaatatgtataccttttcgattactatagtttctactgattagatcggtgtcagaatgacccatccaatgaagtgacgaaaggtaaacaaaacgcttgatatgattacggttagttttattacaagtggtatatagaatgtgctttatattactttactaaaatatcttaacttaatatataattttctttggatacattttggctagctaatactacataacacagttatattgtaaagatttctcactggtcggcatcaagaagaccctctgcctcgaaatcaggcagaagttcccgcaagatcctttgagcaatcggattcctatagcaggcatccttgaaattcatggcccgttggttgttctccattagggcattaaaatcggcatctgctgtttccacatttcgctgaactggaaacaccgaaatggatgtgtgggcagctgaaaatcaagagatgaatttggtaattagcaacagaaggtctaatctggttacattttaactcaccgtagaatttcttctgctgcaattgctggtggaactgatgcaagcttggaattgtggatcggtactgcagttttttcaatgtatctgcgaaatgcctaaagtagtaggcaatcagctgctcctgatggttctgat

SEQ ID NO: 32093 - DNA, 2340 bp, DROSOPHILA
atgactgacaagttagatgcggaacaatttaacgacgacgaactagaggcacctgcttggctgaatcgtcaatttatagaggaaattctgagcgcgtacgaagattccccggaactaaaagttgtcgatcttaaaatcacacccgcaagtgcccagggagatcactatgccagcgttatgttccgaacaactgcagagtgtaccaccgcgaagggaaagttcagtaggccactaatcatcaaggcgatgcccgagcaggatggacacaagaaggatatgctcagcgaatcgcatctattcgaaaccgagatcggaatgtactgccaggttcttccggaattcgagagaattctgcgggaatccggagacgatacaaagctatttgttccctgcatttaccatagcctggagccgcgtaaggtgatgatatttgaggaccttgtgccccagggatattatgtcattcgagaccgtccggttgctcaggaagaactcaaaacagcctttgctaaactggccaaatggcatgcaattagcatgaaatacattaaggagcaacctgacttcctaaaggagtttaagtatggcctcttcgagatgcccactgtaaagaccgacccttttattacaactggcatgcagagcttcattgaaatgctggacagattaccagagctaagaaagtataagcctcatttcgaaaagataaaagataagtacatgcaacgactacaagctgtgatgaaggaataccatgaaaatcgaaagagtgatgccttctatgtcctctgtcatggtgacttccatcttcgcaatatgatgttcaagaacaacaaggggacgggagcccacgaggataccatgctggtggatttccagattagcaacctttgtcccatcacaattgatctcacatattccatctatatgctgatggagccggaacaacgcagagaaatgggaaaggacttgattaatcactacttaaccgttttggttgccaccctcaagagcattggatacccaggtgaactgccaacccaagcgaaactctgggatgaaatccataagaacaagtattatggcaaaaatattgaatataatgcggacgaacttcaggcgccagcttggctaaatgctcagtttatcggtgatattctgagagagtacgagcaactcccggatcttaaagtaaccgatctgcaggtatcacccgccactgcccagggagatcactatgccagcgttatgttccgcaccaaagtggagtacacaacacctaagggaaagttcttcaagccactgatcatcaaaactatgccagagcaggaaggacataaaaaggacatgctgtccgaatcgcatttattcgaaacggaaatcggaatgtactgccatgcccttccagagttcgaaaggatcctccgagaagcaggggacaataccaaactgtttgtgccctgcatttatcacagcttgaagccgcggcaagtgatgatattcgaggatctggttccgcaggggtacaccgtcatccgcgatagcccgccctcactgggggatttgaaattggccttcgacaagctggccaagtggcatgcggtcagcatgaaagtcatcaatgagcaaccatacttcctaaaggaatttcagtatggcttattcgaaatgcccacaatcgatactgatccttttataacaacaggcatgacaaactttattgaaatgctggacaaaatgccggaactaagaaagtataaacatcattttgaaaagattaaagataattacatgcaacgcctagaggttgagatgcatgaatatcacaaatatcggcgaaacgatcggtactacgtcctgtgtcacggtgacttccatcttcgcaatatgatgtttagacacaataaggagttgggagcctacgatgacgtgatgttagtcgactttcaattgagcaatctgtgccccattacagtggacttgacatactccgtatatatgctgatggagccggaacagcgctgggaaatgggagagaacttgatcaatgaatatttttcggttttggtagccaccctcaggaaaattggatacaagggggatatgcctacccaaagagaattgtgggagcaaatacaaaataacaagtattatgatttctttctgataagcacctttcttcctataatggtgggcgttaaatcaaatgatttgaaaatgcatgaggcactccaagattcccaggcccgactgaagtcctacttcctagacgactatgttcaagatgtctataagcttttgaccaagtatgaacaactaggatactttaaggatctataa

SEQ ID NO: 32094 - protein, 779 aa, DROSOPHILA
MTDKLDAEQFNDDELEAPAWLNRQFIEEILSAYEDSPELKVVDLKITPASAQGDHYASVMFRTTAECTTAKGKFSRPLIIKAMPEQDGHKKDMLSESHLFETEIGMYCQVLPEFERILRESGDDTKLFVPCIYHSLEPRKVMIFEDLVPQGYYVIRDRPVAQEELKTAFAKLAKWHAISMKYIKEQPDFLKEFKYGLFEMPTVKTDPFITTGMQSFIEMLDRLPELRKYKPHFEKIKDKYMQRLQAVMKEYHENRKSDAFYVLCHGDFHLRNMMFKNNKGTGAHEDTMLVDFQISNLCPITIDLTYSIYMLMEPEQRREMGKDLINHYLTVLVATLKSIGYPGELPTQAKLWDEIHKNKYYGKNIEYNADELQAPAWLNAQFIGDILREYEQLPDLKVTDLQVSPATAQGDHYASVMFRTKVEYTTPKGKFFKPLIIKTMPEQEGHKKDMLSESHLFETEIGMYCHALPEFERILREAGDNTKLFVPCIYHSLKPRQVMIFEDLVPQGYTVIRDSPPSLGDLKLAFDKLAKWHAVSMKVINEQPYFLKEFQYGLFEMPTIDTDPFITTGMTNFIEMLDKMPELRKYKHHFEKIKDNYMQRLEVEMHEYHKYRRNDRYYVLCHGDFHLRNMMFRHNKELGAYDDVMLVDFQLSNLCPITVDLTYSVYMLMEPEQRWEMGENLINEYFSVLVATLRKIGYKGDMPTQRELWEQIQNNKYYDFFLISTFLPIMVGVKSNDLKMHEALQDSQARLKSYFLDDYVQDVYKLLTKYEQLGYFKDL

SEQ ID NO: 32095 - DNA, 2564 bp, DROSOPHILA
ataataaatgtatgttttaaatgtttcttttagaatttcgaaatcaatagcgggaaagaactttaccttgaatgcatgcaactttacacgtatatgtttgttaataacgagtgcaattatgtaggtaaatgtgaagttatttttttatttcaattaattttatacaatcggattaaagatctttaaaatatcccagttcttcgaattttcgcaatagcatcttgacatccgtaatgtattcatccaaaaagaaagacttttgtttcgtttgcggatcaaaaaatgaatccatacttttaaatgttttcgtattcatggcagccaccaggggtagaaagctggtcatcatgaagaattctataacgatgtaacaaggaataagcatacaagtcaacagctgtctttcaattttagttccttaccgtaatccttatggccatgaatatgctcccacactcctgtctgagttggcatttcacctttgaagcctatttttttcagagtgtccgccagaacagagaaataataattgatatattcctttccaagatcccaacgatcctccgtatccattaccatgaagatggagtaaattaggtcaatggaaagggggcaaacattactgatctggaaatccaccagcattacgtcctcgaaagaccctgtttccttgttatacctaaacatcatgttgcgcccatgaaaatccccgtgacacagcacgtagtacctatttggcttcggattagtgcgatattcttccatgactgcactcatctgctgaatgtagttatcctttattttttcgaaatacggcttatatttcgtgagttccggaaccttgtctaacatttccaggaaacagggtactccagttgtcactatagaatcgttcagaaagttgggcatgccccataacccatacttaaattccttaagaaagtcaggtcgcttgaaaagaaaagttcttactttgttatcttttgcaatggatggtgcactagttcacctcatttaaaactttcatgctggctgcatgccactttgccaacttgaagaaggctttctgaagttcttctttattaggataacgatctcggatgacggtgtacccctgtggcaccagatcctcgaatatcatcacctgatgaggttccaagctgtgatagatacaaggcgcatagagcttggtagtatcccctgcctcccggagaattctctcgagctctggaagagctttgctgtacattaagatctccgttttgaatatcggcgaatttgacagcatatcctttttgtgaccttcctgttccggcattgttttaactatcagtgccttggagaaattccccttggcggtggagtagtgggaaacagctcggaacatgacgctggcataatgatctccctgcagagtcgcaggactaattttcaaatcagttacatgcaattcaggatccttttcataagctcttagagcgccctcgataagttccgcatttagccaagctggggcatccacctcatccgcattaaattgtgctgaatctacgttttccgccatacctctaccaactttgcaagcttttactaaactgactactgatcatttgagttttcaagagcgttattgagggcctacttatgatattaaaagaataaagataacaatttgcaaagcttttttttgtctgtgtacggagataatgtattttgagtagaagagacaagttaatatgcggaagcttcataacaataattttcttgaaatatctgaagcttaaaaagtttaaaccaattgagcttttactatgcacaataacgtcaagtcatgatgttaggcgaaattaatttcaacaggaacgcaaagcaataataattgttatgattcccttttctttcgtaattcataccaaaattgtgtaaatagtgacaaaaacttaccttgaattgacacttaaggaccatttacaataagtacttaaaaaaataattacagatagtgatgagttttgcgcaaacatcagaatcaattctaaatttaatatctaaagtattattatgcatgaaatttaaaggtgaatttgtattgctagtttattgaaattcctattacataaatcattaattacattatagatccttaaagtatcctagttgttcatacttggtcaaaagcttatagacatcttgaacatagtcgtctaggaagtaggacttcagtcgggcctgggaatcttggagtgcctcatgcattttcaaatcatttgatttaacgcccaccattataggaagaaaggtgcttatcagaaagaaatctgaaatgagttgaatatggtgttactgctaaagctttgagttcccacttgaccgactctcttaccataatacttgttattttgtatttgctcccacaattctctttgggtaggcatatcccccttgtatccaattttcctgagggtggctaccaaaaccgaaaaatattcattgatcaagttctctcccatttcccagcgctgttccggctccatcagcatatatacggagtatgtcaagtccac

SEQ ID NO: 32096 - DNA, 564 bp, DROSOPHILA
atggcggaaaacgtagattcagcacaatttaatgcggatgaggtggatgccccagcttggctaaatgcggaacttatcgagggcgctctaagagcttatgaaaaggatcctgaattgcatgtaactgatttgaaaattagtcctgcgactctgcagggagatcattatgccagcgtcatgttccgagctgtttcccactactccaccgccaaggggaatttctccaaggcactgatagttaaaacaatgccggaacaggaaggtcacaaaaaggatatgctgtcaaattcgccgatattcaaaacggagatcttaatgtacagcaaagctcttccagagctcgagagaattctccgggaggcaggggatactaccaagctctatgcgccttgtatctatcacagcttggaacctcatcaggtgatgatattcgaggatctggtgccacaggggtacaccgtcatccgagatcgttatcctaataaagaagaacttcagaaagccttcttcaagttggcaaagtggcatgcagccagcatgaaagttttaaatgaggtgaactag

SEQ ID NO: 32097 - protein, 187 aa, DROSOPHILA
MAENVDSAQFNADEVDAPAWLNAELIEGALRAYEKDPELHVTDLKISPATLQGDHYASVMFRAVSHYSTAKGNFSKALIVKTMPEQEGHKKDMLSNSPIFKTEILMYSKALPELERILREAGDTTKLYAPCIYHSLEPHQVMIFEDLVPQGYTVIRDRYPNKEELQKAFFKLAKWHAASMKVLNEVN

SEQ ID NO: 32098 - DNA, 3364 bp, DROSOPHILA
cgctgcgtggccgaggaagtggctcactggaagggctacgaggagatcaccgagaagatgttcaacctggccgagaatgtcctgcaaagagcgctgaccatgtttgagagcacaggcaaggatttccgggtcttcaacctcaccgatctgtggatcaacaatctcttgttccacatcaacaacgagaccaaggagccagacgatgtggtcacagtatgtcattcatagacgagaatccattcgaaatccacgttaatttatctcttcgttcactagttggactttcagttggcctatgtgggatccccaaccattgatctcaattacttcctctacggatccttgaacgagaatgttcgtaaggtccactataagtacattgtgagggaataccagagagtgcttcagcagaccctggagaagctaaactaccagggacacattccaactcttaaagaaatccacatcgagttgatcaagaccagtcttatgggtatgatcatcatcaccatttatctatattggttttcataatgactccaccattataggtgtcattggcgccacttgcctgactccactgatcttcagggagggagctggtttcgaaaaccttgaggatctgaactcacgcactgagagcggtgatcgtttccgccgggaaaatgttgaaaaccccaagtatcgggctttccttcagcgaactattaaagaattcgagctatctggattcttggatgaatagtgacaaagggctaatgaagattgcgttacattcgatcaaaagtattcgggcttccacatacagtaagctttccagacaaatattccatgagtattttacacccaaattaaaaaaaaagaaaaatttaatttgatgatacgttttgttatttaatttaaagcaaaaggaaaccctaaaaaattacatggttcatatagttgcgatcaattagccatgcaatatatacacattttaactgatagctttaaaaatagatcaaagatcgttaaagtatcccatttcctcatatttacccaaaagctttttgacatcttgaacataagggtcatagaggtatgatttttgtctgatttccggatcttgaattaactcgtgtattttaaacgtattcgctttaacggccacaatcattggcgaaaaagtggttaaaaggaagaagtctgtaaaaatattgaagtggttaggcttattgaaactaggcgataaataaaataggcacttaccataaaacttgtgtcggtgtatttgcttccacagaccatcattggtcggcatcttgcccttgtagccaactttttttaacgtgtcctccaaaaccgaaaaataaaagttaataagatcctttccgagatcccatcgctgctctggctccatgagcatgtacacagaataactcaaatcgattgtaatgggacacaggttacagatttggaaatctacaaacatgacctcctcatttttattgaacatcatatttcggccatgaaaatctccgtgacacatcacgtagtatccatcggattgaacgttcttgcgatattcctgcattacatcacccatacgctgtatgtagttctcttttattttctcaaagtgtggcttgtactttgtaagttcaggaatctggtccatcattttcaaaaagttgtccattccagtagtaaccattggatccgacataatagaaggcatttccattagcccatacttgaagtctttcaagatatcaggttgctcattcaagactttcatgctaacagcatgccatttggccagtttggagaaaacatttttgtattcgttcatgtttattggacgatctcggatcacgaagtatccctgcggcaccaaatcctcgaatattaacacctgccgaggctctagactgtggtagatacagggcacaaatagctttgtatcgtcgcctgcctcccggagaattctctcgaattcgggcagagccttagtgtaagcattaatctcggtggagaacaaatgtgagtcgctaagcatatccttcttgtgtccttcttgttctggcatcgttttaatgattagcggcttacagaactttcctttcgaagtggtatactcagcagtagtacggaacattacgcttgcgtagtgatctccctgggcactcgccggagtgattttaagatcggtaacctccagttccggacacttttcgtaggttctaagaacgtcagtaataaactgggcattcagccatgcaggagcctccagctcatcggcattaaattgctcggtatctgcgttttctggcatttttatttcgcgctctcaacaaacaattcggaatgatgtttgatctgggtatactaaaccttcctatgtgcccacttattataaaggctggctaagtgagctttcgaaagcggcttgaaccttttaacacgaaacttttcgattttgtgtgaaatacgtctactcaatgatcttatcaatatgcattgaaatctgttctacaggacaaatactgtgatcaatagaaacttacaaataaatcagatatttattctgttctatgaaataatatttaggtcaggtgtaagaagtataaaacgctaaaaatgtttaatgttagtccagcttactggattatcaaatgtttgaagacgaattaaattcaagtttgcccgattttatacaatcgtgatacagattttcaaaataactatgttgtttcactataactatattttcgaaactgcatcttgacagaatgtaagacgtaagaccgtaatccttatggccatggatatgcttttagattcctggaagggaacatatctccctgaagcccacttttttcagtttgatgttggagtaaattgggacaatggtattggagcgcatatgtgtagctgatcttgaaatcactactgccacaaagacctctgtttccttgttctattctttaacatcgtgttccgaacatgattaggataatgacttttttgattactgaatgacacattgccaactttaagtttataatttaacagccctatccgtcatgatgtgaagtcatgatgatgtcagcaatattaataaaacaaattccaagattttatttataataataatatacatatttggtaaacgcaagaaacggatttcagtaaatatatataagcaataaaataataaatgtatgttttaaatgtttcttttagaatttcgaaatcaatagcgggaaagaactttaccttgaatgcatgcaactttacacgtatatgtttgttaataacgagtgcaattatgtaggtaaatgtgaagttatttttttatttcaattaattttatacaatcgga

SEQ ID NO: 32099 - DNA, 1301 bp, DROSOPHILA
acccagatcaaacatcattccgaattgtttgttgagagcgcgaaataaaaatgccagaaaacgcagataccgagcaatttaatgccgatgagctggaggctcctgcatggctgaatgcccagtttattactgacgttcttagaacctacgaaaagtgtccggaactggaggttaccgatcttaaaatcactccggcgagtgcccagggagatcactacgcaagcgtaatgttccgtactactgctgagtataccacttcgaaaggaaagttctgtaagccgctaatcattaaaacgatgccagaacaagaaggacacaagaaggatatgcttagcgactcacatttgttctccaccgagattaatgcttacactaaggctctgcccgaattcgagagaattctccgggaggcaggcgacgatacaaagctatttgtgccctgtatctaccacagtctagagcctcggcaggtgttaatattcgaggatttggtgccgcagggatacttcgtgatccgagatcgtccaataaacatgaacgaatacaaaaatgttttctccaaactggccaaatggcatgctgttagcatgaaagtcttgaatgagcaacctgatatcttgaaagacttcaagtatgggctaatggaaatgccttctattatgtcggatccaatggttactactggaatggacaactttttgaaaatgatggaccagattcctgaacttacaaagtacaagccacactttgagaaaataaaagagaactacatacagcgtatgggtgatgtaatgcaggaatatcgcaagaacgttcaatccgatggatactacgtgatgtgtcacggagattttcatggccgaaatatgatgttcaataaaaatgaggaggtcatgtttgtagatttccaaatctgtaacctgtgtcccattacaatcgatttgagttattctgtgtacatgctcatggagccagagcagcgatgggatctcggaaaggatcttattaacttttatttttcggttttggaggacacgttaaaaaaagttggctacaagggcaagatgccgaccaatgatggtctgtggaagcaaatacaccgacacaagttttatgacttcttccttttaaccactttttcgccaatgattgtggccgttaaagcgaatacgtttaaaatacacgagttaattcaagatccggaaatcagacaaaaatcatacctctatgacccttatgttcaagatgtcaaaaagcttttgggtaaatatgaggaaatgggatactttaacgatctttga

SEQ ID NO: 32100 - protein, 416 aa, DROSOPHILA
MPENADTEQFNADELEAPAWLNAQFITDVLRTYEKCPELEVTDLKITPASAQGDHYASVMFRTTAEYTTSKGKFCKPLIIKTMPEQEGHKKDMLSDSHLFSTEINAYTKALPEFERILREAGDDTKLFVPCIYHSLEPRQVLIFEDLVPQGYFVIRDRPINMNEYKNVFSKLAKWHAVSMKVLNEQPDILKDFKYGLMEMPSIMSDPMVTTGMDNFLKMMDQIPELTKYKPHFEKIKENYIQRMGDVMQEYRKNVQSDGYYVMCHGDFHGRNMMFNKNEEVMFVDFQICNLCPITIDLSYSVYMLMEPEQRWDLGKDLINFYFSVLEDTLKKVGYKGKMPTNDGLWKQIHRHKFYDFFLLTTFSPMIVAVKANTFKIHELIQDPEIRQKSYLYDPYVQDVKKLLGKYEEMGYFNDL

SEQ ID NO: 32101 - DNA, 3380 bp, DROSOPHILA
ggacttctatcttctcaaagtgcgtcttgtatctgtccaactcaggaatgcggcccaaaaaatccttaaacgggcccatgcctgagctcatatagggaatatcaactagacaaatgccatctttgaattccttaacgaattctggtcgctaattgggaaataatttgctttacagttctaatatctgatatatttatgatttttggcctacctcgttaatgatcttcatgctaagtgcgtgaaatttggccaatttagaataggcaccacatatctctccatgtgtgagcacacgatctcgcaccatagcataatccatctcgccaagatcctcaaagatcataacttgactcggttccaggctataatatatacattctgcgtaaagcctggaagtatcattgttttctcgcaatattctcgcaaactccggcaggaccttcctatacatgcctatttcagttttaaatagagctgaaccggcaaacatttccaaaaccgtcttaataatgagcgacttggaaaagaatcccttctgggttatatattccacccgtgcacgaattataacactggcatagttatctcctttggcacttcctggagtaaagtccaatttggttaccctgagatccggttccttttcgtgggatctcagaacatctgtaacaaactgctcatttaaccattctgggacattcagctgatcagctaagctatcttcagccattttctagtctgtaagggaaagttactaatatttatattaaccggttcaggtaattttgtataaattttatataaaaatgtgtatggctcctgagaagcttgatgactaaacgttcaatgaaaactgaaaacattcacgctctcttgtttttattttcattgagcttttaagctctttgaaactcactgaaattcacagatggtcttgttgactattgttttaacgattaaaagctttcaaattatttatatatttaaatgggaaattttattaaaagtcgtcaaaatatcccgatttctggaatctgtctaatatggatttggtttcttccataaaatcctctagctgatatagtttcttgcgggtttcttcgttgtgcatcatatcacctatatccaacttatgggttcgcaacccaatcgaaactggcaagaatgtgctcagcagtagaaactctgaaataaatatataatttcattaataagtcctttaaccaaaggacgatttcaaattaccgtaatatctgtggcgtttcatttccgcccaaaatccttgttccgtcggcattgatccttggtagccaatcttcttgagagtctctaggaggatggataggtagtagtttaacaaaatgtccagctcctctcttcgctgtgctggccccatcaacatgtaaatggagtacataagatcaacggccattggagccacattacagccctgataatccagcagcatgcagtcctcgaagcatcctgtttccttattgttcttaaacatcatgttgcgggaatggaagtctgcgtggcagagaacgttgtatcctggctggggattgtttcgatactcctgcatagtctctcgcaatcggtccttaaaatgcagacttattttcttaaaatgcggctggtatttgctgagttcaggaatccgtcccaacatttccataaatggatccatgcctccgcttataatggaactgtctatcagcccgggcatttcacacaatccgttcttaaactccttcagatattcaggttgcttaaaatagagagtataacacattaaattttaaatgtacatagttttagttaaatttctgcttacctcgtgaataaacttcatactgattgcatggatcttggccaacttggagtaggcactgctgatttcttcccgtgtaaggaaacgatcacgcacaactgcatatcccatctcgacgagatcgtcgaagatgagaatctgatgtggctgtagactgtgataaatgcactccacatatagcttggctggatcgtttgctctccgaagaatcctctcccactcgggcaggaccttagtgtacattccgatctcagttgtaaatagtggagaatctttaaacatatcctttttgataccctcctccacgatcatcgtttttatgataagcgacttggtgaagttaccgttctgggccgtatattccaccctagcgcgaaacataatgctggcatagtgatcgcccttggcactggccggggtgaaactcaagttgatgaccttaagatttgaatctttttcgtaacccctcaacacctgagtcatgaactgaacgtttagccactccggaggattcaactcgtcgtcattgaaactttcctcggccatattgacgcacctttgggtatatttctaatactgttttcaaactgttactgagagagccctatatacgtgttcaaccgatttgttagagctttttgtgtcaatgtaatgaacgattccctggcgaaatcgttatcagtttgaattcggctctcaagttacctgagcaccatatgccccccggtaaccaaattcgtaagttcgcactgttttcagtttgtatggagctttgaagctttggaagataaccataagaatgaaacatgttaagcatactcttataataagctttccaagaaatttaaaaatttgtgtaaatactatagcaatgttggagactaagtgtctgcaaacggatcagtgggaggtcacgtttaaaactaaataaataattcatgaagaagtgaggaagtaaggagacgatcgatcacaaggccattgagctgggaagatgctgaaaagtaaagtaacagcaatgtatgagaataatctctttacaaaacccaagatggagcagttctccaaaaacaattactgtttcgtaactcaaacatcgacaaccgtggagagcctaattttacggactgcgaatggaaaaccgtctgaatggatgcagtagtacatttagagtgatcatatgccaaaatatcggataacaacttgagtactagttaaatatactctgaagttatggcctctctactaacagtttacagtaaccaacaaaactaatctcacaactcacaagtggcgtcctaaacaatataaaacttcacgatgactagctggtataagccaaaaaagcaagcacaaatataattgctgtcgcaaactatttttgtgtgcctataataacgagtttgcaaaaaagatgtctgattatcaattatacaagcacgcgtgttaccaattattttactactatcagtgtcccaaaaacaaacaaactatctatatgtatacggttgttgttaaataattattgtagatcaacaaatacttt

SEQ ID NO: 32102 - DNA, 1254 bp, DROSOPHILA
atggccgaggaaagtttcaatgacgacgagttgaatcctccggagtggctaaacgttcagttcatgactcaggtgttgaggggttacgaaaaagattcaaatcttaaggtcatcaacttgagtttcaccccggccagtgccaagggcgatcactatgccagcattatgtttcgcgctagggtggaatatacggcccagaacggtaacttcaccaagtcgcttatcataaaaacgatgatcgtggaggagggtatcaaaaaggatatgtttaaagattctccactatttacaactgagatcggaatgtacactaaggtcctgcccgagtgggagaggattcttcggagagcaaacgatccagccaagctatatgtggagtgcatttatcacagtctacagccacatcagattctcatcttcgacgatctcgtcgagatgggatatgcagttgtgcgtgatcgtttccttacacgggaagaaatcagcagtgcctactccaagttggccaagatccatgcaatcagtatgaagtttattcacgagcaacctgaatatctgaaggagtttaagaacggattgtgtgaaatgcccgggctgatagacagttccattataagcggaggcatggatccatttatggaaatgttgggacggattcctgaactcagcaaataccagccgcattttaagaaaataagtctgcattttaaggaccgattgcgagagactatgcaggagtatcgaaacaatccccagccaggatacaacgttctctgccacgcagacttccattcccgcaacatgatgtttaagaacaataaggaaacaggatgcttcgaggactgcatgctgctggattatcagggctgtaatgtggctccaatggccgttgatcttatgtactccatttacatgttgatggggccagcacagcgaagagaggagctggacattttgttaaactactacctatccatcctcctagagactctcaagaagattggctaccaaggatcaatgccgacggaacaaggattttgggcggaaatgaaacgccacagatattacgagtttctactgctgagcacattcttgccagtttcgattgggttgcgaacccataagttggatataggtgatatgatgcacaacgaagaaacccgcaagaaactatatcagctagaggattttatggaagaaaccaaatccatattagacagattccagaaatcgggatattttgacgacttttaa

SEQ ID NO: 32103 - protein, 417 aa, DROSOPHILA
MAEESFNDDELNPPEWLNVQFMTQVLRGYEKDSNLKVINLSFTPASAKGDHYASIMFRARVEYTAQNGNFTKSLIIKTMIVEEGIKKDMFKDSPLFTTEIGMYTKVLPEWERILRRANDPAKLYVECIYHSLQPHQILIFDDLVEMGYAVVRDRFLTREEISSAYSKLAKIHAISMKFIHEQPEYLKEFKNGLCEMPGLIDSSIISGGMDPFMEMLGRIPELSKYQPHFKKISLHFKDRLRETMQEYRNNPQPGYNVLCHADFHSRNMMFKNNKETGCFEDCMLLDYQGCNVAPMAVDLMYSIYMLMGPAQRREELDILLNYYLSILLETLKKIGYQGSMPTEQGFWAEMKRHRYYEFLLLSTFLPVSIGLRTHKLDIGDMMHNEETRKKLYQLEDFMEETKSILDRFQKSGYFDDF

SEQ ID NO: 32104 - DNA, 4642 bp, DROSOPHILA
gaccttcatcaatccctactatgccaaagcaatgaaggtgcttttaccgttcttcgataacaagggacttttgaagtcgaattagctttaatcccggatcccaattgtggtgtagccaatttgctgtgatattatatatcataggcgcaagcaataaatacgaatttgatttaatttacacgtaattcgtttggtttcactattaaatcgtttcgcccagacttagtccagtaataaaaccccaaacaaaacgtagaacacaatcatcatgactggctaaaatggctacgcgtgcgttgagcttgaaatgggtccaaatgacgtcgtcttcaaacttttgtttagtaggaaaaacctttaaatctgtctgcgagcttgtgagcttcagacttgccaactagtgacgtatgtgctaatcgcaaaacaaacaggtgttcatttgcttcttcacttcaatgattatcaatcaattaacaaaaataggcaatggcgataactaattatttcttgataataagttagaccacagacttttctgtaatcgtatttttaatctattggcttcttccagccaaaaaccgcacttccataaaatcggaattctatttaatcagccggaaacattctataaaataattgcacagccagcagttggcattgatggcaaaaactgcgccacaatggggttttaattgacagaggcattctatatatgtaattaggaacacgcaaatagttctcattcattgggcctccagatgagcagccatagagagatgtaaattagcgattcaaatgaggcaaacatttaaattgtttgcttctctaatttcagcttgggtagacatgtgttgttagaaaaacgtgcttagcatattgaagaaaatgtagtatgattatgaatctgacgagtaagaaagttggaagatggtgaaagtgctgggcttaactaaggattgatttattaaactactatttctcatataattttggaaaatgtttaggcatggagtaatcccaattgatccagtcgagccagcaatatggtgacttccttaatgtagcctttagaaaaagagcattttcttcgcttttcttcattctgaagcagatcgccaaagtcaacggacttatccctcaatgcccacatcagcggtagaaaggtgctaatgagaaagaactctgttggggaaatatttttattaaattatattagattaacttagataaattggtaactcaccgtagtacttgtgttgatgcaggcgcttccaaagacccgattgactgggcattacgcctttatagccgatcttctttagaacatcctgcagaacggagatgtaataattgatgaggtcatcccagttattccatcgatgctccggctccaaaagcatgtaaatcgaatagagtagatcgaatgtcaagggaaagagattactgatttgaaagtccagcagcatgcagtcctctaaggatacagtatccttatgcttgaacataatgtttcgaaggtgcaggtctccgtggcaaagtacccagtactcgtcttttttctggctctttcgaatgtccttccactcttcaacaagtcgctctaggaaatcgtccttgatgctttcgaagtacggcttatacttattcaactccggctcctttcccaaaagctcaacgaagaattccattccagttctcataaagggatcattcaggacatgtggcatctcaaacagtccatgggtgtacgactctaggaactctggttgctgataaaaattcatattattagaagaagaacaattacttttaacaacttacctcattctgcactttcaagctgactgcatgccacttggccagtttgaagtagatgcgtcgtatctcatctaatgtggcgtcccgatcccgtagcacaatgtaacccatctcggccagatcctcaaagatcaggacctgatgcggctccaggctgtggtatatgcaattcacatatagctgggtgtcatcgccgacctgtcgaaggatcctctcgaactcgggcagcacctttgtgtacaatcccatctccgtttcgaatatgggcgatcctccgagcatatccttcttgtgtccctctgcctctggcattgtcttgatgatcagcgacttctggaactcgccttttcggttggtgtacttcacccttgcccggaacatgatgctggcatagtgatctcccttcgcactcgccggggagaaggtcaaatcgataaccttgaccgcggcctccagctcattgccttccaaaacgcgagccatgaactcggagttgagccactcaggtggcaccaattcgtcatcgttaaactggttgttttgggggttcccggacatattgtttactatcttctattgcgatgtccaaagaagagcgaactgaacaaagctccagttcactggcacctaaattgaattacagagagagaatttcgtttttgaatgggattgtaggtgtgtgggacttaagaagcttttacccagagataatgaagagcttttcggtttgttttaaaattctctcatgtcggagtaactcaagagaagagaaaaacgtgatttttcgagcgatatcaaaacaatagccttatacactttattaagtacatataatggaacgctcatttatttgttggtctatctataaaaactgttcttaaaaactctttttccacttattcgttttataagttctcaaaatatccagacctttcaaatcttgccagtattgatttacactcttcaataaaatcctgtaatttatcatcagtttcttcgttagtcgcggtttcaaggctaagacctaccgacattggcaagtaggtgctgagaaataggaactctgcaatcgaaatattataaaaaccgtaattaataaacatatagaaacataccataatctttaaggcgatacatttccttccagaacgcaggaggatcgggcagtttgccctggtagccaatctttcttagtgtttcccttagaactgagaagtagtagttcagtaaggtctctagttccccaatgcgctgttctcggttcattagcatataaatggaatacataaggtcgaaggcaagaggagcaacatagcatccttggtaatcaagcagcatgcaatcctcgaagcctccggattccttattatgtttaaccattatgttacgtgtgtggtagtcaccatggcagagaacgtagtagccaggctgaggattggtttggtactctttcataatatcacgcagtcggtctataaaatggacttctatcttctcaaagtgcgtcttgtatctgtccaactcaggaatgcggcccaaaaaatccttaaacgggcccatgcctgagctcatatagggaatatcaactagacaaatgccatctttgaattccttaacgaattctggtcgctaattgggaaataatttgctttacagttctaatatctgatatatttatgatttttggcctacctcgttaatgatcttcatgctaagtgcgtgaaatttggccaatttagaataggcaccacatatctctccatgtgtgagcacacgatctcgcaccatagcataatccatctcgccaagatcctcaaagatcataacttgactcggttccaggctataatatatacattctgcgtaaagcctggaagtatcattgttttctcgcaatattctcgcaaactccggcaggaccttcctatacatgcctatttcagttttaaatagagctgaaccggcaaacatttccaaaaccgtcttaataatgagcgacttggaaaagaatcccttctgggttatatattccacccgtgcacgaattataacactggcatagttatctcctttggcacttcctggagtaaagtccaatttggttaccctgagatccggttccttttcgtgggatctcagaacatctgtaacaaactgctcatttaaccattctgggacattcagctgatcagctaagctatcttcagccattttctagtctgtaagggaaagttactaatatttatattaaccggttcaggtaattttgtataaattttatataaaaatgtgtatggctcctgagaagcttgatgactaaacgttcaatgaaaactgaaaacattcacgctctcttgtttttattttcattgagcttttaagctctttgaaactcactgaaattcacagatggtcttgttgactattgttttaacgattaaaagctttcaaattatttatatatttaaatgggaaattttattaaaagtcgtcaaaatatcccgatttctggaatctgtctaatatggatttggtttcttccataaaatcctctagctgatatagtttcttgcgggtttcttcgttgtgcatcatatcacctatatccaacttatgggttcgcaacccaatcgaaactggcaagaatgtgctcagcagtagaaactctgaaataaatatataatttcattaataagtcctttaaccaaaggacgatttcaaattaccgtaatatctgtggcgtttcatttccgcccaaaatccttgttccgtcggcattgatccttggtagccaatcttcttgagagtctctaggaggatggat

SEQ ID NO: 32105 - DNA, 1959 bp, DROSOPHILA
atgatctttgaggatcttggcgagatggattatgctatggtgcgagatcgtgtgctcacacatggagagatatgtggtgcctattctaaattggccaaatttcacgcacttagcatgaagatcattaacgagcgaccagaattcgttaaggaattcaaagatggcatttgtctagttgatattccctatatgagctcaggcatgggcccgtttaaggattttttgggccgcattcctgagttggacagatacaagacgcactttgagaagatagaagtccattttatagaccgactgcgtgatattatgaaagagtaccaaaccaatcctcagcctggctactacgttctctgccatggtgactaccacacacgtaacataatggttaaacataataaggaatccggaggcttcgaggattgcatgctgcttgattaccaaggatgctatgttgctcctcttgccttcgaccttatgtattccatttatatgctaatgaaccgagaacagcgcattggggaactagagaccttactgaactactacttctcagttctaagggaaacactaagaaagattggctaccagggcaaactgcccgatcctcctgcgttctggaaggaaatgtatcgccttaaagattatgagttcctatttctcagcacctacttgccaatgtcgaagatagtaaacaatatgtccgggaacccccaaaacaaccagtttaacgatgacgaattggtgccacctgagtggctcaactccgagttcatggctcgcgttttggaaggcaatgagctggaggccgcggtcaaggttatcgatttgaccttctccccggcgagtgcgaagggagatcactatgccagcatcatgttccgggcaagggtgaagtacaccaaccgaaaaggcgagttccagaagtcgctgatcatcaagacaatgccagaggcagagggacacaagaaggatatgctcggaggatcgcccatattcgaaacggagatgggattgtacacaaaggtgctgcccgagttcgagaggatccttcgacaggtcggcgatgacacccagctatatgtgaattgcatataccacagcctggagccgcatcaggtcctgatctttgaggatctggccgagatgggttacattgtgctacgggatcgggacgccacattagatgagatacgacgcatctacttcaaactggccaagtggcatgcagtcagcttgaaagtgcagaatgagcaaccagagttcctagagtcgtacacccatggactgtttgagatgccacatgtcctgaatgatccctttatgagaactggaatggaattcttcgttgagcttttgggaaaggagccggagttgaataagtataagccgtacttcgaaagcatcaaggacgatttcctagagcgacttgttgaagagtggaaggacattcgaaagagccagaaaaaagacgagtactgggtactttgccacggagacctgcaccttcgaaacattatgttcaagcataaggatactgtatccttagaggactgcatgctgctggactttcaaatcagtaatctctttcccttgacattcgatctactctattcgatttacatgcttttggagccggagcatcgatggaataactgggatgacctcatcaattattacatctccgttctgcaggatgttctaaagaagatcggctataaaggcgtaatgcccagtcaatcgggtctttggaagcgcctgcatcaacacaagtactacgagttctttctcattagcacctttctaccgctgatgtgggcattgagggataagtccgttgactttggcgatctgcttcagaatgaagaaaagcgaagaaaatgctctttttctaaaggctacattaaggaagtcaccatattgctggctcgactggatcaattgggattactccatgcctaa

SEQ ID NO: 32106 - protein, 652 aa, DROSOPHILA
MIFEDLGEMDYAMVRDRVLTHGEICGAYSKLAKFHALSMKIINERPEFVKEFKDGICLVDIPYMSSGMGPFKDFLGRIPELDRYKTHFEKIEVHFIDRLRDIMKEYQTNPQPGYYVLCHGDYHTRNIMVKHNKESGGFEDCMLLDYQGCYVAPLAFDLMYSIYMLMNREQRIGELETLLNYYFSVLRETLRKIGYQGKLPDPPAFWKEMYRLKDYEFLFLSTYLPMSKIVNNMSGNPQNNQFNDDELVPPEWLNSEFMARVLEGNELEAAVKVIDLTFSPASAKGDHYASIMFRARVKYTNRKGEFQKSLIIKTMPEAEGHKKDMLGGSPIFETEMGLYTKVLPEFERILRQVGDDTQLYVNCIYHSLEPHQVLIFEDLAEMGYIVLRDRDATLDEIRRIYFKLAKWHAVSLKVQNEQPEFLESYTHGLFEMPHVLNDPFMRTGMEFFVELLGKEPELNKYKPYFESIKDDFLERLVEEWKDIRKSQKKDEYWVLCHGDLHLRNIMFKHKDTVSLEDCMLLDFQISNLFPLTFDLLYSIYMLLEPEHRWNNWDDLINYYISVLQDVLKKIGYKGVMPSQSGLWKRLHQHKYYEFFLISTFLPLMWALRDKSVDFGDLLQNEEKRRKCSFSKGYIKEVTILLARLDQLGLLHA

SEQ ID NO: 32107 - DNA, 5054 bp, DROSOPHILA
ctagaatcctgtttagctcctgggttgcacggaactttcccgcgaaaaagtgttggctagccaatgtggttttagggaaacatgccatgaactgcatgtgatatctttcagatactattactatcttaccatatataccaatttcatatcatatcaacatgctaccatcacatgcatacctagtcacagatcctcctgaaagatcttggcttataccggtaaatcctatcccaaagccgaaactagagctgtgcgtatttgaattgcccgactgcaacgcagccgacgctgcaatggcaattgcaatctcggagtgcgtatgtgtcaacgactggtgtggcagtaggaacccggaaccccaggcccacaataattgccagcgtttcccgcgttaatggccgcttcgctacgcttcacagattcggacgcacatgcacagaattcctggcaacggcgggattgtctcctaagtcttcgcggaacagcaaagaagatgaatggcacggggtcacgcagccacctacggggcagtcgcagatgtgcaggtaaacaacaatcgggacaaaggatcggccgaaggcggattaaatgggagtgggtctcactacctcgatgccgagctgcaatgaaaacagaccgctgattgttttgggcaactgaatgacatccgaaaatcgggggaaaaaaaacacatcgaaatgaacgggcatgagtacacactatatggttaataccccctttagaaaacatccaagaagttacagtttcctggtgggttttaaacgattcttaagaattcgcatgaggaatacgaaaataaaaacatgggactatcagattaagataaaacaattttgagatactttttaacatatagacggcctcttggaatagtaaggttgttttactttcagtagtaacattaaaattttaagatacccttatgttttcacaccgctcaacaggttcatttcccaaatatgaggtcttcacatcctcaatgcaaagcggatataacttttccaaggttgtaaaatatagcctatacgatcttgactcctgctgtttttacagggccatatataagggtacatataaattttcctcgggcaggtaaacgctgcttgctaaaggtaatcgaagatttcctttttgtctcgtgctgcgcaatagtttgtgccaaatttcgtggaaactggcatgctgtttcctcagccccgttctatatacattcctctacatatttatatgcagctaataaactcttgtattgcaattgcatattggcttccaatgacttttatcgggggatgattcagagatattgcattcttaagctaatgagacgcaatcatttgctagccaagtcctttggtagttatttgtaacagatgtaaatatatttttaacattaacgtatcttgtactcagatagaacatttccgatgaagtgttcatttaatcgatcaaaaggtagttgataatccagttttgtagtctaaagatttgtcataccatcctattttcttatttaatcctttagccaaatcgcctgatttcgccggaaaccttgttgcgcaagcggaagggcaactcctatgagatggccactctgctggtcagcatgctgattggagctggacacccagcgctggtggtttccggagtggcccgcgaggagacgattctcaacgatcagctggccgttccgtacccgtatccaatcgtcgaggtggaggtcgaggaagtgaagccaaaggttgagaagccgggccagaagtataagctgcgcggattacccgatttgaagagtcatctcgaagaggatatggccgaggttcacaggcaaaaggaggcagaggaaaaacggattcaggacgaaattattcggaagcaaatggaggtgaggatagacatgcacttgcgcattcgttgtgtggattaacatactggctaatcccgaacaggatcttgagctgctggccgtggatcgatatcattatcgacgcagtcatgcctgggtcgtgatcataaacaatgcaccctggagtgtcaagcccaagactacctacacagatgtcaatggggacgtggttgaggctccacccacggccattttcatagagccctcgacaggattcatttgcgagacgggctgcaagcagtacatcctcgtggatagcatctggaatgagtacaactactatgtatgcaagcagaagcaccagagggtgagtgaactgcgttgggatctgcgggacaccaaggactgggagcacatgcttccaggtgagccgcccgagatgcgcatctacaaaatggcctcggatgagaatgttgccgatgaggagcgcgacataagcgaggagaagcacctggattgcatcggctcctgggtggagcgtctgcacatcggacttgccgactttgagcaacgtttccccagctccgagaagaagatccaatacaagggagccatccatgagcgattctcgccctattcccagcgcgatggaaaggtgatgcagctaactattttcaataacgatgagtgcaccattcccaaggtcagatatgagtactacgagaatcgatctgacctcatgcgccatgtgaaatacacatatgccaccgatcagtttgaggaaatattcaataagggtcgcaacgacagtctaaagtgtaggtattcataaattgagccagaaatatttatattaatcttgaatactttcttagccatcgaatatttctcggatccctcgcagcagcgaaaagtacattttttttcggcttccagaatcgattccttggaactgatggtggttgaaccaggctcgcttattctgcactacaaggatcgcagtgacaagtgttggtataaggaattcgaattcactccagctggaaacgttctcaaagtgagtgtacattttgtttattttgcaattaatttggctaacttccaacaccaacagaaagtcaccgagaaatttctcaaagccagtgctaatgatgtgtgctcaaatgatattgcaacacgcacgtttctatttcaacaaaataaaattgttctgaaatttcattacacatttggggcactcaccgctacagtagtggaatttacaaagccaccaagaccggattatggcaaagagctcatatacgatgagaaacttacgaaaatatacaaggcaagtgggaggataatttaaatattattattttggtttcacacaagtattcctaaatctcctccaggcaaatcccctagatccaacgcgcactaatctcgaactgtacagattgttgtgcgagcaactgcagtatgaggaccatttgaggaagaatttcgaaaaaatcttcgaggatataaacaacgtattcgatttgcgtaaatccgaaaaggctgaacccaaacttaagttcagcatatttgatccacttcggaatggagcagccagagccataaggatgagacaggtaaatgaggcactcaatcataaagataatactttgattccttatatgcattttatccagtttgaagaagaggaggaacttaaaaaagaaatagccagcaagcccgccgatttcctggctccatatctggtgccctataaacaccaggaggaacttactcccgagcaatctcaaaatgcatataacgcctgtctaaacgatctgaagtctcggtttgtgagtctgctcaacaacttgcaacgtcactatgaagatgtaagtcttaaaattttatacaagaatgcaaaaatattgaaattttttaaaaatctagttaacctccgagtcaaagtcgctgaatcgattcctaaacaaattcgaaaaccagttcaataactacgattacaagaggttggtgcaacaatcgaaggatctcgaactcaataagcgaatggtgcaacagcgtctgactctgacccatgaggagtcccagaagaaatacgaagtggtcaagaactccctgctcaaggatccacgactgaatttcaaaaaggacgacttggcgagaagagcttcggagacatcgaaataataaacttgactgagaactcaaaaaataaaagaagtaattaactatttgtatcttttctttcacattgaagttaaatattgaaacagaaaacataccattccattcggtaatcaagatatgctgccatcgtattgaatattcataaatttaacgaattctttgctcgtgaatcctaatagcaattatccactttgaaatgaccgattgccaagtaaatggaattcaattgaacaagcgacttccagattaaatcaaaatcaaaggtcggcctttaagatgcagatagtgaattgctgagattctctagcgccggtggttaagtggattctaaaatgcgaatgtcgatttcatggcctagaatcattgccgccgcgcgaacaacgtcgctaagggcggttgggtggtatgagtgctgtgagtggtatgagtgagtggtttgggtgctattcgggcgacttggacttgtgaagggaagggggtgcggtgctggcgacggcgaggaaaattcgtttcaaaaagtgaccgtttgaaaattggacaaagtggctgatgctgctgccgtgtacggacccgcgcccaaggcacacaagccgtacagccgaagagtcgtggttggaggctacacacacacacacacacattcacagtaaaatatcctgaaaaacacacactcgcgtgtgcatgtgtgtgtgtgcgaatgtctgagctgggcggctgtccatttagcgcgatacccacacccctgaaaagcgctcacacaatcgttcacgacccacgcacacacacacacacacacagtacacacactcacacacaacgaactcatatgatgtccgtgacccccacccgctaaaccatcgaccatcgccacccctcgtcctgatgggacggcgaaattgggttcgtcccttgaaagaatcgtcctaagatgaaagtgctgtcccttgtccgcctaccgtacgttagcttcgctgaaaatttgctcgtggcatgaacacat

SEQ ID NO: 32108 - DNA, 1962 bp, DROSOPHILA
atgcaaagcggatataacttttccaaggttccaaatcgcctgatttcgccggaaaccttgttgcgcaagcggaagggcaactcctatgagatggccactctgctggtcagcatgctgattggagctggacacccagcgctggtggtttccggagtggcccgcgaggagacgattctcaacgatcagctggccgttccgtacccgtatccaatcgtcgaggtggaggtcgaggaagtgaagccaaaggttgagaagccgggccagaagtataagctgcgcggattacccgatttgaagagtcatctcgaagaggatatggccgaggttcacaggcaaaaggaggcagaggaaaaacggattcaggacgaaattattcggaagcaaatggaggatcttgagctgctggccgtggatcgatatcattatcgacgcagtcatgcctgggtcgtgatcataaacaatgcaccctggagtgtcaagcccaagactacctacacagatgtcaatggggacgtggttgaggctccacccacggccattttcatagagccctcgacaggattcatttgcgagacgggctgcaagcagtacatcctcgtggatagcatctggaatgagtacaactactatgtatgcaagcagaagcaccagagggtgagtgaactgcgttgggatctgcgggacaccaaggactgggagcacatgcttccaggtgagccgcccgagatgcgcatctacaaaatggcctcggatgagaatgttgccgatgaggagcgcgacataagcgaggagaagcacctggattgcatcggctcctgggtggagcgtctgcacatcggacttgccgactttgagcaacgtttccccagctccgagaagaagatccaatacaagggagccatccatgagcgattctcgccctattcccagcgcgatggaaaggtgatgcagctaactattttcaataacgatgagtgcaccattcccaaggtcagatatgagtactacgagaatcgatctgacctcatgcgccatgtgaaatacacatatgccaccgatcagtttgaggaaatattcaataagggtcgcaacgacagtctaaagtccatcgaatatttctcggatccctcgcagcagcgaaaagtacattttttttcggcttccagaatcgattccttggaactgatggtggttgaaccaggctcgcttattctgcactacaaggatcgcagtgacaagtgttggtataaggaattcgaattcactccagctggaaacgttctcaaagcaaatcccctagatccaacgcgcactaatctcgaactgtacagattgttgtgcgagcaactgcagtatgaggaccatttgaggaagaatttcgaaaaaatcttcgaggatataaacaacgtattcgatttgcgtaaatccgaaaaggctgaacccaaacttaagttcagcatatttgatccacttcggaatggagcagccagagccataaggatgagacagtttgaagaagaggaggaacttaaaaaagaaatagccagcaagcccgccgatttcctggctccatatctggtgccctataaacaccaggaggaacttactcccgagcaatctcaaaatgcatataacgcctgtctaaacgatctgaagtctcggtttgtgagtctgctcaacaacttgcaacgtcactatgaagatttaacctccgagtcaaagtcgctgaatcgattcctaaacaaattcgaaaaccagttcaataactacgattacaagaggttggtgcaacaatcgaaggatctcgaactcaataagcgaatggtgcaacagcgtctgactctgacccatgaggagtcccagaagaaatacgaagtggtcaagaactccctgctcaaggatccacgactgaatttcaaaaaggacgacttggcgagaagagcttcggagacatcgaaataa

SEQ ID NO: 32109 - protein, 653 aa, DROSOPHILA
MQSGYNFSKVPNRLISPETLLRKRKGNSYEMATLLVSMLIGAGHPALVVSGVAREETILNDQLAVPYPYPIVEVEVEEVKPKVEKPGQKYKLRGLPDLKSHLEEDMAEVHRQKEAEEKRIQDEIIRKQMEDLELLAVDRYHYRRSHAWVVIINNAPWSVKPKTTYTDVNGDVVEAPPTAIFIEPSTGFICETGCKQYILVDSIWNEYNYYVCKQKHQRVSELRWDLRDTKDWEHMLPGEPPEMRIYKMASDENVADEERDISEEKHLDCIGSWVERLHIGLADFEQRFPSSEKKIQYKGAIHERFSPYSQRDGKVMQLTIFNNDECTIPKVRYEYYENRSDLMRHVKYTYATDQFEEIFNKGRNDSLKSIEYFSDPSQQRKVHFFSASRIDSLELMVVEPGSLILHYKDRSDKCWYKEFEFTPAGNVLKANPLDPTRTNLELYRLLCEQLQYEDHLRKNFEKIFEDINNVFDLRKSEKAEPKLKFSIFDPLRNGAARAIRMRQFEEEEELKKEIASKPADFLAPYLVPYKHQEELTPEQSQNAYNACLNDLKSRFVSLLNNLQRHYEDLTSESKSLNRFLNKFENQFNNYDYKRLVQQSKDLELNKRMVQQRLTLTHEESQKKYEVVKNSLLKDPRLNFKKDDLARRASETSK

SEQ ID NO: 32110 - DNA, 2477 bp, DROSOPHILA
tacatatgtatgtatgtaggtaaccagggaaaagattaggttgaatgtggaattagctttatttaaattaaatcaacaaaaaatgcacaaggtgaagaagtagttctatatattatatcaatttttcacatttaaaatatgtgacttgtcatacaatttaccaaatatttataagtagggaagttttgtgccttctgtgctataatacaaatataactttgatacattccatcaaattttatagaaaatagctattgaaaaaatagctaattgaaaatgactagcgaaatgaatggaaattaaatagttttttattttcttaaaatatagctatgccttaatattcaaggctaaaaagcagtaggtaatcaatcgttcaagggcttacctactattttaaaaatactaatgtcaattttaaagttattctcttcatgacatgaagcttactactattcttttgctaaaaggtgatggccatatgctattcacaacctgcttgctctattttaaaaatgttcgttacaaaaagacttttgggtaaaattgttaccctacttcaattttacatgtagacacttaaccgagaaaaaagcagtagaaattgatatacgaagcagggtaaagaagttcaaatctaatgccaaagcagttacaaaccagtacaacggttatttagcccagacgcaaaccagaatcaggaagtaaagtaatgtaaagtaaagttttcaaccggaagaaggaaatgttcgttcttataagaagttatttcaagcgaaacccacacaaaactaattagaattacgaaagttttttaagcaaattacaatttttatatattttatttgctacaatgaacagactagcacaacacaatacatatttcaatttctgtcacatctagccgttaaaatatatatttttctacaaacaccgtagttatagaaacgaagtttcttgtttattattttaaagagccggcaattgtaaccacgccaaaatgccgaaagtactgtttcagaagtacaagaaggtggtgagcaacatcgacccgagtcgctatagcgccaagttcaaggaaatcgacgagcagaggcgctcgcaaggttcggaatcggattttgcagatgaaatggagggcgagttcgaggcggaaatggaggaaatgggatctagtgaatttagtttatccgaaggagaaccatcgctcaatatcggaaagatcgatttatcctttcccgaaacagtcgaggagttcgaaaacagtccccagtgctatcctccatcgtactataccctctcgcccaaggagcggttgctcctgctgtacgctgagaatttccggaagcaattggttctcagctacccaaagagacgagccatggtcttggccctgcccaacgaatgcaaagtacaggtgaagtcagcaccatctgctcctttagtggccagcgttttgataaattgccactcttaaccaacttacagaaattcgtttgcaccaccatcaggccaacggcgtttatttacacgcaactcatatcaagtgtcgaggaaattgccaagtttgtcgccgatttcattcagtatgagccactgcaggatcccataaatttggtaagtctattatggcaaagttgaaccaatcacatatccattattcttatgttccgagctcatgtagcaatatatttaaaagtttatgcgttctaaaatgttcaataacttgaccaaggcaatttatacttgtaaatataaaagtaaaacatttaggtattttagtagatatatatgaaaaaccacttagaccctccaatacgacagcggtaagtaaatacgacgacagttctaagagtttcataaaaattatctaattattttttattgaacatgtatttaaaattacatttaaatttgtaaatgtttttatttaaatatcgcattaattccgaattaagaaaattcttttgagcacatttccatagttattaatatacgaaatttaaaaacgtttgatatcaaatgcatgccattcgcgccaacacaccttgcagttcgaaaagtattttttctttttcgtaacaaaaactaagggctataacatttttctagaatgcatcattgggtgaaaaaacaaactaacaaaacagagtcggttgtctttccgttcaaaaagaaatgcataatagctacaaatagagtttctcgatatatacacgttaaccgtacgattaattaattaatacaatgcaatgcaatgcaatggagtggattcgaattgaattgaaagatactgaaagtatgctcgataggtttcacagctaggagataaattcagtggagtcctccggatgcgtggaaccatgtggtctaactgctggagctcagttcgtcgtactgctggtactcgcccgtgatctggcagtcgtcggggtcatcgtcgaggtcacaatgtacaaattcgtagggagggaaga

SEQ ID NO: 32111 - DNA, 477 bp, DROSOPHILA
atgccgaaagtactgtttcagaagtacaagaaggtggtgagcaacatcgacccgagtcgctatagcgccaagttcaaggaaatcgacgagcagaggcgctcgcaaggttcggaatcggattttgcagatgaaatggagggcgagttcgaggcggaaatggaggaaatgggatctagtgaatttagtttatccgaaggagaaccatcgctcaatatcggaaagatcgatttatcctttcccgaaacagtcgaggagttcgaaaacagtccccagtgctatcctccatcgtactataccctctcgcccaaggagcggttgctcctgctgtacgctgagaatttccggaagcaattggttctcagctacccaaagagacgagccatggtcttggccctgcccaacgaatgcaaagtacaggtgaagtcagcaccatctgctcctttagtggccagcgttttgataaattgccactcttaa

SEQ ID NO: 32112 - protein, 158 aa, DROSOPHILA
MPKVLFQKYKKVVSNIDPSRYSAKFKEIDEQRRSQGSESDFADEMEGEFEAEMEEMGSSEFSLSEGEPSLNIGKIDLSFPETVEEFENSPQCYPPSYYTLSPKERLLLLYAENFRKQLVLSYPKRRAMVLALPNECKVQVKSAPSAPLVASVLINCHS

SEQ ID NO: 32113 - DNA, 2596 bp, DROSOPHILA
ggcaaaaaaagatcgctccccttcctcgcccaccggaactgtatcgtttattccgttttttcaattcattagagcaaataatacaaagtttcatgttattctccaccacgttctgtcatatattcgcgtgtctgaacactctgcaacatatttttaaatatatatattaagaattgaaaccaatactatctttatttgggttaataaaaatctataatatagaaaactatgttatctggccttacaaaattaatttattacaaaaaaatagtgtgcaaggtatttaaaaaatttccgtaagaaccctgaggtaaacacttatttgctagagagtgatactatgggacaataacagtggctaaatacaattaagtgcagtagttacagttctttcacaaaaaaatattatgtttaattgttaattgtttaccccttcatgtttacgatcattaaaagtgtgaaaacggaacgccacttggggattaccgcaataaatcccttcacacatggcgacatatatgttctcttgcggggaagacgacaccttgaagcgaccccatgacatccacatattcgtagatgatttcacatttgcatactaagtgaatcattttaaagtttttacaagtggaggttatatctattatatgcatgcataggtattgaaggttttctgcaactctttacattgttagttcgaaagacaagtaatttatttatttatttgtaaataccaatattgcgtaactgttaaacatgatgagcgcgcatatattattgcaaaataaatcattacattgggttgtggagaagatataattaaaaaaaacaacaaaaaatgtttgacgtaatttaataaccggttcgctttagcgagcgttcccggttgcgtgtatcgataagagtacgtggagttatcgcccggtgcctatcgatatgttgttgacacgtccagcttagtttatttacaatttgggcaaaatcagtgaagttgcaatttatggctgattttcaagaacagctgcgacagtatcgcgctcagaaaaggagaaaggaaacggtagacaacttcaaggacaaactacggagattctggatgttgggaaccggggctaataaagataccacaatagaggtacaacaggtaagatgaaaaccaaacatatgtatatgctctatttactttgatgtaaatgcttcatttaggtacctactaagttcgaagctatctcggaaaactcacaagatgaggctgtgacctccagtgaaagtgaattggtgccagaggagcagcccaccagatccacagatcatcaccacaaggaaaacaactgcctaaagtacaccctctggactgtctatctgctgttctggataactctctacgttattgccataaagctaagctttggattggttttcctcatgttttccgccctctttggcatctacttcaacacccgaacggagccaaagaaacggaacgagatgagtgcctacagcgttttcaacaagaattgcgagagtatagacggcaccttgaaggccgagcagttcgaaagggaaatccgctatggatccggaagtgtacgatagtcttacgagtatatcatgagataatctaaatactgtagtctagacaattttataatatattcactaacttgtatcttatgtagctatgtggctgtaaaagtatattttattatgtgttattggtttctatccttatcttctcaagagatttttattaaacatgacatgttgatcttaccttttgttaatcatacaaatgtagccgaaataactacagtatactgttctaaggtctctatctttttattggtaatgtataaatctatcaattctcttcgaacgattttcacaacgaaacacaaatttaagtttcgggttttgctcaacaaccgtcacaattttcatcaataaattgattaatttaaataagtgcagacaatatttagataagattctatttattagctaatcttacagtcagcgatgtacctcacaacaggtatttatgtacacttatacatacacatttccatgcgtgcttttcattaaatttagtaaggctgttgaaatattttctgtagagttaatgtttgtaggccttagtgcatagatttgtatggcaaaggataggaaaacaaatatcataacgattaaataactatatccgcctatttatccgtgcatgctttagtgaacattcagtgcttcattgatcaattccaggatctctttagtttaccaactacatctatgagtattgctatgtacaaactaaagtagggactattctactgtactactagatggggtcctgtaacggtcttgttcgccgggagagtgaggaaaagctttggagtaacctatttccagccacgaagtcaccaggctcacatgtgaaactcctgatcctgagccagcaggagctccctggcatgggaacagtactccgcgtgctagcacttcggcaggaaggactttctggagggcagcaggcataggatgctcaacgccataaccatgtgccagatggagtggacgatgtggtagttttgcttagtct

SEQ ID NO: 32114 - DNA, 534 bp, DROSOPHILA
atggctgattttcaagaacagctgcgacagtatcgcgctcagaaaaggagaaaggaaacggtagacaacttcaaggacaaactacggagattctggatgttgggaaccggggctaataaagataccacaatagaggtacaacaggtacctactaagttcgaagctatctcggaaaactcacaagatgaggctgtgacctccagtgaaagtgaattggtgccagaggagcagcccaccagatccacagatcatcaccacaaggaaaacaactgcctaaagtacaccctctggactgtctatctgctgttctggataactctctacgttattgccataaagctaagctttggattggttttcctcatgttttccgccctctttggcatctacttcaacacccgaacggagccaaagaaacggaacgagatgagtgcctacagcgttttcaacaagaattgcgagagtatagacggcaccttgaaggccgagcagttcgaaagggaaatccgctatggatccggaagtgtacgatag

SEQ ID NO: 32115 - protein, 177 aa, DROSOPHILA
MADFQEQLRQYRAQKRRKETVDNFKDKLRRFWMLGTGANKDTTIEVQQVPTKFEAISENSQDEAVTSSESELVPEEQPTRSTDHHHKENNCLKYTLWTVYLLFWITLYVIAIKLSFGLVFLMFSALFGIYFNTRTEPKKRNEMSAYSVFNKNCESIDGTLKAEQFEREIRYGSGSVR

SEQ ID NO: 32116 - DNA, 2608 bp, DROSOPHILA
cgttactaattagtaggatagttgggtaatttcattgcgggatggattccagtgcgtagtcccgatttcagattacgattataaaactttccattttctgcagaaagtagtgcatgtacacatacgtgagctatcagcacacatctgagagattttgtaataaatccgcagcaattagacttattttcgaaacacttttaactgtcgaagaaagtccacaagcgcatatcttcattaccatatgcattgcccaatgtcacaacaattaacctacaacgaagatcttgaagacacagctagaagatttcactctgcctcatcgcagatgtatctatatctcgcatggagaaaatcccgccggagatgacgggcgacccccagccagggtcattctaagtcgtttgtaaaccgacaaccgtttaccagaacaaaattaaaaaaagaaacaaactgaaattatactgttagcacataataagaacttgtttttgaggtggtcaaggggttggaggtataaaccggaacatttcaggggatatacttgcaagagtttataattgcactgcccaaaaaaaaggtgttatgtcatgctcccatgggtgttaagtaattggtcggggcttggaagcattacattcacataaatatgtcacttaagatatcaagttgggaagttaggcaaattgactttcttctagttttctccgaataaacttgtggctatttgcatccgcggagcgcaagtgtttgcatccatttgcatgaccatcccaagtttacccattgcacactaacacaattagatatcagagcttgtccggaaacgcaaatcagctgcgaagcggccagagagctgttccatgtggccagttacccacatggatatccactgggacccacggtggttggtcttcgcctttgcagcgcgggtccaaaattgcagcactcgaaatgaaagaaaacggaagcttagtagagcgtatccgaggtacgagcaaacatgtctggcgattcggacaggtggctcaatggaacacaaacactggaccgtccagtccatcaatgtggttgcttcctctgcctgtcgctgcaatttactcttaattcgcaattatcaggacggaccgaaagtaagcctgaaagggagagagtccaatttgtagtccgatactcgaacatggtattcttttttaggtcagcgacactggttgatggaaaacagactatggatgttttactaacatatacaatttccttcactttgtagctactctgggcgccattctggactcacgttgttacctggagggcggaggttccgcggaaagttttcttgccaccgaggatttggcggtgggctccataatcggcaagctgcggatcaatggggatgccaatgccgaaacaggcgacatcaatctttcattgagggaaaagaatgcaccagttgagattcatcccggcaccaaggagctagccctatcggtggaactggacaaggagggtgtgagaggaccatcgtccatttacgtgaatgtgatctgcatacgacggcattcaacggatccggtaagcactttatccctttatcccagtgatatagactaatggtctttccttgagagaaaaccccaggaaactagggtggatagaaactagttagtgctaccataatgggaaactatatagccagcatttcgaataaaactatcgaaagtggtggctaagaacttgccgatcaggctaacgccgcaattaatcagacgtcctggtcgttgacccacatcgtgcacatttccttggagctcttcctgtcgcccacttcggaaccgcattccgcacctgcgaaggacccgttcgtgcaattcaatgggcaaccaattaacctatatacagcaagtggccaccttcttgagcccatgccaactcctccagccccacctccacctcctccaggtagtgcgtgttcccttgggctagctaagctttgttaaatttcggtaaacacggttcccggcgttgcggcttttcgaagcactctataaacaattgaaaacttgccagacacaacgcccatttcaattttagaatcaacaaagcgctagttcctacttcaacagcaacgactgctgcaagtccatttaaacgcgaaggagccatcgaaggtggaatcaagatctgaaatagattaacaaagcattcatttctagcgaatatctgctgatttccgttggagctattacatatatttatcatcaaattttgccactcaagcgaacatctcaagatcgcagactttggtctagtcaccactagtttcctggtcctgcagtccgacaggaacgcttctgtccaacccctttggcgcctgcggttagccccaacttcgtggccataaattagccattaaggcttccgtttgcgggtagaaatctagttgggtggttgaaggtagcggggatgtcctggtttggggagcgaggtccgctaaacatgcaaatgtatgcaggacatttggcggcgtggttgggctttgaactcctgcgaggtcagtgaccaggatacgtgtgctaaaaagaaggtgtttgtcttgaagtgcacacactcg

SEQ ID NO: 32117 - DNA, 471 bp, DROSOPHILA
atgtctggcgattcggacaggtggctcaatggaacacaaacactggaccgtccagtccatcaatgtggttgcttcctctgcctgtcgctgcaatttactcttaattcgcaattatcaggacggaccgaaactactctgggcgccattctggactcacgttgttacctggagggcggaggttccgcggaaagttttcttgccaccgaggatttggcggtgggctccataatcggcaagctgcggatcaatggggatgccaatgccgaaacaggcgacatcaatctttcattgagggaaaagaatgcaccagttgagattcatcccggcaccaaggagctagccctatcggtggaactggacaaggagggtgtgagaggaccatcgtccatttacgtgaatgtgatctgcatacgacggcattcaacggatccggtaagcactttatccctttatcccagtgatatagactaa

SEQ ID NO: 32118 - protein, 156 aa, DROSOPHILA
MSGDSDRWLNGTQTLDRPVHQCGCFLCLSLQFTLNSQLSGRTETTLGAILDSRCYLEGGGSAESFLATEDLAVGSIIGKLRINGDANAETGDINLSLREKNAPVEIHPGTKELALSVELDKEGVRGPSSIYVNVICIRRHSTDPVSTLSLYPSDID

SEQ ID NO: 32119 - DNA, 5163 bp, DROSOPHILA
aaggagacgatcgatcacaaggccattgagctgggaagatgctgaaaagtaaagtaacagcaatgtatgagaataatctctttacaaaacccaagatggagcagttctccaaaaacaattactgtttcgtaactcaaacatcgacaaccgtggagagcctaattttacggactgcgaatggaaaaccgtctgaatggatgcagtagtacatttagagtgatcatatgccaaaatatcggataacaacttgagtactagttaaatatactctgaagttatggcctctctactaacagtttacagtaaccaacaaaactaatctcacaactcacaagtggcgtcctaaacaatataaaacttcacgatgactagctggtataagccaaaaaagcaagcacaaatataattgctgtcgcaaactatttttgtgtgcctataataacgagtttgcaaaaaagatgtctgattatcaattatacaagcacgcgtgttaccaattattttactactatcagtgtcccaaaaacaaacaaactatctatatgtatacggttgttgttaaataattattgtagatcaacaaatactttttttgtatcggaaaaacgcattaatcggctggctatcaacaaaccatatgtcaattgattgtcaagacctaataaattttgttaaccgtgccaatttttgaaatagacgaaataaaaaaccatttaaaacttgattaaaaacaagaaaatatttaaatatgtaaaaaatttaaaagatgtatcaatccacaattgataagtctatgtcaattgaagtggctatgacaatcaattggattcacataggttataccaatttcgtattgccccacaacacgaaatgcgcttaatgataaggaatgctagagagacacgatttaaagctctactggaagagtctaaaatatcagttcccaactagcagttggcgaaagcggttgtgctggccaaataataaagacagtatcattatgtccgacaacgatgatatcgtaaaccccaatgagcacctgattattccggattggatcaatgaaaagtatttcgagagtgtactggccaaggacgaacccgatcatgtcaaggtcctgaagttcacggtagtggcggcgattccgccgggcgaaaatttcacttcgaccatgctaagggtttatatcaaactggaaatgaaaggtgagttagcgataaacattctccaattagcattttagctggtgtaagcaactggaaacccagaaacttgacccatactccatattttgcagatggtagtgtcaagaccaaaacatacattttcaagacgatgctgcccgaggagcgaggaggcagcgacatcaacgagtttggcctctttcccaaggaggcaatgatgtacaagacataccttcctgcattcgaagccctatacaaggatgtcggttgggacattcagttggcgcccaagtgcctgcacaccgaggagcgtgagggtgacatccatttcatcttcgaggatctgtgcgttaagaggtttaagaacatggatcgcacgaagggcctggacatggagcacatgaccaagtgcctgcaaaagctggccgagtatcatgcggccagtgcggtttacgaggagctgcatggtccctatcccagcgagttcagtgagggattcgttaagaaggatgtgaaaaaattccacgtcgatgggttccagctgaaggagaaggcctacaagaaggcaatgctctcgtggggtttgaaagacgccgataaatatattaaggcatttgtaagtttaagataattgaaattccatggtctgctgaaactaacaacaatatatttcttttagcccactgttaagcaatattgggcgcaatgtcttagtactttggaattaaatcccgatgaatttcatgtgcttaaccacggcgacttttggtcgagcaatctgatgagcagctatctgccggacggaactctcgagaagctgatactaatcgacttccagattgtcatgtggggtagtccggccatggacctgcttttctttctcaccctctcccccaccaacgatttgcgcatcaaggagttcgaccattttgtaaggatatactgggaacgtctggtcgagtgcttgaaggttttgaagctgaaaaagcccctgccaaaacttcgtgatcttcaaaactccatgaacaataagaaccactccttttatggtaggtttctaatgcgataattttcgctatagatttctttaacatgcaaatgcaattcttctgcagctttcttcagcatcctgaaccacctgcccattattctcttccccaccgacaaggacagcaacatacacaacttatccgctaatacggaggaaggagaaaattatagactacgtttgctctcaaatcccgcctttggaaacgttatgaaggatctgtaccccttcttgtataaccgtggaatactgaactttgaggactacgatgtctgatttattgcccggcaataaaataataggaagtacaacgaaatctcgtttatctgggggtatcgcataagtgtgcaccttatcagtataatattgctggtcatcgaggtaatcgtctgttacctcagataaaaaattatctccggagacgataactttttgtgataagttgaacataatgtcgtttcggatttaaatcagttgtaatcatgtcgcgctccatgaatatcgaaaatcccaacgaaagtctcgttgttcccaaatggttgaataagtcaaagtttgagtccttgatcgcaaaggatgaacctgatttcaccaagatagaccagtttacaactgtggccgctgtgcccccaggtggtaattttgcatcagtcatgctgcgagtttacttggatatagtaatgaaaggtaggctggctgatagagatcctatttataagaaccgagtggtaaatccaattttgcccagatggatctcagaaaagaaagtcgtatgtggtcaagactatgctggaatctgataaaggtggcaaggcggtgaatgaaatgaggtacttccacaaggagcagcagatgtactccacctatttgccgcagtttgagaaaatctatcgtgtggcgggacatcccgtgcagctgatgccgaaatgcctggaaattggggagattgatggaaatatatatttcatatttgaggatctttcgactcgaaatttcgtggcagcagatcgaacgaaaggagtgaatatggagcacatgcgactctctcttcgtaaattggccgagctgcatgccgccagtgtgatatacaaagaaaggtatggaccatatcacgctgactttgataatggattcgccagaaaggacaaaatcgagcatagtgtgagaagattcgaagtaaaagctcctgaatacaaggcagccatgaaaacgtggggaatagatgagtgctaccttaagaatttcgtaagtttcctagtgaaatcatgaatagcacattaataataactttaattacagcccactactgagcagtacggcaagctctgtttggagtccctcaatgtagatccccaggactttaatgtcctaacacatggggacttttctccctccaacattctttttaagtacaatgaaaatggagccccaagtgaggcacttatactggactttcaaatttgcaaatgggccagtccgacacaggatctgcttatgctgataatcctttcggcgcgaaaggattcgagctataaagaattcgataatattgtaagaatctactgggaatatctcatcgacttcttgagagtcttgaagtacaagaagccgcttccgcaactgagggaactgcaatctgctatctacaagaaaaacaacactttctctggtaacgaacgaatatacatattttttgtcgtatcttatactgaaattctatattttcagcattctttgccgtaatgaatcatttgccgggggatttgctgccagtttgcaaggaaaataacctgcacacgtttaatttagaagacgaggtgggcaaaagtttccgtaccaaggtgtacaccaatcccatctttgtggaagtcgtcaaggagctgtatcccatttgctgcaaccgcggactcttcaacttcgaagactactagtgatcgccaatttatgcatctgccagtgaagctttcattcgaacctattaagcaaattgtgtgcgaatattgattctggatttttcaagttttccacggcgaatgtcggggccgcaacgtaatcgaaggtcggggaccatgaaatagttttccaactagtacgcctgtaaatagaaatatgattccaaaaaatgttatctttcaacaattaacgcattgcattacttgttttagtatatacatatgtatatatgtgcatattttactcttgagataacaaaaatgtttgtctacttatcacgtactcaccgtatctacatcaaaatgctgataaaagctattaagcgatagtctagtaaaataatctagtcttgaagggataataattaatttttcacagtaacatcaaaaaaattattaataatattaaaaattatttgcttacagctttcaaagccaaaatcaaaaaatttttccaaaaatacaatacttttggcagttttaccccacactcaattcccaaattgtttaagttcaaattaacataaatacgtactcatgggtgcaccaacatatgtacgtatgtcaggttatcaggtattcccatcaccacactgctaccgttgataagcccggcgcccagtgcacccagtgtctggctactgggagaatgggaaagctctggcaattatcacccactgccttcagagagagtcttttggccaacgtgcccgacggacgatgctcagtgtccgtactgttgacgaaccagttagacgggcagttggcattgcttttggggcgttgataagtgcgcacctcaagtcacccacctcgacggatggttgttgttgttgtgcgtgcaatgaaataaaaataacatcgcgggtctgaaataagaaaaacactctcgataaggcaaggcaacgcaaaacagttgcgctgcacacttcggaccgggcacaacgccaattcacagccaatccgtttagagccaatc

SEQ ID NO: 32120 - DNA, 2298 bp, DROSOPHILA
atgtccgacaacgatgatatcgtaaaccccaatgagcacctgattattccggattggatcaatgaaaagtatttcgagagtgtactggccaaggacgaacccgatcatgtcaaggtcctgaagttcacggtagtggcggcgattccgccgggcgaaaatttcacttcgaccatgctaagggtttatatcaaactggaaatgaaagatggtagtgtcaagaccaaaacatacattttcaagacgatgctgcccgaggagcgaggaggcagcgacatcaacgagtttggcctctttcccaaggaggcaatgatgtacaagacataccttcctgcattcgaagccctatacaaggatgtcggttgggacattcagttggcgcccaagtgcctgcacaccgaggagcgtgagggtgacatccatttcatcttcgaggatctgtgcgttaagaggtttaagaacatggatcgcacgaagggcctggacatggagcacatgaccaagtgcctgcaaaagctggccgagtatcatgcggccagtgcggtttacgaggagctgcatggtccctatcccagcgagttcagtgagggattcgttaagaaggatgtgaaaaaattccacgtcgatgggttccagctgaaggagaaggcctacaagaaggcaatgctctcgtggggtttgaaagacgccgataaatatattaaggcatttcccactgttaagcaatattgggcgcaatgtcttagtactttggaattaaatcccgatgaatttcatgtgcttaaccacggcgacttttggtcgagcaatctgatgagcagctatctgccggacggaactctcgagaagctgatactaatcgacttccagattgtcatgtggggtagtccggccatggacctgcttttctttctcaccctctcccccaccaacgatttgcgcatcaaggagttcgaccattttgtaaggatatactgggaacgtctggtcgagtgcttgaaggttttgaagctgaaaaagcccctgccaaaacttcgtgatcttcaaaactccatgaacaataagaaccactccttttatgctttcttcagcatcctgaaccacctgcccattattctcttccccaccgacaaggacagcaacatacacaacttatccgctaatacggaggaaggagaaaattatagactacgtttgctctcaaatcccgcctttggaaacgttatgaaggatctgtaccccttcttgtataaccttgtaatcatgtcgcgctccatgaatatcgaaaatcccaacgaaagtctcgttgttcccaaatggttgaataagtcaaagtttgagtccttgatcgcaaaggatgaacctgatttcaccaagatagaccagtttacaactgtggccgctgtgcccccaggtggtaattttgcatcagtcatgctgcgagtttacttggatatagtaatgaaagatggatctcagaaaagaaagtcgtatgtggtcaagactatgctggaatctgataaaggtggcaaggcggtgaatgaaatgaggtacttccacaaggagcagcagatgtactccacctatttgccgcagtttgagaaaatctatcgtgtggcgggacatcccgtgcagctgatgccgaaatgcctggaaattggggagattgatggaaatatatatttcatatttgaggatctttcgactcgaaatttcgtggcagcagatcgaacgaaaggagtgaatatggagcacatgcgactctctcttcgtaaattggccgagctgcatgccgccagtgtgatatacaaagaaaggtatggaccatatcacgctgactttgataatggattcgccagaaaggacaaaatcgagcatagtgtgagaagattcgaagtaaaagctcctgaatacaaggcagccatgaaaacgtggggaatagatgagtgctaccttaagaatttccccactactgagcagtacggcaagctctgtttggagtccctcaatgtagatccccaggactttaatgtcctaacacatggggacttttctccctccaacattctttttaagtacaatgaaaatggagccccaacattctttgccgtaatgaatcatttgccgggggatttgctgccagtttgcaaggaaaataacctgcacacgtttaatttagaagacgaggtgggcaaaagtttccgtaccaaggtgtacaccaatcccatctttgtggaagtcgtcaaggagctgtatcccatttgctgcaaccgcggactcttcaacttcgaagactactag

SEQ ID NO: 32121 - protein, 765 aa, DROSOPHILA
MSDNDDIVNPNEHLIIPDWINEKYFESVLAKDEPDHVKVLKFTVVAAIPPGENFTSTMLRVYIKLEMKDGSVKTKTYIFKTMLPEERGGSDINEFGLFPKEAMMYKTYLPAFEALYKDVGWDIQLAPKCLHTEEREGDIHFIFEDLCVKRFKNMDRTKGLDMEHMTKCLQKLAEYHAASAVYEELHGPYPSEFSEGFVKKDVKKFHVDGFQLKEKAYKKAMLSWGLKDADKYIKAFPTVKQYWAQCLSTLELNPDEFHVLNHGDFWSSNLMSSYLPDGTLEKLILIDFQIVMWGSPAMDLLFFLTLSPTNDLRIKEFDHFVRIYWERLVECLKVLKLKKPLPKLRDLQNSMNNKNHSFYAFFSILNHLPIILFPTDKDSNIHNLSANTEEGENYRLRLLSNPAFGNVMKDLYPFLYNLVIMSRSMNIENPNESLVVPKWLNKSKFESLIAKDEPDFTKIDQFTTVAAVPPGGNFASVMLRVYLDIVMKDGSQKRKSYVVKTMLESDKGGKAVNEMRYFHKEQQMYSTYLPQFEKIYRVAGHPVQLMPKCLEIGEIDGNIYFIFEDLSTRNFVAADRTKGVNMEHMRLSLRKLAELHAASVIYKERYGPYHADFDNGFARKDKIEHSVRRFEVKAPEYKAAMKTWGIDECYLKNFPTTEQYGKLCLESLNVDPQDFNVLTHGDFSPSNILFKYNENGAPTFFAVMNHLPGDLLPVCKENNLHTFNLEDEVGKSFRTKVYTNPIFVEVVKELYPICCNRGLFNFEDY

SEQ ID NO: 32122 - DNA, 6512 bp, DROSOPHILA
tcaagtgcgggctattgtggctgcccaccgtgccgagcactggcagtcctcggacgggcaggagcagcgtaccaatggtctttcgttccgctccgccgccacgacaggcatagaaggtcattttgacgggacggtgatcggttttgagccgcttaatcccagccaggtcacactcccagatacagttgctgttaaagataatggtctcctccgactgggtgccctccacctcaaagtccacactgttcagagcggcgttcatcactatctgctgccgatctgtggcatcgcgtccaatgaagtttatcgctggacagagagtaagctattagctttaagaatgccaggtacaatataataacccaccctcgaccacgtggagcagcacgcaatagacctggtcggaatccttggagctgacacttccgcttcggccaccactgcggccaccgctggctgtcatcgaacgaggtgccttggatggcttgaccatttttgtgtaagtgtagcgaaatgtcgatttggagagtgttaaactttcaaagcaaaatttaaacgtggatcctcgtaagctagtgcatcgagttccactacgatcttcctgttccgttacctccgcttttatatagttttgtatgtgactacttactcgctctgaacggagaggcaaaagccacttggattggtatccaaggttacgcctggcgattactatcgagtgtgtggaaggcaggtggaactggtgcactcaaaacaaccaccgaggagtttaaatgaccggggtgggtagaggtatcattaatttttgatcatttcatcaattatcgtttatttgtaacccttgtaattttatttttatctttacattaacaaaataaaggtataatatggggtaaaaatccaatgaaaagtaaaatgtatatattaataccgtgctgtcttattttaccgctgacgaaaactgaactgaacagaataggtagtacttttgttgcctatttcatagagtaaactgctctagaaccgtgcgcctggtgggctcaactgattcctgtccctcctcatagtggctctgctgcatgcgatggttctttaaagcagtgccctggataaagcgctctccacagacgccacattggtagggacgctcgccagtgtgccgccggatgtgcagggtgaggtcgttggattgcgtgaagctcttctcgcagtaggtgcacttgtagggccgttctccgctgtgaattcgcatgtgctgctgcagtttatacgaacgggcgaatcccttctggcacactgtgcatacatgtggacgttcgccggtatgcgtacgtcggtggcactggagatcagaggatcgtgggaaggccatagtgcagtactcgcacttgaaaggtttctcaccggtatgacgtcgcatgtggatgattaagttggaggaagaactgaccgccttgccgcagaaagcacataggaaccgctttggttccttaggggatataggtctattcggagtcttcgctgtactcggtttgcagtcgggcccatggaacttttttaagtgcgccgtcagccgatctttccgattgtatttccttgtacaaagtccacactgaaagacctggccttcggtttttggctcgtcacctgacgcttcctttgactcatctagctcctgatcttctgttttcacatgttgcaaatccatgtgtagcaaaaggtttgactcccacatgaacttgtatccgcagcgtgtgcatttgaactgcttttctcggttttcgcactgagttcttttgtggtgcgatataatttccgggcagacgctcttgaataggcaactatcacagccgtcggagatcttctccatccggtgcatagcctgctggtgctgatatagctcgaatttccgtaaacatcttagttggcacatattgcacgtataagaggaaggcgctcctggtggttttatgtgtgtcctagagtcttcatcatcagtctcggaatcatacaaatccatctcgaaacccatttggttagtaatcgagtagttttgaagtgaggagtagtcgtggtgactaccggcgggcatagtttccagatgaagtcgcaaagcggcgatagtaggaaagctcacgttgcacactcggcattccaccttttttcggcctccaggattcacatatgagtccagtatggcctcagcataaggcaactggctaacacttatcccgtgacgagcgatgtgctgtaaaagattggccctacgataaaagcgacgtgcacaccaacggcatcggaagatatttgattcctgaccgtgcattagtgtatggcgcgtgagatccttttgcatcctaaaactgcgattacactttccgcactgcagatcgccatctactttaggtaaatcatcctgtattgaaagttcatctagcatatggaatacttccatatggagcttcagattctcccgccagcggaaacgaagcggacactttcggcactgaaagagtttttgcggattgtggcaaagggttctggagtggtgatcgagcaaagattcattaacaaatcgtgtctggcagttggaacatacgaggactgcctcctcccacttgtgctcctccagttggtgggcatacagctgatgtttcctcttcacaaccgtcgtacagaggttgcatggatagtttagagatgagtgattatcctcttgctcggactcagtatcagtttcgctgctttccagattcagctccaggccggcctcgtttgtgatagaaataaagcggtctaagtcgaattccctttgcacatcagccataatcatttcggccagttcatctttttctagagtattttccagatctgggtaaaaagcttttgaagcactcggaatatctctgtcttcggcgaaactcagttcgtattgatgagaactcaaatgagaccttagatcactgatctttgagtggcgtgagaggcagatcatgcactgaatcagcttgcaaccatgaggacgacttagccgggccagaatcatttcctggttaacgtcaggtacgacaggctgattatttatgtagtctgaatttccagcgtgtactttaaggtgggactttaggccatccttgcggtggaacctacgatggcaatggggacagtcgaactgggcagcagactgaggttgatgcaggcgtttgtgacgattgagatccttgtgccagatgaatacctacgaagtaaagtgtcaggattaatattgcttattttaaaaaatcgtttaccttttcgcactggtcgcacttcaattttgtaggtcgttcctctgcgtctttcgttttgttgtggtgagtcttctcgtgtttctcatagttcgattcccatatgaaccggatattacatattcggcagtgaaatcgggagtgtttcttttcgcaacggtgcctacgatgttgttgaagaagggctttgcttacgaagccagatccacagtagtcgcagcgacagggaagctcagccaccccatcagaatgtaagcatatttggtgcttcatcaggttcatcagtgaattcgaagtttctccacataaaagacagatgtgcgatgttttagatgtctcctcgtcgctcaactctgtttcggattcaaaaagatcgagctcctgcccactttcggtactggcgttatagtagcgatcgaagtcctgaacctcaaaatcctcagctatacgaacagcaagatctgagatactgcaattcaatccgtcaggataaaacgaccgaaagaacaaggaattgtactccgggctaatgccattcaaatcatgttggtgggttattaagtgaaggcgaagttgcgataagctagatagcgaaatatcgcacagggagcacaatatttggctggcaatcgttttctcctcgcggtgcgagcacgcgtgtctttggaggttttccggccacataaacctcccggaacatttacggcagcgatatcttcggattttgctctggcaatgcgtgttcagatgtttgttgtacatcgttaggcacaggaaaccaactttacaggaactgcagcgttgccaaggcagcgttgtagcagattgggagtggtcctctagggtgtgtttcatcaggcgatgtttgcgattaaaagacatattgcacacgaagcaatgatatttagactctttgctgtcacactcttcgtcggaatcgctgagtcccagctcgtatccgtggaaattcactacacaggcatacttctccaaatggccatctgctatgtcaacgcagatctgtttctttatattgtccaagtcacatggcaagccaggaaaatgctctcttaccacgtcactatccgttctcaagttgactaaggtctccgtatctgcgtgatcccataggtgagctctaagctcctccattcgctggcagctcaacccgcatagcttgcactcgattctttttaactttcctgagctatagaggcgctcagcaaaacgccactctttcccgagctggagagccttccatttggcctctcgcttcttgtggcatcggagatgaaatatgtacttgtccttgcgcaggaatcccttgccacaggtgtcgcacacgtatgaagcgttctcgaagtggatcctggcgtggcgctgcatgtcgcggtaccaggagaatgtctttccgcaaacctcacatgcgtgccggccatccgtggtcatcgcctggcttttcgctggaccaggtgggcgtcctcgacggcgcttaaccggcgatggttcagatggcttacatctaggagggacaaaaagattagggcttatagtgctattatattagacttactcctcgttttcgctttccactggatgctttacttttcgagagcttcgacgtagatgatacgacttcttttccacttgatctctttaaggaaattaatgttatattgtaaagacggtaagtttgaagaacacttactcatcgctttccggaccagaacaaaattcccgatcgctgccactcgccggctgccacttaagttccaaagccgtcgcttcggtgtcgtccacttccacttcggacttgttaccgccatcatcgaggtctacttccgtttttatgttctgttccgcaggaatatcgatgggcaattcgtctagacattccctcaactgagccagcagctctccatggacttttctggcctgttgcacaaaggtataggcactttccattcgtctccagcactcgctgcatatatgttgcggcaggttgtcatcggtgttttccagctgggtttaaggatcaggattgttacaaggttaggaaggtatgttctaagaccaagttctgttaacagactcacatcgatttgcgtcaattcctggagcaccgcatagtagcttttggaggagtctttgtccaggcaagtggacaagggcagcaattggctgttctgcaccgcacaggtgcggcacacgtccgacggaagcattttttccgtagtgagctcgcttagctcatgattttcaactagaatgtttatgaaaatcactgaaaaacaaattaaacttataaatgcaacaagagcccttttgagtgtgaccgatgtttatgcaatcagctgtttcacaatgcaatccgcgtttttcagcactactcactcagctgttttttcagttggctaaactgacactttttgctctttaacttggttataaaaaaagtaaaataaatgcgttaggagatgaccaggacgtgcagagtgtgtggctgcgacgacggacgctactggattgaaacgcccgtggagaagtacgcggagaagaccttcgtccagctgctggtcgagctaacgcgaatcgaggtgggtgaattgtccttttgtcattcaattggtgccctcatctatattaatttactttatttaaatggtactaaaaggtggtcatggcgcaagctgagaagttcccacagtggctgtgctacgcgtgtgccgagaagctggagagcacctacgattttgtgctgcaggcacgtcgaacacacgagctgtggctgcagaaaatcggggattctttgaatggggatgacgagatggagggcactgcggccttggaatgcctgcgtgagacacccatccacctgtttgagattgaaggcgtgaccatcaagacggaggaactggcttcaacgcaacaggcgcccaaggcagatcctttagtgcgcccgcgcattgtcaaacggagtattgtacactttagcgattccgatgaagacctggatgatgtgcctctgcgtcaacgtaagatagcagcctcggtctgcggctctgacacgacgaaggaaaatgtttgcgagctgtgcaacaaggtcttcagatatgtcaccaatctgtatcgtcacaagcagagggaccacggaattctgggcaagaacggagaggagtatgaaacaactttatgctagctagatagccatctaaaagtttttta

SEQ ID NO: 32123 - DNA, 3801 bp, DROSOPHILA
atgcttccgtcggacgtgtgccgcacctgtgcggtgcagaacagccaattgctgcccttgtccacttgcctggacaaagactcctccaaaagctactatgcggtgctccaggaattgacgcaaatcgatctggaaaacaccgatgacaacctgccgcaacatatatgcagcgagtgctggagacgaatggaaagtgcctatacctttgtgcaacaggccagaaaagtccatggagagctgctggctcagttgagggaatgtctagacgaattgcccatcgatattcctgcggaacagaacataaaaacggaagtagacctcgatgatggcggtaacaagtccgaagtggaagtggacgacaccgaagcgacggctttggaacttaagtggcagccggcgagtggcagcgatcgggaattttgttctggtccggaaagcgatgaagatcaagtggaaaagaagtcgtatcatctacgtcgaagctctcgaaaagtaaagcatccagtggaaagcgaaaacgaggaatgtaagccatctgaaccatcgccggttaagcgccgtcgaggacgcccacctggtccagcgaaaagccaggcgatgaccacggatggccggcacgcatgtgaggtttgcggaaagacattctcctggtaccgcgacatgcagcgccacgccaggatccacttcgagaacgcttcatacgtgtgcgacacctgtggcaagggattcctgcgcaaggacaagtacatatttcatctccgatgccacaagaagcgagaggccaaatggaaggctctccagctcgggaaagagtggcgttttgctgagcgcctctatagctcaggaaagttaaaaagaatcgagtgcaagctatgcgggttgagctgccagcgaatggaggagcttagagctcacctatgggatcacgcagatacggagaccttagtcaacttgagaacggatagtgacgtggtaagagagcattttcctggcttgccatgtgacttggacaatataaagaaacagatctgcgttgacatagcagatggccatttggagaagtatgcctgtgtagtgaatttccacggatacgagctgggactcagcgattccgacgaagagtctgaggattttgaggttcaggacttcgatcgctactataacgccagtaccgaaagtgggcaggagctcgatctttttgaatccgaaacagagttgagcgacgaggagacatctaaaacatcgcacatctgtcttttatgtggagaaacttcgaattcactgatgaacctgatgaagcaccaaatatgcttacattctgatggggtggctgagcttccctgtcgctgcgactactgtggatctggcttcgtaagcaaagcccttcttcaacaacatcgtaggcaccgttgcgaaaagaaacactcccgatttcactgccgaatatgtaatatccggttcatatgggaatcgaactatgagaaacacgagaagactcaccacaacaaaacgaaagacgcagaggaacgacctacaaaattgaagtgcgaccagtgcgaaaaggtattcatctggcacaaggatctcaatcgtcacaaacgcctgcatcaacctcagtctgctgcccagttcgactgtccccattgccatcgtaggttccaccgcaaggatggcctaaagtcccaccttaaagtacacgctggaaattcagactacataaataatcagcctgtcgtacctgacgttaaccaggaaatgattctggcccggctaagtcgtcctcatggttgcaagctgattcagtgcatgatctgcctctcacgccactcaaagatcagtgatctaaggtctcatttgagttctcatcaatacgaactgagtttcgccgaagacagagatattccgagtgcttcaaaagctttttacccagatctggaaaatactctagaaaaagatgaactggccgaaatgattatggctgatgtgcaaagggaattcgacttagaccgctttatttctatcacaaacgaggccggcctggagctgaatctggaaagcagcgaaactgatactgagtccgagcaagaggataatcactcatctctaaactatccatgcaacctctgtacgacggttgtgaagaggaaacatcagctgtatgcccaccaactggaggagcacaagtgggaggaggcagtcctcgtatgttccaactgccagacacgatttgttaatgaatctttgctcgatcaccactccagaaccctttgccacaatccgcaaaaactctttcagtgccgaaagtgtccgcttcgtttccgctggcgggagaatctgaagctccatatggaagtattccatatgctagatgaactttcaatacaggatgatttacctaaagtagatggcgatctgcagtgcggaaagtgtaatcgcagttttaggatgcaaaaggatctcacgcgccatacactaatgcacggtcaggaatcaaatatcttccgatgccgttggtgtgcacgtcgcttttatcgtagggccaatcttttacagcacatcgctcgtcacgggataagtgttagccagttgccttatgctgaggccatactggactcatatgtgaatcctggaggccgaaaaaaggtggaatgccgagtgtgcaacgtgagctttcctactatcgccgctttgcgacttcatctggaaactatgcccgccggtagtcaccacgactactcctcacttcaaaactactcgattactaaccaaatgggtttcgagatggatttgtatgattccgagactgatgatgaagactctaggacacacataaaaccaccaggagcgccttcctcttatacgtgcaatatgtgccaactaagatgtttacggaaattcgagctatatcagcaccagcaggctatgcaccggatggagaagatctccgacggctgtgatagttgcctattcaagagcgtctgcccggaaattatatcgcaccacaaaagaactcagtgcgaaaaccgagaaaagcagttcaaatgcacacgctgcggatacaagttcatgtgggagtcaaaccttttgctacacatggatttgcaacatgtgaaaacagaagatcaggagctagatgagtcaaaggaagcgtcaggtgacgagccaaaaaccgaaggccaggtctttcagtgtggactttgtacaaggaaatacaatcggaaagatcggctgacggcgcacttaaaaaagttccatgggcccgactgcaaaccgagtacagcgaagactccgaatagacctatatcccctaaggaaccaaagcggttcctatgtgctttctgcggcaaggcggtcagttcttcctccaacttaatcatccacatgcgacgtcataccggtgagaaacctttcaagtgcgagtactgcactatggccttcccacgatcctctgatctccagtgccaccgacgtacgcataccggcgaacgtccacatgtatgcacagtgtgccagaagggattcgcccgttcgtataaactgcagcagcacatgcgaattcacagcggagaacggccctacaagtgcacctactgcgagaagagcttcacgcaatccaacgacctcaccctgcacatccggcggcacactggcgagcgtccctaccaatgtggcgtctgtggagagcgctttatccagggcactgctttaaagaaccatcgcatgcagcagagccactatgaggagggacaggaatcagttgagcccaccaggcgcacggttctagagcagtttactctatga

SEQ ID NO: 32124 - protein, 1266 aa, DROSOPHILA
MLPSDVCRTCAVQNSQLLPLSTCLDKDSSKSYYAVLQELTQIDLENTDDNLPQHICSECWRRMESAYTFVQQARKVHGELLAQLRECLDELPIDIPAEQNIKTEVDLDDGGNKSEVEVDDTEATALELKWQPASGSDREFCSGPESDEDQVEKKSYHLRRSSRKVKHPVESENEECKPSEPSPVKRRRGRPPGPAKSQAMTTDGRHACEVCGKTFSWYRDMQRHARIHFENASYVCDTCGKGFLRKDKYIFHLRCHKKREAKWKALQLGKEWRFAERLYSSGKLKRIECKLCGLSCQRMEELRAHLWDHADTETLVNLRTDSDVVREHFPGLPCDLDNIKKQICVDIADGHLEKYACVVNFHGYELGLSDSDEESEDFEVQDFDRYYNASTESGQELDLFESETELSDEETSKTSHICLLCGETSNSLMNLMKHQICLHSDGVAELPCRCDYCGSGFVSKALLQQHRRHRCEKKHSRFHCRICNIRFIWESNYEKHEKTHHNKTKDAEERPTKLKCDQCEKVFIWHKDLNRHKRLHQPQSAAQFDCPHCHRRFHRKDGLKSHLKVHAGNSDYINNQPVVPDVNQEMILARLSRPHGCKLIQCMICLSRHSKISDLRSHLSSHQYELSFAEDRDIPSASKAFYPDLENTLEKDELAEMIMADVQREFDLDRFISITNEAGLELNLESSETDTESEQEDNHSSLNYPCNLCTTVVKRKHQLYAHQLEEHKWEEAVLVCSNCQTRFVNESLLDHHSRTLCHNPQKLFQCRKCPLRFRWRENLKLHMEVFHMLDELSIQDDLPKVDGDLQCGKCNRSFRMQKDLTRHTLMHGQESNIFRCRWCARRFYRRANLLQHIARHGISVSQLPYAEAILDSYVNPGGRKKVECRVCNVSFPTIAALRLHLETMPAGSHHDYSSLQNYSITNQMGFEMDLYDSETDDEDSRTHIKPPGAPSSYTCNMCQLRCLRKFELYQHQQAMHRMEKISDGCDSCLFKSVCPEIISHHKRTQCENREKQFKCTRCGYKFMWESNLLLHMDLQHVKTEDQELDESKEASGDEPKTEGQVFQCGLCTRKYNRKDRLTAHLKKFHGPDCKPSTAKTPNRPISPKEPKRFLCAFCGKAVSSSSNLIIHMRRHTGEKPFKCEYCTMAFPRSSDLQCHRRTHTGERPHVCTVCQKGFARSYKLQQHMRIHSGERPYKCTYCEKSFTQSNDLTLHIRRHTGERPYQCGVCGERFIQGTALKNHRMQQSHYEEGQESVEPTRRTVLEQFTL

SEQ ID NO: 32125 - DNA, 6540 bp, DROSOPHILA
agggttacctggtgctcgatcacgagggaagctccgacacgcaatggtggaacagcaagcccaaggatgcagccattttggactttaccaaaactgaggttcaggagtggttcagcaagcgtttaaagcgccttcaggatgaggatggcattgatagcttcaagtttgatgccggagagaccagttggctacccagtgatcctgtactccaggctagcagttccatggtgacaccactgcaggcggtgggcgactacgtgcgtactgtagcggcattcggagacatggtggaggttcgatcagcccagaacactcaagatcagccaatcttcgtgcgcatcgtggacaaggactccgaatggggatggaacaacggcctgctcacactgatctcttcgatgctgcaaatgaacctcaacggttatcctttcgtccttcccgatatgattggtggtaatggctactacgaaaagccaccaaccaaggagcttttcctccgttggctgcaggccaacgtctttatgcccgccctgcagttctccttcgttccctggaactttgacgacgaggccattgcgatcagcaagaacttcaccgccctccatgccacctatacaccttacattatgaagctctttaagcgcgctgtggattctggtgaacctgtgaatgttcccctctggtggatcgccccgactgatgaggtggcgcagtctatctatgatggtaatcctgtcacttaacttaaaattttagcagctataactggtttatatctcgcagagttccttttgggcgaagacatcatcgctgctcccgttgtggtcgagggcgccaccaagcgagacatttacctgccagagggcgagtggcaggatggaaacagcgaccaggtgtacactggacccacctgggtgatggactacgccgctcccttggataccctaccctactttttgcgcgtgggattcacactggagtagagcggaaaccgttttatatatctaaacttcctagcgtgtatatttaaaaaaaaaacagaagacgaacaaacttaataaagttaaataattataacaatgttcacacagttaatttggtaaaatcgaatggatcgtatctttaaatcttatgggccgccaccatacgctttctgtttggaggcgcaaagtcacccgatccggacagcgaattgagggtatatcttggagacatgccattctggcgaaactgtccgtactcccgctcgaattcctcagcatccttggttaggatctttcgaaggtcaatgggtctgcaaacgaaatggacttaggtaagttgaattaaaggttttagtaaaaaagcagaaacttactcgactctaatattgctatgctccctttccaagctcctttcgtacatggccagtttgagggcgtgcacccgtttggccgatctgcgccaacgcttcctaaagagttccttttcgcgggccagattattataccggtaatgctgcgatcttagttccccgagtacttccttgaggtctccctcgtcggagccctgcgccttgagatccccaatctgctgttccaaggccgcgatgcgcacctttaattccgttttttcgctgtacagctgaaggttctcctgccgcagctctctactccgattctcgaaaagcctaacctgttcctccatctcagatttcagcagagctatgtgctcctcgagctctgtaaacttcgcctcgtagtcaacttccgatacattaggtattttgcttataaaggtctcatccaaattcgtgtccgccttgtgcagttgatgtaatctggcctcttggctttccatctgctccaactgtttaatgtagtgcatctcttttcgtgccagctcctgctcaaagagatctatttgctgccttcgccaggacttgattttttgtcctattgagtcaatagtacttgaaggcttttccatggtaaaatgctctttagaggtgctttttaactttcgagattccccttttttcgttttcggatattcctcaactgttggattatcacacgcaggcttagccttttttttaataatttttttagcctcaacagaaacaacttcatcggctggtcctttattttcggtatcttctatcttctccagaataaccgatgattttttcctcactattttctttttgactggctttattgtttcctcttctaaagtttcgtagtcttgagcgacagtatcattcgttaccaaagtcttcttaagcttcttctttttcaagacttgaacatctgtttgttcaacatctggttctattaactctttgcattttacattaccctccgtcttggagatacttttttgggagctggtgtactcaacgtggaacaactgctggtctcctgacgtatccctcttctttttttttacacgatctacttgaggctgatcagtgataggatttgcattatcagtccctcgagattcagactgcgaagaaggttcctcggagggtgtaagctccgcctggtatacctgatcctcgtgtatagaaatttttttctttttcctaacacaatctgttttagaacgagcagaggatcttagattgatatattcttcggacctgacttcaaccaaaagatcgtcctttgacaaagagctcaattttttcttttcacgatctcgtttgggattgacaaaagtgacccgctgttctgtttctgtgtaaacaatttcagcaggttttgaattgccttccgaaatagagatatactcttcagagctcgccaaatcgtttaggtttatcggattttcacctatcattgtcataggatccttttcaggatgacagaaagtgatttcctcctcataagaggtttcataatcgattcttttgaccttatcctcttcgggttttttaactttcctttttgttggcttggaagtttttgcctgaccgagcgccacctgatcctcgtagaggacctcgtcgagctcagcggggcaagtcttctgaagaaacttttccgtttcaatcaaggcttgagtctgcactttattaacctccacccaacgggcccgaagttttagatcgcctttagaggggttaggtctccctttttccagagtatctgtggatgaatcttcaaagttatgcaattcattggatattactagttttgatttggatttccgtttcttttggatactaaatacacttatgtctgtctctaaatcagtgtccacgtgctctggtggtctcatagttttagaagctcctggttttttgtctaacttttcattggaggaactgtgttcttcagaaagagcataacttaaatcctcgttattctcctcgcagttttccttttgtatgcggcttcctttcgtttgattatttaatataggaagattttcctggatttttggcacattatttagttcactttgggaaacaggtttagattttcttaaagattttggtgggacctcattaattgtttctagttggctttttttcccctgcaattcaaggtctgcctttttgtgtttttttactttgagctccgtttgcagtaaggactcgctttgacctgcttttatcctttccaactcagctatcttttcttgtcttttttcctccagctcgaacaagtctaaagaagtaagttcatcaacgttctggagattctccaaagagtttctggtatttcttgaagattccctgattaatttttttgattcctgggactttctttgtggcgatgtattatgttttgagtttttggtattagatttcatttcgattacttctgtttcggaatcatttgccaattgtttcattacattagatgcaatttcatctgtctcttcactttcattcaaattcaatctcgaacgaactactgatgcgcaaaacgtctgtcccaagtactgctcatcctcgctatccaagttgccgctggcaatcgaaggtgttcgttcgggctcctcctgttcctgtcgtgaaaatatcgtcttaagatccacactaaaagtgtactccattagtggcggcttgggttccctgccgctgtccgtccggccaaatcggttaaaggagaaggagccgttggaagtgtactttcggttgtcggagaagaagtcatccgcaggtagtagattagtaaagtccatgcggtaatgagctataaagtaaattagattagataatgtattgaatataaaatcttttaaaaaagccatgctcacctatagccgttccattcatgtacatgttaatgggcagatagaagatgcgctgaaaatagagcctcatgctgcgcaaggatgttttgaaacgcagtccaaggacatcgttgagagtgtaggtgtcggattcgtttaactttaactcaatgttggttacattgcccacaaagtcaaacaccaagatcacggagcttggtggcttgccctggttaagcgacttcaccagcccggtcacgttccttagctgcttcagctgcagcaccacctcgataatgtcacaatcgactagcggatcattgcccacctgcagcaggcccagttgcaccaaagactgtacatagacgttggcctggcataatcagaaaaataaaattagttgtatgacaatgatattaacaaatccacctattcacctgcgactggagcatgctagcagttatcgagtgtccgggcgactgcatcgggggtgtgggtggcgatttgacctatacaatataaattaatatacgctatgcaccactttctcaaccacttacttcggtgaactgcataaagtgttcaaagtccttggtgtggaggatggacttcttgataatggtcagcatgagcagcacctccggcttgtgggagcggaactcactggaggtgcagattagcttgtgccagaacatcttcaagtgcgggctattgtggctgcccaccgtgccgagcactggcagtcctcggacgggcaggagcagcgtaccaatggtctttcgttccgctccgccgccacgacaggcatagaaggtcattttgacgggacggtgatcggttttgagccgcttaatcccagccaggtcacactcccagatacagttgctgttaaagataatggtctcctccgactgggtgccctccacctcaaagtccacactgttcagagcggcgttcatcactatctgctgccgatctgtggcatcgcgtccaatgaagtttatcgctggacagagagtaagctattagctttaagaatgccaggtacaatataataacccaccctcgaccacgtggagcagcacgcaatagacctggtcggaatccttggagctgacacttccgcttcggccaccactgcggccaccgctggctgtcatcgaacgaggtgccttggatggcttgaccatttttgtgtaagtgtagcgaaatgtcgatttggagagtgttaaactttcaaagcaaaatttaaacgtggatcctcgtaagctagtgcatcgagttccactacgatcttcctgttccgttacctccgcttttatatagttttgtatgtgactacttactcgctctgaacggagaggcaaaagccacttggattggtatccaaggttacgcctggcgattactatcgagtgtgtggaaggcaggtggaactggtgcactcaaaacaaccaccgaggagtttaaatgaccggggtgggtagaggtatcattaatttttgatcatttcatcaattatcgtttatttgtaacccttgtaattttatttttatctttacattaacaaaataaaggtataatatggggtaaaaatccaatgaaaagtaaaatgtatatattaataccgtgctgtcttattttaccgctgacgaaaactgaactgaacagaataggtagtacttttgttgcctatttcatagagtaaactgctctagaaccgtgcgcctggtgggctcaactgattcctgtccctcctcatagtggctctgctgcatgcgatggttctttaaagcagtgccctggataaagcgctctccacagacgccacattggtagggacgctcgccagtgtgccgccggatgtgcagggtgaggtcgttggattgcgtgaagctcttctcgcagtaggtgcacttgtagggccgttctccgctgtgaattcgcatgtgctgctgcagtttatacgaacgggcgaatcccttctggcacactgtgcatacatgtggacgttcgccggtatgcgtacgtcggtggcactggagatcagaggatcgtgggaaggccatagtgcagtactcgcacttgaaaggtttctcaccggtatgacgtcgcatgtggatgattaagttggaggaagaactgaccgccttgccgcagaaagcacataggaaccgctttggttccttaggggatataggtctattcggagtcttcgctgtactcggtttgcagtcgggcccatggaacttttttaagtgcgccgtcagccgatctttccgattgtatttccttgtacaaagtccacac

SEQ ID NO: 32126 - DNA, 4241 bp, DROSOPHILA
gtaacggaacaggaagatcgtagtggaactcgatgcactagcttacgaggatccacgtttaaattttgctttgaaagtttaacactctccaaatcgacatttcgctacacttacacaaaaatggtcaagccatccaaggcacctcgttcgatgacagccagcggtggccgcagtggtggccgaagcggaagtgtcagctccaaggattccgaccaggtctattgcgtgctgctccacgtggtcgaggcgataaacttcattggacgcgatgccacagatcggcagcagatagtgatgaacgccgctctgaacagtgtggactttgaggtggagggcacccagtcggaggagaccattatctttaacagcaactgtatctgggagtgtgacctggctgggattaagcggctcaaaaccgatcaccgtcccgtcaaaatgaccttctatgcctgtcgtggcggcggagcggaacgaaagaccattggtacgctgctcctgcccgtccgaggactgccagtgctcggcacggtgggcagccacaatagcccgcacttgaagatgttctggcacaagctaatctgcacctccagtgagttccgctcccacaagccggaggtgctgctcatgctgaccattatcaagaagtccatcctccacaccaaggactttgaacactttatgcagttcaccgaagtcaaatcgccacccacacccccgatgcagtcgcccggacactcgataactgctagcatgctccagtcgcaggccaacgtctatgtacagtctttggtgcaactgggcctgctgcaggtgggcaatgatccgctagtcgattgtgacattatcgaggtggtgctgcagctgaagcagctaaggaacgtgaccgggctggtgaagtcgcttaaccagggcaagccaccaagctccgtgatcttggtgtttgactttgtgggcaatgtaaccaacattgagttaaagttaaacgaatccgacacctacactctcaacgatgtccttggactgcgtttcaaaacatccttgcgcagcatgaggctctattttcagcgcatcttctatctgcccattaacatgtacatgaatggaacggctatagctcattaccgcatggactttactaatctactacctgcggatgacttcttctccgacaaccgaaagtacacttccaacggctccttctcctttaaccgatttggccggacggacagcggcagggaacccaagccgccactaatggagtacacttttagtgtggatcttaagacgatattttcacgacaggaacaggaggagcccgaacgaacaccttcgattgccagcggcaacttggatagcgaggatgagcagtacttgggacagacgttttgcgcatcagtagttcgttcgagattgaatttgaatgaaagtgaagagacagatgaaattgcatctaatgtaatgaaacaattggcaaatgattccgaaacagaagtaatcgaaatgaaatctaataccaaaaactcaaaacataatacatcgccacaaagaaagtcccaggaatcaaaaaaattaatcagggaatcttcaagaaataccagaaactctttggagaatctccagaacgttgatgaacttacttctttagacttgttcgagctggaggaaaaaagacaagaaaagatagctgagttggaaaggataaaagcaggtcaaagcgagtccttactgcaaacggagctcaaagtaaaaaaacacaaaaaggcagaccttgaattgcaggggaaaaaaagccaactagaaacaattaatgaggtcccaccaaaatctttaagaaaatctaaacctgtttcccaaagtgaactaaataatgtgccaaaaatccaggaaaatcttcctatattaaataatcaaacgaaaggaagccgcatacaaaaggaaaactgcgaggagaataacgaggatttaagttatgctctttctgaagaacacagttcctccaatgaaaagttagacaaaaaaccaggagcttctaaaactatgagaccaccagagcacgtggacactgatttagagacagacataagtgtatttagtatccaaaagaaacggaaatccaaatcaaaactagtaatatccaatgaattgcataactttgaagattcatccacagatactctggaaaaagggagacctaacccctctaaaggcgatctaaaacttcgggcccgttgggtggaggttaataaagtgcagactcaagccttgattgaaacggaaaagtttcttcagaagacttgccccgctgagctcgacgaggtcctctacgaggatcaggtggcgctcggtcaggcaaaaacttccaagccaacaaaaaggaaagttaaaaaacccgaagaggataaggtcaaaagaatcgattatgaaacctcttatgaggaggaaatcactttctgtcatcctgaaaaggatcctatgacaatgataggtgaaaatccgataaacctaaacgatttggcgagctctgaagagtatatctctatttcggaaggcaattcaaaacctgctgaaattgtttacacagaaacagaacagcgggtcacttttgtcaatcccaaacgagatcgtgaaaagaaaaaattgagctctttgtcaaaggacgatcttttggttgaagtcaggtccgaagaatatatcaatctaagatcctctgctcgttctaaaacagattgtgttaggaaaaagaaaaaaatttctatacacgaggatcaggtataccaggcggagcttacaccctccgaggaaccttcttcgcagtctgaatctcgagggactgataatgcaaatcctatcactgatcagcctcaagtagatcgtgtaaaaaaaaagaagagggatacgtcaggagaccagcagttgttccacgttgagtacaccagctcccaaaaaagtatctccaagacggagggtaatgtaaaatgcaaagagttaatagaaccagatgttgaacaaacagatgttcaagtcttgaaaaagaagaagcttaagaagactttggtaacgaatgatactgtcgctcaagactacgaaactttagaagaggaaacaataaagccagtcaaaaagaaaatagtgaggaaaaaatcatcggttattctggagaagatagaagataccgaaaataaaggaccagccgatgaagttgtttctgttgaggctaaaaaaattattaaaaaaaaggctaagcctgcgtgtgataatccaacagttgaggaatatccgaaaacgaaaaaaggggaatctcgaaagttaaaaagcacctctaaagagcattttaccatggaaaagccttcaagtactattgactcaataggacaaaaaatcaagtcctggcgaaggcagcaaatagatctctttgagcaggagctggcacgaaaagagatgcactacattaaacagttggagcagatggaaagccaagaggccagattacatcaactgcacaaggcggacacgaatttggatgagacctttataagcaaaatacctaatgtatcggaagttgactacgaggcgaagtttacagagctcgaggagcacatagctctgctgaaatctgagatggaggaacaggttaggcttttcgagaatcggagtagagagctgcggcaggagaaccttcagctgtacagcgaaaaaacggaattaaaggtgcgcatcgcggccttggaacagcagattggggatctcaaggcgcagggctccgacgagggagacctcaaggaagtactcggggaactaagatcgcagcattaccggtataataatctggcccgcgaaaaggaactctttaggaagcgttggcgcagatcggccaaacgggtgcacgccctcaaactggccatgtacgaaaggagcttggaaagggagcatagcaatattagagtcgaacccattgaccttcgaaagatcctaaccaaggatgctgaggaattcgagcgggagtacggacagtttcgccagaatggcatgtctccaagatataccctcaattcgctgtccggatcgggtgactttgcgcctccaaacagaaagcgtatggtggcggcccataagatttaaagatacgatccattcgattttaccaaattaactgtgtgaacattgttataattatttaactttattaagtttgttcgtcttctgttttttttttaaatatacacgctaggaagtttagatat

SEQ ID NO: 32127 - protein, 1332 aa, DROSOPHILA
MVKPSKAPRSMTASGGRSGGRSGSVSSKDSDQVYCVLLHVVEAINFIGRDATDRQQIVMNAALNSVDFEVEGTQSEETIIFNSNCIWECDLAGIKRLKTDHRPVKMTFYACRGGGAERKTIGTLLLPVRGLPVLGTVGSHNSPHLKMFWHKLICTSSEFRSHKPEVLLMLTIIKKSILHTKDFEHFMQFTEVKSPPTPPMQSPGHSITASMLQSQANVYVQSLVQLGLLQVGNDPLVDCDIIEVVLQLKQLRNVTGLVKSLNQGKPPSSVILVFDFVGNVTNIELKLNESDTYTLNDVLGLRFKTSLRSMRLYFQRIFYLPINMYMNGTAIAHYRMDFTNLLPADDFFSDNRKYTSNGSFSFNRFGRTDSGREPKPPLMEYTFSVDLKTIFSRQEQEEPERTPSIASGNLDSEDEQYLGQTFCASVVRSRLNLNESEETDEIASNVMKQLANDSETEVIEMKSNTKNSKHNTSPQRKSQESKKLIRESSRNTRNSLENLQNVDELTSLDLFELEEKRQEKIAELERIKAGQSESLLQTELKVKKHKKADLELQGKKSQLETINEVPPKSLRKSKPVSQSELNNVPKIQENLPILNNQTKGSRIQKENCEENNEDLSYALSEEHSSSNEKLDKKPGASKTMRPPEHVDTDLETDISVFSIQKKRKSKSKLVISNELHNFEDSSTDTLEKGRPNPSKGDLKLRARWVEVNKVQTQALIETEKFLQKTCPAELDEVLYEDQVALGQAKTSKPTKRKVKKPEEDKVKRIDYETSYEEEITFCHPEKDPMTMIGENPINLNDLASSEEYISISEGNSKPAEIVYTETEQRVTFVNPKRDREKKKLSSLSKDDLLVEVRSEEYINLRSSARSKTDCVRKKKKISIHEDQVYQAELTPSEEPSSQSESRGTDNANPITDQPQVDRVKKKKRDTSGDQQLFHVEYTSSQKSISKTEGNVKCKELIEPDVEQTDVQVLKKKKLKKTLVTNDTVAQDYETLEEETIKPVKKKIVRKKSSVILEKIEDTENKGPADEVVSVEAKKIIKKKAKPACDNPTVEEYPKTKKGESRKLKSTSKEHFTMEKPSSTIDSIGQKIKSWRRQQIDLFEQELARKEMHYIKQLEQMESQEARLHQLHKADTNLDETFISKIPNVSEVDYEAKFTELEEHIALLKSEMEEQVRLFENRSRELRQENLQLYSEKTELKVRIAALEQQIGDLKAQGSDEGDLKEVLGELRSQHYRYNNLAREKELFRKRWRRSAKRVHALKLAMYERSLEREHSNIRVEPIDLRKILTKDAEEFEREYGQFRQNGMSPRYTLNSLSGSGDFAPPNRKRMVAAHKI

SEQ ID NO: 32128 - DNA, 4045 bp, DROSOPHILA
tagagatacccagcaatatatgactggcacaactgtgctccttttggtttcggtgattttcaccctgatgggcgtagcagtggccggtggcatcgtgtatcatcgaagggcaatggctcgatccaacgaactatactcccgagtttccctagttccgggtgacgaaagtgactctgacgaggatgaactgtttacggcccacttcccagcgagaaagagtggtgttaatatatatcgcgatgaagcgcccagcgaaaagatattcgaggaagatgagatcagccacttggtaccctaaataatcaaaacaagttattagttaggtcatgcatttagccatcctcataaccaccagaaatatatctatatgttaagcgaccgacaaacgcatttttggtctatattttgttacattcgacggcattacagctcctttatttcaagccaaaatagattaaagtattaaatgtaaaagaaaaaaaatcaaaactaattatttgtaatatttatgccttaataaaatgattttaacttagctgctactgcttgaaactacttgaagaggtataattcatcgatttagcgatataacacttgaggaaatgctcaaaatgttcatgtactgataagaaactgttgcatttgatattaggatttttcagattgcttctgaagccgtccttgactttaagaagtcacttgttgagataggcttatatttttttattgatgactgtgtatgtaggtgaactgcaatctcagcggtaacaacaatcaattagctaatggaaaataaagaaattcaggtgggaccccgcttatcagacaggttatcacggagctgtctgaagtgttctccccaggtgagaattgtgttgacatcgctcaagagttttatttgtataatacgctgaccgaagccccaacgaagtcgcatcgattttcttatcgcgactatattaggtagatcagcccgtgcatgaccggcagtcgtgttgtgagaaaggcacgaaaatgaggtttattttactatccctgctgttggcatccttctgcctctgggaggcggttcacacttgtgccagcatcgagcagcgctacaagtttcccaatagcaatgtctacgtgcgacttaggagaggtgataagttgcagtatgagctaatgaagggcgagaagtccctgcagacggtgaccttcgacaactttgacagcagcgccaatctggtggagacgagcagtggtagctaccagcttaccgatggccaatccaccgtggagttcaccctggtcaaaagcggagtggttgccggcacaggcagtgagataacccatgtgaaagtatcccgagatcaggtgctgcaaggcacccaacccagggattgcgtccccctgaagaccggatcgacgcactggttcagtggtccggagcagaagcaacactactggccagtggagcgacagaggcatagtaactattcctacctgccaaaggagctggataactttggtgtgggtgagcgatattggttgaacggcgacggagtctttttgtacgtggagagcaacactcctctgtttattgatcagaatagtgctgcctatcctgaccagctgtgtctgagtgctattagtgctctaccctatgatcctcgggtgacctctgccaaattcgtttaccacgtagctgtggccaaggatgccaaggcggcgcaccggtatgccgttaaaacgttcctcggccaacccacaggctatcccgatgagcgaatggtcatgcatcctgtgtggtccacatgggctctctacaaggctgaggtatccgacgatgtggttcgtgacttcgccaagcagattctggataatgggttcaacaacagccagctggaaatcgacgatgattgggaggattgctatggagccatgaccttcaggaagaacaagttccccgatagcaagaccctgactgatgacctcaaggccttgggtttccgtgtgaccctgtggattcatccattcattaacaacaactgcacagccatttacgatgaagctaagtctaagggttacctggtgctcgatcacgagggaagctccgacacgcaatggtggaacagcaagcccaaggatgcagccattttggactttaccaaaactgaggttcaggagtggttcagcaagcgtttaaagcgccttcaggatgaggatggcattgatagcttcaagtttgatgccggagagaccagttggctacccagtgatcctgtactccaggctagcagttccatggtgacaccactgcaggcggtgggcgactacgtgcgtactgtagcggcattcggagacatggtggaggttcgatcagcccagaacactcaagatcagccaatcttcgtgcgcatcgtggacaaggactccgaatggggatggaacaacggcctgctcacactgatctcttcgatgctgcaaatgaacctcaacggttatcctttcgtccttcccgatatgattggtggtaatggctactacgaaaagccaccaaccaaggagcttttcctccgttggctgcaggccaacgtctttatgcccgccctgcagttctccttcgttccctggaactttgacgacgaggccattgcgatcagcaagaacttcaccgccctccatgccacctatacaccttacattatgaagctctttaagcgcgctgtggattctggtgaacctgtgaatgttcccctctggtggatcgccccgactgatgaggtggcgcagtctatctatgatggtaatcctgtcacttaacttaaaattttagcagctataactggtttatatctcgcagagttccttttgggcgaagacatcatcgctgctcccgttgtggtcgagggcgccaccaagcgagacatttacctgccagagggcgagtggcaggatggaaacagcgaccaggtgtacactggacccacctgggtgatggactacgccgctcccttggataccctaccctactttttgcgcgtgggattcacactggagtagagcggaaaccgttttatatatctaaacttcctagcgtgtatatttaaaaaaaaaacagaagacgaacaaacttaataaagttaaataattataacaatgttcacacagttaatttggtaaaatcgaatggatcgtatctttaaatcttatgggccgccaccatacgctttctgtttggaggcgcaaagtcacccgatccggacagcgaattgagggtatatcttggagacatgccattctggcgaaactgtccgtactcccgctcgaattcctcagcatccttggttaggatctttcgaaggtcaatgggtctgcaaacgaaatggacttaggtaagttgaattaaaggttttagtaaaaaagcagaaacttactcgactctaatattgctatgctccctttccaagctcctttcgtacatggccagtttgagggcgtgcacccgtttggccgatctgcgccaacgcttcctaaagagttccttttcgcgggccagattattataccggtaatgctgcgatcttagttccccgagtacttccttgaggtctccctcgtcggagccctgcgccttgagatccccaatctgctgttccaaggccgcgatgcgcacctttaattccgttttttcgctgtacagctgaaggttctcctgccgcagctctctactccgattctcgaaaagcctaacctgttcctccatctcagatttcagcagagctatgtgctcctcgagctctgtaaacttcgcctcgtagtcaacttccgatacattaggtattttgcttataaaggtctcatccaaattcgtgtccgccttgtgcagttgatgtaatctggcctcttggctttccatctgctccaactgtttaatgtagtgcatctcttttcgtgccagctcctgctcaaagagatctatttgctgccttcgccaggacttgattttttgtcctattgagtcaatagtacttgaaggcttttccatggtaaaatgctcttt

SEQ ID NO: 32129 - DNA, 1988 bp, DROSOPHILA
agaaaggcacgaaaatgaggtttattttactatccctgctgttggcatccttctgcctctgggaggcggttcacacttgtgccagcatcgagcagcgctacaagtttcccaatagcaatgtctacgtgcgacttaggagaggtgataagttgcagtatgagctaatgaagggcgagaagtccctgcagacggtgaccttcgacaactttgacagcagcgccaatctggtggagacgagcagtggtagctaccagcttaccgatggccaatccaccgtggagttcaccctggtcaaaagcggagtggttgccggcacaggcagtgagataacccatgtgaaagtatcccgagatcaggtgctgcaaggcacccaacccagggattgcgtccccctgaagaccggatcgacgcactggttcagtggtccggagcagaagcaacactactggccagtggagcgacagaggcatagtaactattcctacctgccaaaggagctggataactttggtgtgggtgagcgatattggttgaacggcgacggagtctttttgtacgtggagagcaacactcctctgtttattgatcagaatagtgctgcctatcctgaccagctgtgtctgagtgctattagtgctctaccctatgatcctcgggtgacctctgccaaattcgtttaccacgtagctgtggccaaggatgccaaggcggcgcaccggtatgccgttaaaacgttcctcggccaacccacaggctatcccgatgagcgaatggtcatgcatcctgtgtggtccacatgggctctctacaaggctgaggtatccgacgatgtggttcgtgacttcgccaagcagattctggataatgggttcaacaacagccagctggaaatcgacgatgattgggaggattgctatggagccatgaccttcaggaagaacaagttccccgatagcaagaccctgactgatgacctcaaggccttgggtttccgtgtgaccctgtggattcatccattcattaacaacaactgcacagccatttacgatgaagctaagtctaagggttacctggtgctcgatcacgagggaagctccgacacgcaatggtggaacagcaagcccaaggatgcagccattttggactttaccaaaactgaggttcaggagtggttcagcaagcgtttaaagcgccttcaggatgaggatggcattgatagcttcaagtttgatgccggagagaccagttggctacccagtgatcctgtactccaggctagcagttccatggtgacaccactgcaggcggtgggcgactacgtgcgtactgtagcggcattcggagacatggtggaggttcgatcagcccagaacactcaagatcagccaatcttcgtgcgcatcgtggacaaggactccgaatggggatggaacaacggcctgctcacactgatctcttcgatgctgcaaatgaacctcaacggttatcctttcgtccttcccgatatgattggtggtaatggctactacgaaaagccaccaaccaaggagcttttcctccgttggctgcaggccaacgtctttatgcccgccctgcagttctccttcgttccctggaactttgacgacgaggccattgcgatcagcaagaacttcaccgccctccatgccacctatacaccttacattatgaagctctttaagcgcgctgtggattctggtgaacctgtgaatgttcccctctggtggatcgccccgactgatgaggtggcgcagtctatctatgatgagttccttttgggcgaagacatcatcgctgctcccgttgtggtcgagggcgccaccaagcgagacatttacctgccagagggcgagtggcaggatggaaacagcgaccaggtgtacactggacccacctgggtgatggactacgccgctcccttggataccctaccctactttttgcgcgtgggattcacactggagtag

SEQ ID NO: 32130 - protein, 657 aa, DROSOPHILA
MRFILLSLLLASFCLWEAVHTCASIEQRYKFPNSNVYVRLRRGDKLQYELMKGEKSLQTVTFDNFDSSANLVETSSGSYQLTDGQSTVEFTLVKSGVVAGTGSEITHVKVSRDQVLQGTQPRDCVPLKTGSTHWFSGPEQKQHYWPVERQRHSNYSYLPKELDNFGVGERYWLNGDGVFLYVESNTPLFIDQNSAAYPDQLCLSAISALPYDPRVTSAKFVYHVAVAKDAKAAHRYAVKTFLGQPTGYPDERMVMHPVWSTWALYKAEVSDDVVRDFAKQILDNGFNNSQLEIDDDWEDCYGAMTFRKNKFPDSKTLTDDLKALGFRVTLWIHPFINNNCTAIYDEAKSKGYLVLDHEGSSDTQWWNSKPKDAAILDFTKTEVQEWFSKRLKRLQDEDGIDSFKFDAGETSWLPSDPVLQASSSMVTPLQAVGDYVRTVAAFGDMVEVRSAQNTQDQPIFVRIVDKDSEWGWNNGLLTLISSMLQMNLNGYPFVLPDMIGGNGYYEKPPTKELFLRWLQANVFMPALQFSFVPWNFDDEAIAISKNFTALHATYTPYIMKLFKRAVDSGEPVNVPLWWIAPTDEVAQSIYDEFLLGEDIIAAPVVVEGATKRDIYLPEGEWQDGNSDQVYTGPTWVMDYAAPLDTLPYFLRVGFTLE

SEQ ID NO: 32131 - DNA, 2129 bp, DROSOPHILA
acccacccacgcattcaccaagaaccgactgaactcaagtcgggtgtagacatcgcatattgtgccaagtggtcacttcaaagcgcttttgatcgtttttgatttcacattcaattttatatctgcccgctttgtttcgctcattctcggcgaaaactacaaaaagttgcttcgattttcgagcattttctggaagacagcatcttaatttgaagatttatttcaagcaccggaagcggagcaccctcctcagcgaaaaaagagttgattgtcccgaatcgaaatcgcatataatggccatatatgaacatatatgtatatagttaaggaacatagccataattgacgctgattgtccacggttacttgcttaattctgatttctcactttcggccgggggcaatggaatcgaagtcaatggaatcaatcgatcaagatcgaggaaatgcgagaggattgaacccttaaaatttgcttcttaaaacttatacaaagaaattgggctgcactaaagaaagtttttaagatttcggcatatcttggatgtagggatgagaaatttaaataaatagttcattagatttatataggttagttaatataacatatatataaatcatataaaaccatacattattattagcattcattaagtagaaatgtattttttatttcaaaaatatcaaacttttatttaaaaccattcaaattaaaagtatcggttccaagaagaaaccgtaacgcttttaactgataccatttggtaatcctcttagcaaacccaaaaaacactgcaaaattgttgtgtaaattcaatagaaactattgaaaatcggaaaagtttccgatgggtgtgcattttgtgttgaaaaccatgaaattgttattaatgtctcgacaaacagccggcagccagtggccatcatcatcgcattaggaacaatgaaaagcaaaagtaaatcgaaatcgtagcaaagttgaagacactgcactggagaaatgttcatcatcatcagtggaagtagcagcagcaacagcagccgcagcagcagcagcagcagcagcaactgcagcagcaatatcggtgttggcatcattatcatcgccacgatcatcgacaagtggtgaacaattgaaaagtgcttttgctttgctcttgggggaacacgtgccgggtctttttggatttttatttttttatactcctttttttttattggactgctatcgatcttgagtgccggtgtacctgtcgctgccgccacgcccaccgcccccccggcccatcgcatgtacactgccctacaaacacacatgcacacacaggtgcccaaaatgcccgcaatgttcagttgccgccggagatcttaaactttcatttatacaattgtcttcaaactgtgtgcagcgcttgccgctgctccaaaatgaaagtcggaacaaaatggatttgcttttcggaatttttgtccaacagaaggcatacacacaaccaaaaaaaaaaaatgtttttttttttttaaatacaaaattgaagagagggggaataaagcattattctgctgctgtttgtttgttcgttttgggccactagtttattgcagttttggggccatgtgccaaaggaaaggtatgcatacctttcgtacccacttctggccaatatctcgtataatctaaatgtgcatttcttttctgccttttttcgggatttcggcacgggaatcgctctccatctcttttcgcccgatcaactttcgccgcagaatttgcaagaaataaaaaaaaataaaaaaacggagagttattgcccttgcatggttctctgcccatcttgggaccctattcctgcccagggtcattgaacgaaggttttggcaaaccaaaaaaaaaaaacacacacacaaagtaaaaaataaagaaatagcagcccaaactggttattataatttttcggctttcgcagaatcgcacgcagctgcccggacagcgtcccccattaggttggccccattccctggccgatgggtccaggaactgggcttggccacatgacagcccccgaataggctctacactgacagaaaatggaactaaaaccgcctcctcctccttctagtcgccaatc

SEQ ID NO: 32132 - DNA, 129 bp, DROSOPHILA
atgttcatcatcatcagtggaagtagcagcagcaacagcagccgcagcagcagcagcagcagcagcaactgcagcagcaatatcggtgttggcatcattatcatcgccacgatcatcgacaagtggtga

SEQ ID NO: 32133 - protein, 42 aa, DROSOPHILA
MFIIISGSSSSNSSRSSSSSSSNCSSNIGVGIIIIATIIDKW

SEQ ID NO: 32134 - DNA, 5680 bp, DROSOPHILA
acaagaaggagtacgaggcggcgggcatctggtatgaacaccgtctcatcgacgatatggttgcttatgccatgaagtcggagggtggcttcgtgtgggcctgcaagaactacgacggtgatgtgcagtcggactccgttgcccagggctacggatctctgggtctgatgacctccgtgctgctatgccccgatggcaagaccgtggaggctgaagccgctcacggaacggtgacgcgtcacttccgcttctaccagcagggcaaggagacctccaccaaccccattgcctcgatattcgcctggacccgtggcctgctgcatcgtgccaagctggacaacaatgagccactgaagcagttcgccgacacccttgagcaggtgtgcatcgacacaattgagagcggcgccatgaccaaggatctggccatctgcattaaaggcaacatcaacgccgttactcgcagggactaccaggagacttttgagttcattaacacgctggccaagaacctggagggtgccctggccaagaatgccgttgctgccaaatgactatccggcactcagtccgagcagcaggcctcgcatctctagaaaactactcagcgatgccttgtcctcgtcaccatattcacaatatttccattcgtttttgtagatgtgcatgtcctaggctaaaaatccgtgtcctcgatgcatgtttcccactgtttcattgtctctgcgagacgcaaaaaaaaaccctgatttccctttaacgtctaacggaaaagaaatttcaaataaatgtatttttataccggactcgagaggtctttaacccagtcgagggtgggctcgttacgaggcccggtccacttgtgcggcttctgatggctctgggtttattggatttgccagcgaaatggccacagttgtgttctaacacttggcggcaccagaccgagacggttcaagcggaaggggctcaggatcctgttagaaggacgaaactatcgatgctagccgaagcattgggctatggctacctgctggcctacgtgatctgcctgctctgctggccaggagaggcgtatcccgccagcagtagctaccgggatctggatatatgcaatcattgggacggaagacgtcacttcctggaactgggaagtccagctggagaggtgcacgccaggaatgtgactactactgcctatagagtaagtgtatttacaagcttctccagacgggatttggtcagcaattatgaacttaaaaacagagctcgccgctggtttttaagaacgatgcagtggccggggatgtgtggtaccagtgcagcctggagctggtcacctgtgccgagtgcgtcatccgagtggccttcacctatgccaacttctccaaaagttgcggcaatacgggtggcaagtccagcatgtgtccctgcgagcatatccagttctcggagccgccctatgattccaccatttccggccaagagttctgtggagatggcaaggtgtttcggagcaaaaccaggacactgcagttgaaattcttctacagagccagcaatgcgcacgtgttctcccttcaatacttctcggaacgtaagatttagaatcagttggtaggtttttaagaatgctctatccggatttccctcggaataggcaacgtgcggatagtcagtggctcccccaagcagtctattgtgggcaatgggagtacaaagtcccagccacaagtgatctccacgccgtatttcccgatggcatatccacgcgactatggtatcgaacacatcctcacctgcgaggcggacaactgccaggtgcgtttggattttaccgacttccagctgggcctcacctccaccctagagatcttcgactccaatggccagatgctggactcctatacgggtgagcacttccgtccgccgatcacggtgagcagcggcaagtctctgctcctgcagtttcgaggaaattccgccaccggagtgggttttcgcgcggaggttagcttcgtatcctccaagcagctcaaggacgagcgactggtgccctacacaggtaagtgaatgggttgcagtgcactgaacaaaaactaagactatcaaacaactcagatctaaggttaaaacacaaatattccgcaggattaaaaaattcgaggtttttaaaagtatagaacattatgcttatcttcattttagaactcgcagattgattaactttttaaatggattagtatatcttttctctgtaggaatagggacattttaatgattttcggattagtcgagcacttgaaagtctgcaggcaattgtcatattgattttggcgaaggtagtgggtggggtgggcacttggcgaatatcaatgtcaatgcaaggcgttgaagtggaaactgggtgactctggttgggttcggtttggtaagacaatcgatttcttggatcattgcccgtagggtggttggcaaatacttgtatataatccggaatggggttggttatgcactattgcgacaggttggatcacaatgcatgatgcaagagcacataaataaatgcttatgtacatatctctattacacctctagattgcgggggaatggttaccggacctggtggcgccatcaccatgatgaacatgatcgaaaatgccacggacgtgcggctgtttgactgcatctggattataaagcccggcaacaactacatgatgatgaaaacccacatctcgttgagagtggatgacttctacggcatggccgccagatctgagctcacaatacggcagggcaccacctcggatgccgtggagatcgagaatgtgatgtggccgaacaatgggctgagcaaggagagtcatgtggcgcccatcctcaatggctactacattcgactgcgtggggtattcgggatgtcctccaagctggccatcgtctacagcgtgttcaactacttgagtgagttcgattggaaaatttaaatttaatgtttaattaaccaattcgaattgcttagattgctatattggctcggagtttctgtgcgggaacaatcactgcatatccattcgcctccactgcgatggcttcgaccattgtggggatggcagcgatgagccggattcctgcgaggaggactgggcacacctgcatcacgatcgtcgctggtactctcacaagcccaactattatttccccaagatagaccagtatccagatcttaagacggccacgggaatctttatcatcagcacacttggcatatttggtgtgctgtccggctggatggtgatcctgtacaggatgggggttagagcacgacaccaacgtgagcttcaaagccacctgcagacgatcagtgagctgttggatcgccaggacgaggatcgcacgcccgatgagccacccagctacgaggcaccacccgattacgaggaggtcatcaaggtaggaatgcaacaggagctacgggagccacgtcgccagagacgggcccgtcgagctccgcctagagatcggagctgcagtcgcgccgcaagcaattgcaccgtgcaatcggtactcccactgcatcgcagctgcaccctggaaagggatcaagaacagcccagtacctcggcggcggcaatgacccatgcggtggctgccacggatacaacggaggatgccgaacacgtccagacgatggcccagcgaatgctcctcgccacggctatttgtggtaggtcgagagttcccccaatcccgccctgcagtcgctaacttacccacagagtcccacttgcaggcactgcaggcacgtctctcccggcagcaaaggagtcagggcagcgggtccaatccgtggggatttcaacgagcccgtcatcgttatccgctgggggtgaactacccacagcaggtgggtcagccacaacgcccggcagcacggcagatgagtgcacccagggaggcgactcacttagcatttcactcactctaggcttgccctccaccacggcagagagtcctgtgacaaccgaccagaaccaattgcagaaacaaagtccggagcagacaatcagcaattgcacggagcacaccttcctaaagagatcgtggttggtggtgcaacaggttccacctggcaggggttaccgtgtccggaggctgcgacataccttctcctctcctgaagcattcactagcgatgagctgcatctgccgtacccggatttcctgagctacggcactaatcttccacatgaacggagcagtagtaatttcggatccgagttgtcgagggacccatcgagttatagtgtgggcaaacgagctcgcttgacgcccgaggacacaagtggatcggagaccattacccaggagatggagcaatccaaccagacactccagtcccatgtgatagtggaaagtcacccgaatcacagcgaaagtgagagcgaagcggagcagcaggtgtcctgctttggagccgtagcccagcggcccaagaggcgtcatcggggtcatgtgaggagccgatcctttagcaatgccagaggtggcagtgccggaaggaggcgtctcatgcagcgcagctcgtcggccgatcttttgatgaactacgcgacaatggcggtatcgacgccacaaaaaacgagcgaggcaatgcagcgattgttcttcatctgagcgggagattcaaaatggaagagtggacaagtggaacgatagtattaaagcctggtgtgattctggtcggattctagtcacatataaataaataagcctgtttcttactcgaatgttattagcttattgaaattcttaataaataattaacttcaacttcatcaagacttatccaaaaggtcgcaacgtttgtattctttataatatgtaccataccgcaaaaagaaatgaataattacattatgaattagcattttttgttaatttatttatttatagccgttatacgtgtagcatttgccagagcagatcaatatgtgccccagatcagatcacaaaaaacaacaacgaacatccatcgcccaagattcacttcaacccactaattgatccggggcacatcctgaccagcactgactttcgggtgcctcaaagtgcaaaataataaaaatctattactcgcgtatatatggaaatcaaaatgcacgtttttatatgtatatatagacgaatatgataaataataccagacgtagtcaatgccgtaggtctgcctgctatccagatcctcctacgttgtagctgtatcgtttcctactgctgcagctgttgcttgagattctcggctagcgttttgccagtgtccaggggcactactatattgcgcagactatcgatgctgttgcgcagcttggtggcctggaatttgctgggcaacttcggtgaccctcccaccgacgcaaatgcaaaggtcttgtactcctgggcagccattcgagggaccaaaagattcaaattcagtatgttatatacacggggttttatttgcaacgcaaaatatcaataaaatcataagcaacccgggttttagggtactaacagaaacagcagaggggttcaatgcctgcatagagtcgactaaataaagattctcaatgtgtgtcatggtgtgaggttaagcgcgtaattaaattaatcaatgataagtaatgggtattaa

SEQ ID NO: 32135 - DNA, 2835 bp, DROSOPHILA
atgctagccgaagcattgggctatggctacctgctggcctacgtgatctgcctgctctgctggccaggagaggcgtatcccgccagcagtagctaccgggatctggatatatgcaatcattgggacggaagacgtcacttcctggaactgggaagtccagctggagaggtgcacgccaggaatgtgactactactgcctatagaagctcgccgctggtttttaagaacgatgcagtggccggggatgtgtggtaccagtgcagcctggagctggtcacctgtgccgagtgcgtcatccgagtggccttcacctatgccaacttctccaaaagttgcggcaatacgggtggcaagtccagcatgtgtccctgcgagcatatccagttctcggagccgccctatgattccaccatttccggccaagagttctgtggagatggcaaggtgtttcggagcaaaaccaggacactgcagttgaaattcttctacagagccagcaatgcgcacgtgttctcccttcaatacttctcggaacgcaacgtgcggatagtcagtggctcccccaagcagtctattgtgggcaatgggagtacaaagtcccagccacaagtgatctccacgccgtatttcccgatggcatatccacgcgactatggtatcgaacacatcctcacctgcgaggcggacaactgccaggtgcgtttggattttaccgacttccagctgggcctcacctccaccctagagatcttcgactccaatggccagatgctggactcctatacgggtgagcacttccgtccgccgatcacggtgagcagcggcaagtctctgctcctgcagtttcgaggaaattccgccaccggagtgggttttcgcgcggaggttagcttcgtatcctccaagcagctcaaggacgagcgactggtgccctacacagattgcgggggaatggttaccggacctggtggcgccatcaccatgatgaacatgatcgaaaatgccacggacgtgcggctgtttgactgcatctggattataaagcccggcaacaactacatgatgatgaaaacccacatctcgttgagagtggatgacttctacggcatggccgccagatctgagctcacaatacggcagggcaccacctcggatgccgtggagatcgagaatgtgatgtggccgaacaatgggctgagcaaggagagtcatgtggcgcccatcctcaatggctactacattcgactgcgtggggtattcgggatgtcctccaagctggccatcgtctacagcgtgttcaactacttgaattgctatattggctcggagtttctgtgcgggaacaatcactgcatatccattcgcctccactgcgatggcttcgaccattgtggggatggcagcgatgagccggattcctgcgaggaggactgggcacacctgcatcacgatcgtcgctggtactctcacaagcccaactattatttccccaagatagaccagtatccagatcttaagacggccacgggaatctttatcatcagcacacttggcatatttggtgtgctgtccggctggatggtgatcctgtacaggatgggggttagagcacgacaccaacgtgagcttcaaagccacctgcagacgatcagtgagctgttggatcgccaggacgaggatcgcacgcccgatgagccacccagctacgaggcaccacccgattacgaggaggtcatcaaggtaggaatgcaacaggagctacgggagccacgtcgccagagacgggcccgtcgagctccgcctagagatcggagctgcagtcgcgccgcaagcaattgcaccgtgcaatcggtactcccactgcatcgcagctgcaccctggaaagggatcaagaacagcccagtacctcggcggcggcaatgacccatgcggtggctgccacggatacaacggaggatgccgaacacgtccagacgatggcccagcgaatgctcctcgccacggctatttgtgagtcccacttgcaggcactgcaggcacgtctctcccggcagcaaaggagtcagggcagcgggtccaatccgtggggatttcaacgagcccgtcatcgttatccgctgggggtgaactacccacagcaggtgggcttgccctccaccacggcagagagtcctgtgacaaccgaccagaaccaattgcagaaacaaagtccggagcagacaatcagcaattgcacggagcacaccttcctaaagagatcgtggttggtggtgcaacaggttccacctggcaggggttaccgtgtccggaggctgcgacataccttctcctctcctgaagcattcactagcgatgagctgcatctgccgtacccggatttcctgagctacggcactaatcttccacatgaacggagcagtagtaatttcggatccgagttgtcgagggacccatcgagttatagtgtgggcaaacgagctcgcttgacgcccgaggacacaagtggatcggagaccattacccaggagatggagcaatccaaccagacactccagtcccatgtgatagtggaaagtcacccgaatcacagcgaaagtgagagcgaagcggagcagcaggtgtcctgctttggagccgtagcccagcggcccaagaggcgtcatcggggtcatgtgaggagccgatcctttagcaatgccagaggtggcagtgccggaaggaggcgtctcatgcagcgcagctcgtcggccgatcttttgatgaactacgcgacaatggcggtatcgacgccacaaaaaacgagcgaggcaatgcagcgattgttcttcatctga

SEQ ID NO: 32136 - protein, 944 aa, DROSOPHILA
MLAEALGYGYLLAYVICLLCWPGEAYPASSSYRDLDICNHWDGRRHFLELGSPAGEVHARNVTTTAYRSSPLVFKNDAVAGDVWYQCSLELVTCAECVIRVAFTYANFSKSCGNTGGKSSMCPCEHIQFSEPPYDSTISGQEFCGDGKVFRSKTRTLQLKFFYRASNAHVFSLQYFSERNVRIVSGSPKQSIVGNGSTKSQPQVISTPYFPMAYPRDYGIEHILTCEADNCQVRLDFTDFQLGLTSTLEIFDSNGQMLDSYTGEHFRPPITVSSGKSLLLQFRGNSATGVGFRAEVSFVSSKQLKDERLVPYTDCGGMVTGPGGAITMMNMIENATDVRLFDCIWIIKPGNNYMMMKTHISLRVDDFYGMAARSELTIRQGTTSDAVEIENVMWPNNGLSKESHVAPILNGYYIRLRGVFGMSSKLAIVYSVFNYLNCYIGSEFLCGNNHCISIRLHCDGFDHCGDGSDEPDSCEEDWAHLHHDRRWYSHKPNYYFPKIDQYPDLKTATGIFIISTLGIFGVLSGWMVILYRMGVRARHQRELQSHLQTISELLDRQDEDRTPDEPPSYEAPPDYEEVIKVGMQQELREPRRQRRARRAPPRDRSCSRAASNCTVQSVLPLHRSCTLERDQEQPSTSAAAMTHAVAATDTTEDAEHVQTMAQRMLLATAICESHLQALQARLSRQQRSQGSGSNPWGFQRARHRYPLGVNYPQQVGLPSTTAESPVTTDQNQLQKQSPEQTISNCTEHTFLKRSWLVVQQVPPGRGYRVRRLRHTFSSPEAFTSDELHLPYPDFLSYGTNLPHERSSSNFGSELSRDPSSYSVGKRARLTPEDTSGSETITQEMEQSNQTLQSHVIVESHPNHSESESEAEQQVSCFGAVAQRPKRRHRGHVRSRSFSNARGGSAGRRRLMQRSSSADLLMNYATMAVSTPQKTSEAMQRLFFI

SEQ ID NO: 32137 - DNA, 1308 bp, DROSOPHILA
cgaatgatctaagactacttcctgtgactttctactcaacgtgtagcaccaattttgggatttctcgcagtgtacgacttaccactggtggttgacgcaaatgccgccaacgtgaacatggccaagagtgcgccaaacagctgtcgctggctcttggtgccgccaaagctgaggcccagactggggctgtggttatggctgcatctggcgatctggcttggagtctggccaagtccgtgggcctgtgtttgggtggcgtttggggcggggggctgcagatgcagatgcagatgctgtttgtggtgcattttcgctggctgtctgctgcacttttcctattagacgggggggaaaatcaagctgaccgcacagtggcagcgagctggaaagggttgggggtcaattgggggggttacatcgtttaaagttgacccgaagcgaaatgatttatttgacttgtaagcgcgatcgtttggctaattgataaccgcacttcatcggagattgatgggtgaaagatcaattagttttggatgctgtgatatatgctcgcatgcatatacacatatatatgtacatatgtacatatatgttttaatggccccaatcagtggcgccgtgattcattcatctatgggcttggtcatgtcgctgctcgccactgtgccacaccaaaccggagcaaaccgagtgcacatggtgtgctccatgtgcatatatagatatgtatgtacatatgtacatatatatatgtacatacccagtatatatcatgcaaaagtccctgcccagcagtgcagtgcgttggttgctggatttttccacttttgaaaattatacggtggctgcttttattatttctctcgccttttttttttgcaattgatggcatccgataggcaggagcctgccagcaattcgctggaggccaggaaaatgcacctgcactgggagaaatcagcagaacatatgaacaaaaggaaatcagtaaatcagaggtgtatttaaaatgcaaaatagtatggtgtatggtgttgtataagtttgtaccattagtttgcatgagtgatttgattctgagtttatcccaggactagtaccacacttttctgccagtgcaggattggtgagagtgggtggggcggttgaggtcgcattgctgcaatgctgaatgagattggctgtggtctcggcttttgcctctgaccattccagcggatcgtttacatgtgcattaattcctaacgccgcttaattttctccgcgcttaatggctcctctggatgccgatgcctccgattcagattc

SEQ ID NO: 32138 - DNA, 273 bp, DROSOPHILA
atgcaccacaaacagcatctgcatctgcatctgcagccccccgccccaaacgccacccaaacacaggcccacggacttggccagactccaagccagatcgccagatgcagccataaccacagccccagtctgggcctcagctttggcggcaccaagagccagcgacagctgtttggcgcactcttggccatgttcacgttggcggcatttgcgtcaaccaccagtggtaagtcgtacactgcgagaaatcccaaaattggtgctacacgttga

SEQ ID NO: 32139 - protein, 90 aa, DROSOPHILA
MHHKQHLHLHLQPPAPNATQTQAHGLGQTPSQIARCSHNHSPSLGLSFGGTKSQRQLFGALLAMFTLAAFASTTSGKSYTARNPKIGATR

SEQ ID NO: 32140 - DNA, 3749 bp, DROSOPHILA
ggagcacaaaggtgtccccaaaggtgtcagcatgttgtaagttaagagctcaaatcgcaaaagtagaacgtgaatcgacagaaatcctatcttccagttcggttctcttcactctggccaagcaagctaagtttttgcaggccaacaagttatgccttcttattaacaagagactgcagtcgttgaagccaccagctggagtccaagagcagattgatgtgagtgatgtgaaaacattaatcatccaaatgatatgcttatgaagtaccttttcagctaaattttctaaatagcaaggcttgcaaaagtggcttcaatgatccggaggagcttttgccactatgttacaagtgctccaactacagtcaacatttgaatagcaattgctgtcccacttgccggcaggattatattttctctttcgtttccttcggtatggaattttgtctattagcttagatatctgataatgatgatgcctctttttagaaattctacccctagtacaattttatccagaagtggatatctctgatgccgaggcggagcgcttgctgctggctcctgcaaagcacgccgaggattcggatccatttaacgaggatgtggccagtgcattgcctttgagcttggatcgcaatggcctgcgtgccatagatcccaatcatgtgctgattcttaaacggaggggaaagaatgtgcggaatgtgtactatcgtaatatattacccgatcttcaggttacctattgtcctcaatgtctgctggtaaggttatacaaaccacatcatttcatttcgtatattaagtaaccctttttagcttttctatgcggaggactttgagctgcaagtgctgcaaaaaggtcactgtcccttttgtcacacatcctccgaaaagctgatggaagacttttgaaatcgacataagaagtgtgtgcaaatatataatttccgtccaaaactgtacaaataggaactatacgcaaataaatacggtgttacgcccaggtttcctcctgatatcgtcgctgttttatcattagttccacgtaatcggcatcgccatctagtatctcgataaaggcctctttgacagactttggcatattattggagttgccagccacgtagatataggcattcaggtcttttataagcctcgccagatgagcaccattcttggcgattaaatgctggacatagaccttctgatcctgatccctcgagaaggcagtatgggcctctacctgtttcgcatcggtccaggtggagaagtcatttccaaagtggaaatcggcagctttgttccgacagccaaagaaaacaaccaagggaccaattgtggcaccttttgattgagcatacaatcggttttggataatgctacggaatggagcgatgcctgtgccaggtcctaccattataagtggtatacttaagtcttttggccagaccatggttcctcttttgacaactccgctcaactcagtacccgatttcaaagtcttcagccagttggagcataagcccagacgtggagtatgcattatggttttgtactccacaacggccaccagcaagtccaaacttaaggcggaaacatccgaggcaatggaaaaactgcgtggctggatcagtggcatcatctcaaagagctgttgcagagttaagctagaggtggcgtgccggaaatcctccagaacctccaaaagattacgacgcggcctgttcacataagccactaagtcatcaattccctccgcggaggagaattcgagcagcttttccttttccatttcatcgcagcaattctgtgctagtacctcgaggaaacgttgccgtggcttagcactcaagtcccaaacgaatttggcggcctggaggaggcttaagggattggaataggctatgggaaggggcatatcctgatgtgcactggatacctccactatagtgctctcatcgaagttcaggctgtgttcgcgaataaggtcgaagaatgtttggacagcttcatcgctgttttgcggctgaacatcgagtacatcgccgggttcccagctaagatcttcagtctgacactgcagccttaggaagcgtacatcctgaaagtgatccaccgccgttgttctttggttatccagaattttgaaagagtgggcagtttgtttttggctccagagcagattgtccatcggagcaatttgggaatccttaggcagctcctttactgaccactttacagtagtttggtggctgttgctaagtttactttcgtcaagaccagagatgcctttcagagctgtccacaaatcctttgtccagctaagggatacacccaaatgcccgtagtcatgctgatcatcacacagacccactggacacacgctatttgctcccagattctgtagtctcttgctcagtttcttggcggcatagttaaacttcggatagctggagtccccgagtccaaggcacgcgaactgcatgccttgcaaggattgggcgggtaagctgcgcttcaggagaaatcgccaggccagcttcatgttatccggctccactccgtcacccgtagtggccaccacaaagaccacgaggcgctcctcaataagtttggtcatatcgtactcgtcgaaaggcagcacgggtccttggaagcccagttgatgcgactcccgccagatctgttccgccacatcctgggcggtgccggtttgactcccgtagagcactaacagccgcattttctacaattcagaattttcgaataaaatttactgattaccgtatttcatatgttacaatttgcgcataacagcctggtcctcaaacttaacagcacgctgttacgctgcactgttatgttatagaaactacgggtgccgaaataccaaaataattgaaattgaaattagtatttcattcattcgtttctagtagcgttgtagctcttcttctttttcttcgaatagtgatgaacctaaaaacatcgatagtcttaaatgtcgatgcatcgccacctctaatagaaacgcaattaaacatattgcattgttttgcgtaaataaaagtaagtttcgcaggcaatggcctcgaatcagcaaatcaatacgcagctaagcaaaaagctatcctggctgttgcggcacggtgcgaaaacggagggaatcacgatccgtgctgatggatttgttagcgttcccgatttgcagaagcacccacgctacttgtgcttcaccttagaaaaactgaaggagattgccgccgcggatgccaagcaacgatatactcttcgctggaatccagaactcggagtccatgagattcgcgccaatcagggacactcattggcggtgctggaaggcgaagctggcggtctcgagaatattacccatgtgagccaggtacccctggcagttcatggcacctattacagacattggggggcaattagaagccaagggctaagtaggatgaaccgcaaccatgtgcactttgcatgcagcgatgagaccaattccactctgagtggattccgcagcgattgccagattttgatatatctaaacgtggaaaaggtgctggcggacggcatacccatctatcgatccagcaataatgtactgctctgtccgggaattgaaggcttcatacatagttcctactttcagcgtgtagtggacaagaaaacggggcaacccttacaaattgatcattgttattgaatagaataaacctggccgt

SEQ ID NO: 32141 - DNA, 1749 bp, DROSOPHILA
atgcggctgttagtgctctacgggagtcaaaccggcaccgcccaggatgtggcggaacagatctggcgggagtcgcatcaactgggcttccaaggacccgtgctgcctttcgacgagtacgatatgaccaaacttattgaggagcgcctcgtggtctttgtggtggccactacgggtgacggagtggagccggataacatgaagctggcctggcgatttctcctgaagcgcagcttacccgcccaatccttgcaaggcatgcagttcgcgtgccttggactcggggactccagctatccgaagtttaactatgccgccaagaaactgagcaagagactacagaatctgggagcaaatagcgtgtgtccagtgggtctgtgtgatgatcagcatgactacgggcatttgggtgtatcccttagctggacaaaggatttgtggacagctctgaaaggcatctctggtcttgacgaaagtaaacttagcaacagccaccaaactactgtaaagtggtcagtaaaggagctgcctaaggattcccaaattgctccgatggacaatctgctctggagccaaaaacaaactgcccactctttcaaaattctggataaccaaagaacaacggcggtggatcactttcaggatgtacgcttcctaaggctgcagtgtcagactgaagatcttagctgggaacccggcgatgtactcgatgttcagccgcaaaacagcgatgaagctgtccaaacattcttcgaccttattcgcgaacacagcctgaacttcgatgagagcactatagtggaggtatccagtgcacatcaggatatgccccttcccatagcctattccaatcccttaagcctcctccaggccgccaaattcgtttgggacttgagtgctaagccacggcaacgtttcctcgaggtactagcacagaattgctgcgatgaaatggaaaaggaaaagctgctcgaattctcctccgcggagggaattgatgacttagtggcttatgtgaacaggccgcgtcgtaatcttttggaggttctggaggatttccggcacgccacctctagcttaactctgcaacagctctttgagatgatgccactgatccagccacgcagtttttccattgcctcggatgtttccgccttaagtttggacttgctggtggccgttgtggagtacaaaaccataatgcatactccacgtctgggcttatgctccaactggctgaagactttgaaatcgggtactgagttgagcggagttgtcaaaagaggaaccatggtctggccaaaagacttaagtataccacttataatggtaggacctggcacaggcatcgctccattccgtagcattatccaaaaccgattgtatgctcaatcaaaaggtgccacaattggtcccttggttgttttctttggctgtcggaacaaagctgccgatttccactttggaaatgacttctccacctggaccgatgcgaaacaggtagaggcccatactgccttctcgagggatcaggatcagaaggtctatgtccagcatttaatcgccaagaatggtgctcatctggcgaggcttataaaagacctgaatgcctatatctacgtggctggcaactccaataatatgccaaagtctgtcaaagaggcctttatcgagatactagatggcgatgccgattacgtggaactaatgataaaacagcgacgatatcaggaggaaacctgggcgtaa

SEQ ID NO: 32142 - protein, 582 aa, DROSOPHILA
MRLLVLYGSQTGTAQDVAEQIWRESHQLGFQGPVLPFDEYDMTKLIEERLVVFVVATTGDGVEPDNMKLAWRFLLKRSLPAQSLQGMQFACLGLGDSSYPKFNYAAKKLSKRLQNLGANSVCPVGLCDDQHDYGHLGVSLSWTKDLWTALKGISGLDESKLSNSHQTTVKWSVKELPKDSQIAPMDNLLWSQKQTAHSFKILDNQRTTAVDHFQDVRFLRLQCQTEDLSWEPGDVLDVQPQNSDEAVQTFFDLIREHSLNFDESTIVEVSSAHQDMPLPIAYSNPLSLLQAAKFVWDLSAKPRQRFLEVLAQNCCDEMEKEKLLEFSSAEGIDDLVAYVNRPRRNLLEVLEDFRHATSSLTLQQLFEMMPLIQPRSFSIASDVSALSLDLLVAVVEYKTIMHTPRLGLCSNWLKTLKSGTELSGVVKRGTMVWPKDLSIPLIMVGPGTGIAPFRSIIQNRLYAQSKGATIGPLVVFFGCRNKAADFHFGNDFSTWTDAKQVEAHTAFSRDQDQKVYVQHLIAKNGAHLARLIKDLNAYIYVAGNSNNMPKSVKEAFIEILDGDADYVELMIKQRRYQEETWA

SEQ ID NO: 32143 - DNA, 3432 bp, DROSOPHILA
cccgaagtccctaagatcaacattttactgaatgcctcttattcgcagtcactgtttttagaaaatgcaaagagcaacgttttaactaacactttagactttaaaactaaacgctttaaaattgtcttcgtttaacaaatgaaataaataggaatgtctgtatcaaactaaagaaaactaaagaatatgtaatttctctaaattattccagaataatttcttctatctttccccataaatttgagccataagaacttgactttctgtccttcttagtgcgttagtcactagatgagtcacaacatgccaatgatttatttccaagtgagccaaatgagtcacttgcctatatttgtggcccaaagccctaggcgatttcagttgcatcttggactggtgccaagaatctgaaaatgtatctttcacacatcgcagtgcgcaaacacaaacacaaacacttggctaagagagatcgaagtcaaacatttacatttacattttacatttaacgtttaacgttcaacgttcaacgtttaagccttttcacgttcaacgatctgcagttggtggtgtctgaagtttccaccaggctgttggccagttctcggaagattaaccaattatgcgtataattagtgacacgattgtctcgtttggtcggtgtattttcatcgttattgttattgttacacagccattttcagtgttatgcccgtgttaattgccagtgtcaagtgccgagaaataggaaatgggagtgtataccccatgctataaacatatatacatacatatatatatatgtatgtaaggactatatgctgggcattgcgtgacattccagggtaatacgagaaatgataagcaatcagagatgggggattattagtcggctgcccggctgtccgtttattgcaatacaccaaaagaccgcatgccaaacagttaattgtattatctgtagtatatgagtaagtagtcccgggcaatctggtgagaattagggccacaatagctggccggcggtcggctgatacttacgtcccagacaggtgtgcttgcggaactgcaggaatccctcgacgcagcggcatgcaccctccagacaactgctattggccaccttcatggagcactgctcgctcagctggcagtcgccgccaaggagctgggctgcaaatcaaagacaaataagaaatatcattaaaaatccactaaatatccccccatattcgatggaaacgtttcttggtaatacaaaatgactctgcagaagacatgatagcttcaaattatgtttaaacgcctcattagggagaaaatttaaaaattctatggcatatgttagccatacaaagagctcaaaagattgatttgtttaagtgagctacttaaacccatctaaatacgaaccgtgaataacgcttaattttcagctgtgaagtacgaattatttagaatacaacttgatcattataaattccagacgtctctcacgatttgcattactaatttcgagtcaggaaatcgttagaattgttttctctgtgtaaagaaagtcgcagtgagtgcatctaacggtttctctgtggacaaacacataaacacacacacacacacatacatctccatctccgccccattgtttgcccgacaaacattctgtactcccactttggggttagccaaagattgactttgcctacttacatgacaaacagcgcttggaatccaactggacgaagtagggggcgcactcgcagtatccgagggcggagcagctgctgcccttgatgaaatccgtgcagtccatgtcatgctggcacttgtcgcccagctccagggatcgactcgcgtccaccactgtgaagatgatcagcagctgaaaggaatgcaggaatgtggaaattagactagtccgataaagtcgatgaaaatgggatgattaactcatgggatgatattaactcaaccaaaaaagatatctaatcaaattagacttcatgtatatatgaaatactccagcaatatacaaaactatgcagtgggaatagaaaaattggaatgtaactctttactaaagttatatccggcactaaagtaatcccgatttccataagagctcttatattaatttcactaacgtttgcgaatatctgtaatttggaaattgcacatttagctcagataacacatatatcgcaggaatgtcgaaccgatccgtatgattaccttcttataggaagctgcaatcagaacagccagaaatgacttaacgacctgaactttatgcaatcgccttggatctgtgatcagttatttattacatcacttaattctttcaattaggtgcccagctttgcatagaccgtgattaagtcgggcatggagaaccatccgaaaccgaaatgagccaacaaattggccggcattggccgaccaagtcttgaccaagtcggcttggagtggcgaacaaattgcccgagtacacggaattatgtacctgtgggccaaatgtccgacgaaagagccgtaaaatccgtagttaatcgtagcagatcatacaagctgcggtttcttcttacaatttttctaccattcttttttttgtattttttgttttttgctttatgaatgaagtgcgatatgtgtaaaagtatcttctggtatctacggcatctgtgagctgtgcttttgttgtgacgcagacacacagttaacgttatatcagatgctacaaagatactccagccggagttgtaaaacagaattaacagttgcctgagcaccgagcacacgcccatccacgcgaaggtggggtggtatactagtatgggagccaagatctataattaaaaaaaaaaagaaaaaaactaaaaagcaagaaagaaacaaacaagggtacccactgccaactaccacacctcatgtgtgtttttgggctcttttgttgctcgtctgttttattttttgttttgcagttagaactggctaataaataagctgaattttgtggccatcgctgggtgcaatgtactttcagctcatcgcgaatgagcgccacacgccattaattacaagcccggccactgggactgccattacctaaccgaaaccaaaacagatacggatacgagtttgggcatcttccaaaggcgttctcgttctgggtttttggtttttgcatactgcccaaacggtaccacgaactcccccacctttggttaccattttctgaaattctgcttaaatttgttaacacattaaatccaatgattacataaagttaggctcgctttcgcgagttggaaattccccagcttcgtttaattggtaagaactcttcgttttggattccaatgccacagacacgcaactccttggcatttcgtacaagttgagacattaaaatcacagttaggatcgtttggc

SEQ ID NO: 32144 - DNA, 408 bp, DROSOPHILA
atgccggccaatttgttggctcatttcggtttcggatggttctccatgcccgacttaatcacgctgctgatcatcttcacagtggtggacgcgagtcgatccctggagctgggcgacaagtgccagcatgacatggactgcacggatttcatcaagggcagcagctgctccgccctcggatactgcgagtgcgccccctacttcgtccagttggattccaagcgctgtttgtcatcccagctccttggcggcgactgccagctgagcgagcagtgctccatgaaggtggccaatagcagttgtctggagggtgcatgccgctgcgtcgagggattcctgcagttccgcaagcacacctgtctgggacgtaagtatcagccgaccgccggccagctattgtggccctaa

SEQ ID NO: 32145 - protein, 135 aa, DROSOPHILA
MPANLLAHFGFGWFSMPDLITLLIIFTVVDASRSLELGDKCQHDMDCTDFIKGSSCSALGYCECAPYFVQLDSKRCLSSQLLGGDCQLSEQCSMKVANSSCLEGACRCVEGFLQFRKHTCLGRKYQPTAGQLLWP

SEQ ID NO: 32146 - DNA, 2135 bp, DROSOPHILA
tacaagattgattcgatcactcctttcaatagctttcgccaaaaacatttatttcactgttatgatcatcaaattgggtttattgaatactaaaccattagcactactccttggtttctttcaataacaataaataaataaactacaccacataatccccattgagaggtgttttcctcgagtctcgagatcatttcgccactcattcggtgctcctctattcaaaacaacactcgcaggcactccacaagatccattgaaaatccgaggagtatcgctcaatgggagcaacaatacaaacaagacaccgaatgggggaaaagtatctgtatccgaataggaattggaattggaattggtatcgcaaacaaccgcagaacaaccagaaatgaaaccgctcaagctcggcggcatcaataaaatgtcaataaacagagaagaaattgtttaattacgctttcgagaggctttcgagcacgaggcactggcactggcactaaatagaataaagagaatgtgttgaccattgtgtccgagtttgttgtttcgttttgacccaataactcgggggttactttcgttattggccacagcattgtcatcttgccaaaatgaaaagcgcgtaaacaaagatctgcaggcggattgctaataaccgtcaacccatgtccacctcaccatttgtaatccttcgccaggccattcgtcttcctggccaaaaggtccggtctttaagacccaagctgccaaaaccccatttatcacctgcggcgaactgacttggcttatttattttgctgcctatttttttgtgaaaatgttttttttttattttgggtttacgaccagtctgtgctaatgaagacccgttgcagtggcatattttttttttcggtttctgcagtcattgtaatttagaatcgtaaaagaacagcaagaaaagctcggctcagcagcagcgaaaaaaaaaagaagtagataagttttcgtgttttacaaattactttcgtactcttttaatgatcgtcgggcgccagaccgtctggtgacctttggccggtccgaatgcaggtggagcgcccagatgcagcggctcttgctgccttgctggccaactactgggccttctggccatctactggcttcactggctcttctggccaagacttaatgcacttggctcgaaatgggttgaatgggccggccgagggcagcagcggaccataataacaaacaacatcgaaacggataaattgtttgttagtcttggctggagtgaaaaaaaaaaaaaaataactgctggaaggaaattttctctcaagtactggagttgagaagcccttggccgattgctttctaacaaacagattccattgatttagcaccatgaatagattgtgcatcgcatgggaaactcttattcaattacaaaaaaaaaaattgattgcaaattgaatttcacattttttatatgcaaatgccagtcctgataaataaattggcacaaagaaacgtacgatatttagaagaacatttaaattgatgagattgttaaccgcgaaaatcattaacaataacttacttgaagttaactaactttgcattaagtctgcacttttcttggaatcccaaaatagccagcaaattcaatagaatcgtttattaatagacaaactagttcccatagtacacccataatgactcttcccgcagtaataatgattaagtgccgggcaatgaaattttatgaagcaaataattcactaaacttaatgcccactctcgagctttgagttttttttttttttgttttctcttggaatgaagttcggtccagtggagcagaggcaacgaagactcccaccttttattagattaatttgcccacattactcagtcggtgaagtggcgacccccaaccgaacacaaccgacatcatcatgatcttcgacgcctgcctagccatctatcagcaacaatttgacccaatggccgacttcacagctctttacacacgagaaggagaaaaactatcttgcagagcagcggcccacgattgaagtgagcccacgcgatgaaagagtcgaaaattgtgccaaaaaaatgaatcttttgtttaagaaagcgaaaaagtg

SEQ ID NO: 32147 - DNA, 135 bp, DROSOPHILA
atggccagaaggcccagtagttggccagcaaggcagcaagagccgctgcatctgggcgctccacctgcattcggaccggccaaaggtcaccagacggtctggcgcccgacgatcattaaaagagtacgaaagtaa

SEQ ID NO: 32148 - protein, 44 aa, DROSOPHILA
MARRPSSWPARQQEPLHLGAPPAFGPAKGHQTVWRPTIIKRVRK

SEQ ID NO: 32149 - DNA, 3359 bp, DROSOPHILA
agagggagcaggagcaggagcagttaaacagggggttattagtggaccaaaagttggctgtcaattagcttggtccggtttaagccgtcagcccaattttgtcgccggctcaattgtgagattaccgacgccaagttggtcaggctggctggcatttcagcattattaccgcatcgcatggctatggctgctggcacaaccagccaaccagccaaccatccagacgtcgcttgatccactttttccagtctgctctctgcatttcgcacatttaatgcgattttgcgcatttgcgcgtttaaaattaagagagtgacgaaatggaaccaccagccaacagccatcagcatcagcatcaggcagagaccaaagtggatcacgcatactgaaggaaaatagattttccgagcttgcaacaaaacttgactgtccatcggtccgcttgattgagtccatgcgaaaatgaaaatgaaaatcaaaaagaaaacgagctcgaaattgaatcaaaaccgcagtccgggctgccaatggagtgagtctaagtcgaacgcacacgcttcaccaacctggccgatatacatatgtgtacatgtcccaatttgacgttgatattgtggttgcataaagatcgcctctttgctccccttaaccctgttgaaccgatgacaaaagctcgccagatatttcaattagagatttttttttagatttttcactatttcaacaacacgagtcccggtgtaatgctcatgaacagaactgcgggacagacggcgacacacacacaaaaactccacctaatatttgatgtacatatgagcatccatacatttttctagtagcacaacgtattaaattccaattgaatataaatccttgaaggatcgaagataaatcaatgcttacagaaatttggtttgagcagtgaacactgcttatatgatatatattttaatttatcacaataaatgaaatataattaataggtttttcttcaaatctagtagtcctcgtcactggactcctcctgctgactgtgagcatctgcctcgacatatccttcctcgctgctgccctcgtactcctggtgaccgccaccctcctcgtcctcctccgcctgctcgtcctttccctcatcgtaatcctcgtgcacttggtactggccattcccctggtgctcccgctcccgttcatcctcctcctcatcatcctccttcgctttgtgggcctcggcgctatggtgcctcacctggctgtccaccgacccgccacccgcatccccgtcggaaccgtggccgtgcagagttttcacaccattggtaatgacctcggcttggaagccgttggcatcgtcggccgtgtatttaaccacacgcaaggtgccatccggatcgactacgctgcgtggaggccgtcgaaagagaaataaaattaatattacttaaattaattaataaaataaaatgaattcagtgtataattggttttagctggattagcaagttagtaaaatgtggtatttacttgatattaaacagataccaaaaatgtaacccatgtttacacatctttttattacttgaaaatattttgaactgtgcaacaatttgtaaaattatcttggaattttttagatgcaaataagatactatttatgttaagagccttctggcatttttttgagcacatgatttcatgattgattgattatatacaacccgttttttaaaaatcttatcaaatatacagtgtatacaactgtgcagtaatctttgaaatcaacttgttcaattgcaatgccaagcaactgtgtttacttttcagcgcctgctgcttctgatattaagtggtttcagagtgtccgcgatgccatatccatttcagctcgctctgtgtgacgctaatgaatgcgctgacaagttgtccccatccccatctacatccccatcaaaactcacctgtacactcctctcacctcgtccccgttgcgcgtctccttgcgattctgcagcacgcgcgtcttgccatcctcgactccataggcgaagctgtactcgggacgggccacatagtccacggtgcgtccgtcgtggacggtgaccagatgctccggccccaccaccggaccctcgaatcttgcataggagtagccaaccgctgcgcatgcaccgatcattccgcatccagcaattagcgccaacagtggcaacaaatctttgagttgccgcaccgcctggccgaagcgtgcctctcttcgcaacgcaatgcggaagcgccagcgagttgaagtccgtgcttttggtccaacgccaggtccattggcatctccagctgtgctggttatgcgtcgcttcttcatatctctctttttattaaccgctggctacttatctataacttatgattgaaacccttcgatcgcccgattctcgcatactaagcgtgaaatgtcgcacttaccggctatttatatagccatcgattttgattttttttttttgggggggaaattgcatttccgcgagattatgcgcttcagtggaaagcggccgagtggaacatcaactctggcagggatgtggtcaaccgatgacgttgcgcctgcccacaaattgcaccactccgcaagggtttacacaatgctacctacgcgacgtctgacgtcatcgattcgcaggggctcgcgaaaaaggtgtccaagttggaagacattaaaaataaatacatatatatagtctcgtaaatgccacgatccctgattgaccatcgcatatcgcggcgcaatttgttcggctgaaaatcgctttaagtgcgttcaatttgccactgcgagaaatagtgggtaattaagtgaacacaatttgtgaagtctctgccatataatataggatttataaattaatttggaactgcaatcattaaagacaatattttcgttcattgccttccatattgttttatgaggtattaaaataggcaattaaaaatctgtgtatactaactgactacacttttccccctgtgcaagtgcccaaaaaagtcgaacatggaactgccgccgatggccaagataaaccacctccacgggccaccgacaggcgcagctgcgatcgttggagctttgacctttttctgagggtctggccaaaggagaaacataaaaaaaaatatatatatatgtgttggaaaagcaaaaaccaaaactggcgaaaagcaaccaaaatatggctattatttcggttgcttctaatttataagcaagaggcagtctttgttggcgatgcgatgcgatgcttgaaaaatgcatatatcattggcctttggtacttgcgcacagtagtcgctggtttcttgggggg

SEQ ID NO: 32150 - DNA, 801 bp, DROSOPHILA
atgaagaagcgacgcataaccagcacagctggagatgccaatggacctggcgttggaccaaaagcacggacttcaactcgctggcgcttccgcattgcgttgcgaagagaggcacgcttcggccaggcggtgcggcaactcaaagatttgttgccactgttggcgctaattgctggatgcggaatgatcggtgcatgcgcagcggttggctactcctatgcaagattcgagggtccggtggtggggccggagcatctggtcaccgtccacgacggacgcaccgtggactatgtggcccgtcccgagtacagcttcgcctatggagtcgaggatggcaagacgcgcgtgctgcagaatcgcaaggagacgcgcaacggggacgaggtgagaggagtgtacagcgtagtcgatccggatggcaccttgcgtgtggttaaatacacggccgacgatgccaacggcttccaagccgaggtcattaccaatggtgtgaaaactctgcacggccacggttccgacggggatgcgggtggcgggtcggtggacagccaggtgaggcaccatagcgccgaggcccacaaagcgaaggaggatgatgaggaggaggatgaacgggagcgggagcaccaggggaatggccagtaccaagtgcacgaggattacgatgagggaaaggacgagcaggcggaggaggacgaggagggtggcggtcaccaggagtacgagggcagcagcgaggaaggatatgtcgaggcagatgctcacagtcagcaggaggagtccagtgacgaggactactag

SEQ ID NO: 32151 - protein, 266 aa, DROSOPHILA
MKKRRITSTAGDANGPGVGPKARTSTRWRFRIALRREARFGQAVRQLKDLLPLLALIAGCGMIGACAAVGYSYARFEGPVVGPEHLVTVHDGRTVDYVARPEYSFAYGVEDGKTRVLQNRKETRNGDEVRGVYSVVDPDGTLRVVKYTADDANGFQAEVITNGVKTLHGHGSDGDAGGGSVDSQVRHHSAEAHKAKEDDEEEDEREREHQGNGQYQVHEDYDEGKDEQAEEDEEGGGHQEYEGSSEEGYVEADAHSQQEESSDEDY

SEQ ID NO: 32152 - DNA, 4097 bp, DROSOPHILA
gcccataccattttagccgtttgtggtagtcgctcgatatcttttgatttggtaccagcattcgaattctctggaagccaatggccgtttgatatttgcccggttcctgctgatgttagcaataattggccatggttcgccattccgcaacagaagaagaagtcggctaaaccgagaaccacattcatggtttgtgcaccacattgggagcgcgaaattatgaagggcaaggataatttgaagaacgttctacggctgatgaaaggattgcgggatgcccacgccaggaaattgcctcacttgtccagctacatgttgaaaacagttttgcttcatcgcctcgaaagtgctgactgggaaagagacctgggcaccctattggttgagatgtggagtcatttggtggatcatctacgcgctcgtagactggagttctttttggctaaggatcataatgtattcaatcgtatgaatcaaaatgaaatcaagatatgtctagaaaacgcaagcactctgctaagaaagctttgtattgctcagacatgcggtggtagctaccatcatgtggcccaactattcaatattccaaattaagaagaatttaatttcaaaacaataccgagcctttttcatgccatttgcagaaaggaaaaagcgtacatgcacacatttggctcattcacaagggcgcagaacaaatattcgattatatccgaggctgaataagcacatatcttgctgagtaacagaactttagtggaagaaaaaagaagttgaatcaaaagtcatttcggccgcacatttgattgtttacattgtccctgaactttgtttaaaaataaagctacgaaaaaaaattgatttaccctttgtttatatgtatgtatatttatacaactatgagtgttaaatatcttatgaagagacaactttagccttacgatctacaggaaatatcaacggtaacttttaactaaagttatatttcagggggatttcgctataatcgaatgctgctttcgatggacatgtgcaagttgttgaactcccttaggtgcgaaaggatgtcgtcccgctcccgttcatagatatcccagaatttgagatattggttaacgtgctggagtaccaggttgcgggcaaagtcaagacagctcctaacgttacgcatccgccgcctgcagctggtcaagaccgaacgcacctgctgctccggctccaattgggcgatcacaaatgcaaaaacgttttgcacatcaatccgcacatcggttgggaaaaccacggattccgcgctctttgcctgggggaagacaattagagacggcgtggttggcatggccaactcccagggcagatcattagcctggctatcgaagcgtacaaagtgcacctcggggctgccgagcagcgccgaaacctgcagaaatgcttgggatagaacggctgacagagcgcagtcaggacgatgcataaataccacattggtgacatttggtcgctggattgcctgcaacagcatctgtctattgtattttctactgaacccagattccatcatggcaagagcatttttgtgagtccttggcaatgttctggcgtaaaactgccgtataaaatctttaagagctacgtaggagaatgtgtgttgctgtggcataacatacagtgactcttcagccgcatccaagatgaaaacctgcacctgctgatgggtttgctgaatgccaagctggtgtagatagtctctatatttcacagaatcgaagatcaccacgcccagcgaccgattgtgggctgcgcgctccgtcgagtgctgccaaatgagctggccatatttggttaccattttggcaatgccgatttttatggccggcgttccatgctgtgagtgtgccaggcaaaggtttctggagtgaagccgcagcaagtgggggacgtttcgataactcggatggttctggtgcgagtactgcctccataggtggtttagatacctattaatccgataatagttcttaagtgtggtcttgtttttactccaggccgggtaacatgtccgggtttgttcaccatccccaaacagctccttgggaacttgatttagggaggaggatatgtcttcagattgtttatcgaattttttccagtagtcttcgcacccctccgactgctttttttgagcgtaagccatctcctcgcccatgacgctagcatggtgatattggttcattcgaactcccatagccagcacggggacatgtcgtgccttcatggcgatggtcataggagtgccatagccattggagaacagcgacatatttttgagtgtgctccgtacccagcgcagaatgtcgatggtcttccatactccagatgtaccattaaacgtatgaactccatttcggctgtcgataactacaaactggggcagcttggcctccgaggacttcaacatcttcctggcactgttgccaaagtacacggtgaagcggatattcctctccggatccagttccagccagcgcagaccggcagccaagtaaagattgtaggccttgtcgtctggcgagtcaagcagacccaaaaccaccgcatccgagtgcttccgaatggcggcgagatcctgactactgtgtgcccggtccagtggctgaagcaggttattcatgaaccgggcgagatcttcaaagctccacgagccctggtactggagtaactgcttttggccgtagcgcacgatcagcgtgggccatttgtcaggataacctcctgcgccggcgactcctggtgccggcatcaaagtacggctgcaattgcactgcaagtgccagcaatcgatggctccaaagaagccatactcctggtaatagtgggccagtccattgtagaccagtcgtgcctgccgtgcttcgctggcccaggacacgtagtaaaatagcagcgagatctctgactctgacgcttccgcacggagctggggaacactgcgtccgggacactcgacaatgggagcctggtcggatgtggctgaccttgaggcgtccaactgagcgatagagagagccaggagcagcaggctcaaaattattttcattgcaaccggtgggaagctaattagatgttaagaacaacacaacagcaaccgccgtgaacagatgtttgccgcgaggatggccacactggtaacgtcggtagtgttgttaataataataatttataagtaatgactaaatctaaattttaaatttgaaaataattctttaaataggttcaatattcaaaaataacttgttttggaaatgcaaaagaaacgttgttaagcactaaatggttacggtctcattaagctttactttcttccccacactgcccgcagttatcgatagcagcactatcgattccaagtgatattaattaatcacttctgctgtttactttcttaattaaaactctgttaattaaattatcaacaacggctgttctaaacccactgcgacgcgtaaacgaagtagcgtttcccgctgcaacgaaacgaatggaaaccacccaaaggcaaaccacctgaaaatcgctcaccaatccccccaaaaaaattcccatttggcgaaaacaacaacagtaattagggtgtgagagtgtggagtgaatagctgaatagttaaatcagtgaataatttaccgtacggccttcgccttcccctgcggaaacaacaacaaagctcagcgttcacttacacccacacacacgggtctaccacgcatacacacgcaggccagccgataacctgtgtgtgaggcaatcgccgtcatcgttcgaaatcaaatctctaatcggtggaagcagcaacaacaataacagcagctgcagcataatcaacaattgattatatacgtatatagctaaaaataaggttcaaatatgggactgttattatcgcggctctggcggatgtttggcaacgaggagcacaagctggtgatggtgggtctggacaacgcgggcaaaaccaccatcctgtaccagttcctgatgaacgaagtggtccacacaagtcccacgatcggttccaacgtggaggaggtcgtctggcgga

SEQ ID NO: 32153 - DNA, 1857 bp, DROSOPHILA
atgaaaataattttgagcctgctgctcctggctctctctatcgctcagttggacgcctcaaggtcagccacatccgaccaggctcccattgtcgagtgtcccggacgcagtgttccccagctccgtgcggaagcgtcagagtcagagatctcgctgctattttactacgtgtcctgggccagcgaagcacggcaggcacgactggtctacaatggactggcccactattaccaggagtatggcttctttggagccatcgattgctggcacttgcagtgcaattgcagccgtactttgatgccggcaccaggagtcgccggcgcaggaggttatcctgacaaatggcccacgctgatcgtgcgctacggccaaaagcagttactccagtaccagggctcgtggagctttgaagatctcgcccggttcatgaataacctgcttcagccactggaccgggcacacagtagtcaggatctcgccgccattcggaagcactcggatgcggtggttttgggtctgcttgactcgccagacgacaaggcctacaatctttacttggctgccggtctgcgctggctggaactggatccggagaggaatatccgcttcaccgtgtactttggcaacagtgccaggaagatgttgaagtcctcggaggccaagctgccccagtttgtagttatcgacagccgaaatggagttcatacgtttaatggtacatctggagtatggaagaccatcgacattctgcgctgggtacggagcacactcaaaaatatgtcgctgttctccaatggctatggcactcctatgaccatcgccatgaaggcacgacatgtccccgtgctggctatgggagttcgaatgaaccaatatcaccatgctagcgtcatgggcgaggagatggcttacgctcaaaaaaagcagtcggaggggtgcgaagactactggaaaaaattcgataaacaatctgaagacatatcctcctccctaaatcaagttcccaaggagctgtttggggatggtgaacaaacccggacatgttacccggcctggagtaaaaacaagaccacacttaagaactattatcggattaataggtatctaaaccacctatggaggcagtactcgcaccagaaccatccgagttatcgaaacgtcccccacttgctgcggcttcactccagaaacctttgcctggcacactcacagcatggaacgccggccataaaaatcggcattgccaaaatgcttggcattcagcaaacccatcagcaggtgcaggttttcatcttggatgcggctgaagagtcacttagaaaatacaatagacagatgctgttgcaggcaatccagcgaccaaatgtcaccaatgtggtatttatgcatcgtcctgactgcgctctgtcagccgttctatcccaagcatttctgcaggtttcggcgctgctcggcagccccgaggtgcactttgtacgcttcgatagccaggctaatgatctgccctgggagttggccatgccaaccacgccgtctctaattgtcttcccccaggcaaagagcgcggaatccgtggttttcccaaccgatgtgcggattgatgtgcaaaacgtttttgcatttgtgatcgcccaattggagccggagcagcaggtgcgttcggtcttgaccagctgcaggcggcggatgcgtaacgttaggagctgtcttgactttgcccgcaacctggtactccagcacgttaaccaatatctcaaattctgggatatctatgaacgggagcgggacgacatcctttcgcacctaagggagttcaacaacttgcacatgtccatcgaaagcagcattcgattatag

SEQ ID NO: 32154 - protein, 618 aa, DROSOPHILA
MKIILSLLLLALSIAQLDASRSATSDQAPIVECPGRSVPQLRAEASESEISLLFYYVSWASEARQARLVYNGLAHYYQEYGFFGAIDCWHLQCNCSRTLMPAPGVAGAGGYPDKWPTLIVRYGQKQLLQYQGSWSFEDLARFMNNLLQPLDRAHSSQDLAAIRKHSDAVVLGLLDSPDDKAYNLYLAAGLRWLELDPERNIRFTVYFGNSARKMLKSSEAKLPQFVVIDSRNGVHTFNGTSGVWKTIDILRWVRSTLKNMSLFSNGYGTPMTIAMKARHVPVLAMGVRMNQYHHASVMGEEMAYAQKKQSEGCEDYWKKFDKQSEDISSSLNQVPKELFGDGEQTRTCYPAWSKNKTTLKNYYRINRYLNHLWRQYSHQNHPSYRNVPHLLRLHSRNLCLAHSQHGTPAIKIGIAKMLGIQQTHQQVQVFILDAAEESLRKYNRQMLLQAIQRPNVTNVVFMHRPDCALSAVLSQAFLQVSALLGSPEVHFVRFDSQANDLPWELAMPTTPSLIVFPQAKSAESVVFPTDVRIDVQNVFAFVIAQLEPEQQVRSVLTSCRRRMRNVRSCLDFARNLVLQHVNQYLKFWDIYERERDDILSHLREFNNLHMSIESSIRL

SEQ ID NO: 32155 - DNA, 3150 bp, DROSOPHILA
atcttttatggtcattgctaattgttgttgttcacccgtccttttggggccaagtggttgtacccaatgagccgcaaaatctatgcgacatgtgatggcaatcaaaatgattgcctcggaagacggccaagtccaagtttcagttcattaatgcagtttagcgaagaatgagaaagttttccggagcagttaggcgatttttcttgtctgggtataaaatgaatattgaatattctggccaagcggttgctagattgatggtacgactgctttgggcgactatccattactctttaagatgacggtacataaacttagtgccttaattttatagttgatctagtctataaagtttttaaatgaagtccacgtttggatgcttggactacctactgtttctttttcatggaacattattaacattgcttttaaaataatatttatttttaacttcataagaaactccaagtatcctgtagccattagggtatttttcgccgcagtcaattctcacacactgaggcgccaaattagcgcggagcataccatttttttccgcttggcttggatggcatttggtaggaactggtggcttggaggggataatggatgggggtgaggatgatgatgagggggaagggcatagggatggcgcctggccgacagcatttgccggcagcaatagtaattaaaacttgcgttgcctgcttttaggcttttgctggatgaaatgcgatgtggggggatgtgagccggaatcgggattgggattgggaatacaggggcggcggagttgggcgtccatgggcagcgcgaaaaactttccaattaggccaaagttttcgacaaccacaacaacaacgacagcgccgaaagccaaactcacttcgtcagcacaaatcaactcggtggctataaattcccagtgttttttctgttttctctctttttgcgcctctcattcgcctgccggtcgtgttttacgtaaattaattaaaatttatttcaacttaccgccgcgcacgtgaacctctcggctgagcacggtgcccaccaaattgcgcagtttgcatctgccggtttaaaggacaaaggattaacaatcaatctgatttgggcggagttggatccgatccgactcgatccctgaaatcttacctgtagactgtggcatgcacctcgtggcggtacttctcggccgtaaagggatagaacatcatgctaccgttggagagctggaacaccatgtcctgctgcggcgggatgggggtccactccacctggacaaagaaaacactcaaaaaattgaattcggaaaactataagcaggaaggagctgatcaaaactaatgtgcaggtaaacgaaatacttaaatgtatttatgataagcaaaaatatgtatcatttcgctcagtgttctttcggcagcgtttagcatttgtttgttggccagtcaattaacttggaaatgagcagaggcagcgccaaatgccgcacagccatgcataattaaacagcaatattaaatggcggcgaggaatgaaatgaaataagaaggaatggagccaagttggaaatggaaaaggactaggaagtggagaaggtagaaggtagaagaaggagttctcacctccggcgggggacttccatgcccggagcattctatgagtccgcccgaattgttggagaactcgacgcgatgcggtggctcatggagaaaaatcggtccctgtagatccagtccatttacaaactggctggtctcggctgcaagagaagaaaggaaggaaattcgttgaaatttaaaattttaattaaatggtggcattctgtgtgttcgcccaaagttaatttcaatttttgttagaccagccaactttgctacaccccactaacgcccaactcccaaaaaattaagtagcaagcatgccagtggctttcggcttgggctttggcattttcccggacaattccgcttgagtgggctggatgacttggcctaaattttaatgaggcgtcgtgagtgccgttggcccacaacaaaggatgctgcggagacaattgctttttacctgccggccattgttgcggtcgccggccacaaaagccgggctctaattgcttcaccaggcagcgctgagcattgcataattttcgaccgtgctttaaaatgtggctgtgatgcggcttttatgtcttatttattattcattattcattcggggactgcgggacaggagctgtgtggccggacacgctaaggcgttgtctcctgtccagaaagtaaccagaaattcatgtgcaccgactgagctggctatgacacatgaataatttaggaaagaaggaccttctccgtgtcccgtacactcggacatcgtcttgggagtgggcaatgtggtgtggaaaattcttcagttcaaattacttttactggtaaatatttctctaaagtgtagtcgtttcgtttcttcatgaggaaaagctaacgctggaatctcagaggaataaggtgtgaggatatcacacgctttactcttggactattatcaacacattactatctttttcattattaatatgtttcaggattaactaactaacatataataaatttaaaatttagttcagatgctgaagcatagaacattatctaattcaacaatttttgcaatgataatggctggccacttttgcccgagtgcagtggtattgttacaaatgctggttttcccggagatctttctatcacattctgtcacttcaagaatccctttttggcagttggccccgagttgagtcccagtcgcctggccaggccacaggacttggcaaggagcactgctccttgtggcactttcaacagcagcagccgcaaagtatgcaacactaaatttgtaagcaattttcagccccagcaacgccgcactagagcaataatatgaaaaattgttttgtcaaaaaggcattaggcggcagataacgacggccgagctccttgggcccggttgcatgccccaaagtgttgcaaagtttgtgccactttcgttgcggtaccccaccgctacccaccgaccatgcccctgctcttgcaggactccccccctcgtgtcccagtcgtcctggttttccttcgcctggcaacacgc

SEQ ID NO: 32156 - DNA, 354 bp, DROSOPHILA
atgcaatgctcagcgctgcctgccgagaccagccagtttgtaaatggactggatctacagggaccgatttttctccatgagccaccgcatcgcgtcgagttctccaacaattcgggcggactcatagaatgctccgggcatggaagtcccccgccggaggtggagtggacccccatcccgccgcagcaggacatggtgttccagctctccaacggtagcatgatgttctatccctttacggccgagaagtaccgccacgaggtgcatgccacagtctacagatgcaaactgcgcaatttggtgggcaccgtgctcagccgagaggttcacgtgcgcggcggtaagttgaaataa

SEQ ID NO: 32157 - protein, 117 aa, DROSOPHILA
MQCSALPAETSQFVNGLDLQGPIFLHEPPHRVEFSNNSGGLIECSGHGSPPPEVEWTPIPPQQDMVFQLSNGSMMFYPFTAEKYRHEVHATVYRCKLRNLVGTVLSREVHVRGGKLK

SEQ ID NO: 32158 - DNA, 2195 bp, DROSOPHILA
gtataccgtcgtgctcttatttacactttcacaagatttttcggaaatattttaaagatttccgttggaaaatgcgactgcaaagtgacagaaaatagagaaaagactacgtcttacataagttagttgttttttaaatgtttataatatctgaatttataaaactacaaaaatggtttcaaatgtttaaaattgcctatggtatattggtttaaagtgccttgcagatttcatttagcagccgaaaagtaggcaccgtttaatatttaaagtagcacacggatcacggaaacatggcgaatgagcgatggcgggcgtttgcttttggggactcagtgtattccgctattcctggtattccggctgctccgagtgttccgtgctttcaggaggtggccctcaagtgcacgcatttttctgcttaaaagccccgactaatgcgatgtcgaagcgaaatcttcatctgtctgggtgcgcaacaaagcggaatactccacggatgaggatgtggatgatgtggttgtggatgtgtgtgtacccggatccgggctaagtgtaaagtgtatttgcttaggtcaggacacgtagggcgcacaccagccacggctttcagctccaacttgacttgctttgactaaacaagctgaaaaacaggaaaattgctcaaattgaaagcttgaatgttttaaaaccgaattgtatctggccaaggcaatctcattattcattcctgcatttgcccagcattttgcagctgcatttttgtgcgaaaataattaagctgcgttgcctggatgtgagtggtggtgggcttgagcatgttttatgccggccttttgtgctcgcaacacttccttgacgagtgtttttcctcgaaaagccaaagttatcagcaaaaagatcaacgactctgtgaccaccctcccagcaagtccatatctacgaccatgtcctcgtcatccttgtcgaccttttcccgccgctttgtataccatccatagctaagctgcgggctgatgttgctgctgctgctgcttctgctggttgaatccgatgatgttgctgctgactgtgacagtaaaggcctttcttcgcttgctgcgtgttgttgctgctcgttgctgctgctgttgctgcttttgcttttgctttttctgccgctcctactgatgatgaagctgattatgctctgcatgctttggacttaagcccggtctgctccttggacaatgttgccaggtccaaacaaaagccaaccggctgcctttggttctttggggcttgtttttgtttcataaaatagcagtcagcaatcaggagccagaagctgcataatcttggccctcctgctgtgctgtgctgttctgcgatgtgacgaactgccaaaaggagcaggagaaggaggaggagcaccacccaccataaaccaacccactgctttcatgcgcttagcaaacgtgacattcgaggtcattcacattttgagggcgtgttgttgaacttggtgggaggaggagcgggtggactgcagcaggagccatacagaggcagagcaactcccaggggcggactttgcgggaagtaagcaatctcctggaatgggctatcttagccaaaaagccaggggattcttggatggctttcttgcagtgccacgttgagctttgcccacctgccgggtgctactccgcacctgagtatttattcaaggcttatgcatattcaagactcagttatatgaataaaatttatagaaattttacatatccttgtaagatctcacgacaaacttcaagctataaaaaatgctttatatgcttaaaaaaaaaataagctcaggaaaaattcgaaaataatgggaaaattatagagtattttttatgacatggtttttctttctaaaattttttccctgagtgctcagcttctgtaaaacttcttgcactcctccagagttgtgtattgttgaatcccgggttagttgctcctgtccgcagctttatgcttttcccctagttgcatgcacagtggtggtgcagacggattcggttgctaaatgccgtgacacattagacaatgaggatctctaattatggctcgaaaactgcaattaacatttgatccagcctgtttcgtatggctgccacgagtgtattggtgagtgggttccgtgggggtttagtggctccttcttt

SEQ ID NO: 32159 - DNA, 294 bp, DROSOPHILA
atgcagagcataatcagcttcatcatcagtaggagcggcagaaaaagcaaaagcaaaagcagcaacagcagcagcaacgagcagcaacaacacgcagcaagcgaagaaaggcctttactgtcacagtcagcagcaacatcatcggattcaaccagcagaagcagcagcagcagcaacatcagcccgcagcttagctatggatggtatacaaagcggcgggaaaaggtcgacaaggatgacgaggacatggtcgtagatatggacttgctgggagggtggtcacagagtcgttga

SEQ ID NO: 32160 - protein, 97 aa, DROSOPHILA
MQSIISFIISRSGRKSKSKSSNSSSNEQQQHAASEERPLLSQSAATSSDSTSRSSSSSNISPQLSYGWYTKRREKVDKDDEDMVVDMDLLGGWSQSR

SEQ ID NO: 32161 - DNA, 2479 bp, DROSOPHILA
tcgtttaagtgccgtaaaaggcgaatggcacacatgacacccacattccatccactttccacccaccgcatcacaacagtcctaagccgtatccgtatccaggagccctcatcaagatgaagtctattaaaaatttttggtttgaattcgtctagaaattccagcgacatttgaaggaagcacaaggaggggggcagctgcctttaagtggttgccacaaattattcatgagaacaaagcagttggggcggggtgaaagggggggaatgatgtgggaatcatgcgaaagaagttgtcaggagtggcataaagttttcaaaattttcaaaaatcacttgagtgctttcttgattgaaattaaaacatgtaagttctcattttttgattttaggtaaaacgatttatttattcggtagcaatttaactttagattgaagatatgaatttatgtcattatcatacttacgtatataagtataaatatttaaggacttaatataatctttaaagtatgcttgtacatatattatttttgagcttattaaatgttggtcttctttacgctgttgttgctgcataataggagtatccatcaaaatcctttgccacttgaatggagtctgcgatcataattggtttacggcctttgttccgcctcgtggactgacgcatttcaattactcagccaccggttacaaagtcaaatcgaattaggcccggcacgtgccgagtgtgcgtgcacaccaccagcggatgggatgggatccgatcggatcggattggcttggcttggattggcatggcccactaaactggaacggagtcaaagactttgagctgcgatgtcagcgatgccagttgcatggcaaaacgcggccttcgtgtccaagtggctttggtcactatataagctggacaaccgggcgaattcaacatcaaatcaagctcacagctttctgtagtcactacaaccaaacacaaaaaccaatcaacaatcaacatgaaattcgtaagttcattgattaccttaaggatttaaaggacttgcccattaaggattacttttgcctatagctcgccgtctgcttcttcgctgttgtggctgtggctgctgccaaacccggtattgtggctcctctggcctacaccgctccggctgtggtgggcagtgccgcctacgtggctccctacgcctccagctacaccgccaactcggtggcccacagcgccgccttcccagctgcctacaccgccgcctacactgctcccgttgctgctgcctataccgctccagtggctgctgcttataccgctccagtggccgctgcgtacgccgccccagctgcctataccgctgcctacaccgcccccattgcccgttatgccgccacccccttcgcagcacccatcgccgctcccgtggctgccgcctacaccgcccccatcgccgccgctgccccagttctgctgaagaagtaagaagtgcgattgtgaatcccatcttgaccaatttgtgtaaataaagaattgtacataccgacgacaagtcaagcgtgttttctttataaagagtatacacactagaaaattttaatgatgtggcaaagcgtcaataaaacaccaaaaaaaaacctggaaaatttctcttaaaataataaaaggtaataaaggataaagttttcttacaaaaacatttctttaatttgaaggaacttcatcatttataaccttacactaagagatgaataggacattaaacagattttcaatagttaagtgaataagtgatcttgatcaaaccaatgaaaactttttgtttattaagctttagcaatatgcatagttaatcttattttttagtgtaccacttgccccttctgttgtgcgattttcccgaggcaaaatgaactcctttggctttgagcagtgatggggagcaatttgtactccgctttttccactcggctcggttcagctaagttcttatcgaaagccaggcatctggcgtcccctttttcccgctttccccggttttccgcgattttcccctccatctgcacctaggcggcaagtctgcgctttgccttggccaggattaaactttccatttaaaaggatttcttttctatatgaaatatgcttcctttcagcgtttcctgcgcgttccctcctcttccacttccacttccctttccctttcccttatatattttttttttatttttattcccgcagccagcggctccagttaagttttctgcttgactttgtcctgcgcgttgaaagggccgagtggagccttctgcccctcggcggtatcctgctgctccttatcataactttggcatcgcccctcgcccgttcaggtggtaaatgccaagtagttgtaaagtttgctacctaagcggaaaaggctagtaaaatccgcacaggggaaaatggctgctccattttcgcaagttctcgcaacagatagcgt

SEQ ID NO: 32162 - DNA, 414 bp, DROSOPHILA
atgaaattcctcgccgtctgcttcttcgctgttgtggctgtggctgctgccaaacccggtattgtggctcctctggcctacaccgctccggctgtggtgggcagtgccgcctacgtggctccctacgcctccagctacaccgccaactcggtggcccacagcgccgccttcccagctgcctacaccgccgcctacactgctcccgttgctgctgcctataccgctccagtggctgctgcttataccgctccagtggccgctgcgtacgccgccccagctgcctataccgctgcctacaccgcccccattgcccgttatgccgccacccccttcgcagcacccatcgccgctcccgtggctgccgcctacaccgcccccatcgccgccgctgccccagttctgctgaagaagtaa

SEQ ID NO: 32163 - protein, 137 aa, DROSOPHILA
MKFLAVCFFAVVAVAAAKPGIVAPLAYTAPAVVGSAAYVAPYASSYTANSVAHSAAFPAAYTAAYTAPVAAAYTAPVAAAYTAPVAAAYAAPAAYTAAYTAPIARYAATPFAAPIAAPVAAAYTAPIAAAAPVLLKK

SEQ ID NO: 32164 - DNA, 3096 bp, DROSOPHILA
atataacaacaattacttttaagttaaaaattttgcacataaagcaataactatttcgccttaaagctgcataagatccttgattaagatgtttgcgaattggccataaagtcccaaacttttcccatgaagaaacctccttgtgctcggccattttcccaccccatcaatgtgctgcacattgccaatcactttgccctgtcccaacgtattcaattagcataaactcagcattaacccaaatagacaagcgccaacggcggcaactttaaccccctgaaaagggagagagatttattcgagcgtaacagcggcaacaatgggataagaaatcgaggcaagatcaagatagacagacagcgaagatgcaacagactggcgctcaaatgaggctggaaccaatggatgcttggcccagatggatggttccccagtgagatcgacacaaaagaatcacatccacatctcttccagcttcgatacgcggtgtgtgttgtgatccgtgttgaagtcgccggagttatattgttttatttcgctcttttcggcatttcatggtttcgtacgcatgagattgacagtcggttgtcacatggtgccccccctctgtttgcgcccccaattacttgcaactgttgcaagtgcacaattttcaacactcgctggttcttttgttggtttttttcgacagcctttttttttggctattgcatttgcattttaaatttctgtttgtgtggcaattgtttcaaattgtaatttgttattgtttagagttcattttgttgctgcgcttgggcaatgtttgccagccacatgtgccaccacctcccacccatgctgccacccacaattgaaggtcgctgcgctgcctgcgctgagataattcgcacgagcgatctacaaagtcataatttaatacgatatctggtgtgcgagggaatttgcttttaacagcattattatttaattcaatttactgcattttaagtgtttcgaaatggggctaaaggtgggaagagtcccactcgtaacctaattacgatgtaaatatttatttgccaaaactgtctgaataatttatctcattttcacttttgttagcaaatcgatggctacacagctggtgaggattaccccgcctacgacgccgtgccaaagggtctggccttcaattgccagggtcgccagccgggttactatgcggacacagagacgcgttgtcaggtgagttcgaataagactctgtaaataggtgaaattatatataaaccacatggaattcatcataggtctggcattggtgcctccactcgggccatcagtactccttcctctgcccaaatggaaccgtattcaaccaggccgtcagggtctgcgactggtggtcgaatgtgaactgcgagggatcagagcaactctaccagaacaacgacgaactgtatcgcatcccagagcgccagcagcagctgaatgatgtatgatatgaggccgatgatgagtataagattgggacagcaaacggaaccagacagcggggcggaagacagcggcaatttcaaaagcaacagcaacagaagcagcaacagcagcaacatcaagcactcaacagcaacacggcaatcggcggaatcaacagcagcaatagaatcgtagatagcagcaactacagtaaaatgaccaaaaatagctttagaggtagcatgagatttaccacaccaagtaccaatccccaatcgtcatactcatcatcacagcagcaacagcagcagcaacaacaacaacagaagcaacatcagaagcaacataattctagtagaaatagcgaaagaaaatcaaagcctagtagcgttaaccatagagatagggatagcaaccaaactagatctaggaaccgcactcacaatacccctcaatccggcaagaagaacaacagcaacaacaacagctcgcgaggcaaacagcgatataatacgaataagttcgaaaatgatgcggagctcaaggattacaagagcaagatcaagaacaaatacaatatcgattatgatcattctttagatgaagaatatgaaataatcgaggccatcgaatgagtgaaaatagctttatactcgttgttcttgatgttgttgtcacaaaaaatgcgaccccaaattggcgccctagcacccaaaagttttgaatgttacccaaaatgtacccgttgtaaatatgttaaagtatgaacacattcccttcattgttaaatatacacatacccccttccatttaaatttgtaaagaaaagtattgcttgtgatttgcacgaaagcaaaaataaatcttaaaaagtaacggattttttgttcactggttttgaatcaagtttgatggcttagtgtaaagcagttcagatgaagtgaaaagcggttagcttttgaaagcgagcgttcaagattttgaattcgaaaaaaatcgttgaaaacaaatacagttattacttcaataaaaccaaccataaaacagtacaagggtaatgtaataattaatttcacttttttccgaaaataaagcagttctcttacaaactaaaacattttaaatccacttttggatgccttccggttaagcaatgaaatacattaaaatctaaaaaattatttacatagaaaaaaataaattatacaatttaaatatattttgttacagcattgtagggaatttaaatattttcgaatttaatttcaacgcgtatcttcatcttcatgcttcattcataggctgatctgcataacaactttttcggacacttgcactaagcttttggtcatctgggttcagattttaaagctttcgatcccgattacaaaggcaattttcaaagtaacctctcagttctgatcggcatcggttgtttgtttactttctgcggtatgtacatattttaaacacactcagagctatatttaatttaaaatttatgtttcatttttttcagaggactgcatagtataggaattaccaacatgatattttatatgctggctatagatatgattctatattttacgctcttgtccgagtttcctatatgggctttcttgctttttaagt

SEQ ID NO: 32165 - DNA, 852 bp, DROSOPHILA
atggggctaaagcaaatcgatggctacacagctggtgaggattaccccgcctacgacgccgtgccaaagggtctggccttcaattgccagggtcgccagccgggttactatgcggacacagagacgcgttgtcaggtctggcattggtgcctccactcgggccatcagtactccttcctctgcccaaatggaaccgtattcaaccaggccgtcagggtctgcgactggtggtcgaatgtgaactgcgagggatcagagcaactctaccagaacaacgacgaactgtatcgcatcccagagcgccagcagcagctgaatgatcaacagcaacagaagcagcaacagcagcaacatcaagcactcaacagcaacacggcaatcggcggaatcaacagcagcaatagaatcgtagatagcagcaactacagtaaaatgaccaaaaatagctttagaggtagcatgagatttaccacaccaagtaccaatccccaatcgtcatactcatcatcacagcagcaacagcagcagcaacaacaacaacagaagcaacatcagaagcaacataattctagtagaaatagcgaaagaaaatcaaagcctagtagcgttaaccatagagatagggatagcaaccaaactagatctaggaaccgcactcacaatacccctcaatccggcaagaagaacaacagcaacaacaacagctcgcgaggcaaacagcgatataatacgaataagttcgaaaatgatgcggagctcaaggattacaagagcaagatcaagaacaaatacaatatcgattatgatcattctttagatgaagaatatgaaataatcgaggccatcgaatga

SEQ ID NO: 32166 - protein, 283 aa, DROSOPHILA
MGLKQIDGYTAGEDYPAYDAVPKGLAFNCQGRQPGYYADTETRCQVWHWCLHSGHQYSFLCPNGTVFNQAVRVCDWWSNVNCEGSEQLYQNNDELYRIPERQQQLNDQQQQKQQQQQHQALNSNTAIGGINSSNRIVDSSNYSKMTKNSFRGSMRFTTPSTNPQSSYSSSQQQQQQQQQQQKQHQKQHNSSRNSERKSKPSSVNHRDRDSNQTRSRNRTHNTPQSGKKNNSNNNSSRGKQRYNTNKFENDAELKDYKSKIKNKYNIDYDHSLDEEYEIIEAIE

SEQ ID NO: 32167 - DNA, 5758 bp, DROSOPHILA
tgtgtgtatttggtcgaggtatttatttatttacttgccattgcgctgaccaccaccctttcaatttcgcccagccaggcaatcgctctccttacgtaagccgaaacccaccgaagtgacattgaaggcgaccaaacctaattatgcaattattcgacacccgagacggaaatcggaaagtgaagctgatcaaagtgcgcacaataagtgtgtgcgcaaaatttgcagttggggcattatttaattggtcgatttgtacagaaaagaagccgcatttagacggtgaatcatgcgttttgcaataccatttcgttataaactttgttattcataaaatatcaataaataaatataagtaaaatcgaaacaaggagatcgttcaattgcatatattagcatgaaataatattagtaaaagatttaggtacctcaaatgcacatatgcctaggctaaatcttatatttttaattgtatctagatttttcttcaaaagattttgaaattctttcctcgcgtgaaatttcactacttttctcggaccaaaactgatggaaaacaaaatcgaaaagataaccaaatacaaaagtttagccaagaacactttctacaaccaatttgggatggaatgcatttctgcatgaggtggttcccttctcaaaatagaatcgactcttcccgacttgaatgacaaagttttgaaagtagcgttaatcatgggacgtgatttgaatgccaagattatgttgaatccagaactcatgagcttacaactcaatttgaaaccatccatgaagaagaatgtcgtgatttattttatattctgttagctttagaagcgttcaacgacttcgagggaacataaatcttacgccgagttgtgtgggtgtgtccgaaactcaaaaatatacataatattatgtacatttttcatttcagttatcaaacaacaggcacagaactgaagtcttcaagatggaaaaagccaaaggctggctgttaatgacagcaacaggtgagttaaattgattcagattggatcggatcgaaggacacttgaatcaaaacgcaaaaaaccacttaatcttgttgttcgaaccggaccatgacataataccaatccttgatgtgttatgcaatttggggcaactgtaaagtattaattaatttcaatttcgtttccctttcaatgcagtgctgctgctgctgagcctgttggcctccacagatgccgccctgcccttcaagaaggtgtccattgccaagacacccgtctccacgagcagcaccaccagcaccacgacggaagcgccggccgtcgaggaggaagaagtggaggaggagcagccagtgcccaccgcagatagtagcgacggtagcaaggtgacaagcttggattctggaaaggaattgcctcagccactgacttttaacccgccttttttttcagtcggacaatggcactctgttgaaaaactccaagctgactggcatcccgcagatcgactacatctgggatcccaatttgcccagggaactgagagggtaagacatgtttccaaatcttggtatatttgagcatattttgtaaatgctgaggttaaacaggtaaaatctataactcttacgataaaacaagttaatgatgggtgttttagagcctcttttagccaaataattattatggtacgccataaagccaaaaatatttagaaagggaattacatgttcattgtaaaacctgctgcttttaaaccttttattactgtgagattatcttagcttaggtattttatagatacaaatcaactatcaacgtactcagagtatcctttctatcctcctgcacagctacaacctgtcgacctatccatttctgtccactgtgccgcccatggacgagatccacttcaagtgcgaggggctgcacgatggcttctatgcctccatcgagtacaagtgccaggtgagctagccggcgtgaccttgtctgggcaacaacgacgtaacataattggtcatcatgcctagacaaaccgagcacaaaccaagcgcaacccaacccaacccaatctctctgtgcctggccagcaatttctctttttcaactggcgacgtgacgccaaaaactaaaacttgtttgcgcctcgatcttgacctcaaaagcgggcaaaaagaagcgctaaacgatggcttacagagcggattagttatggccaaatgtgattaaccagagttggactcgttgcagatctatcaccattgcgtctatggcataagacacgactttctgtgcgccaacttcacggccttcgaccagcgcaccttcatctgccactttgcatccgatgtggactgcgagggatcccagaaatactggaacaggtgagaccttctcaagggaacccccttaaccagtcaaaactataaacacttttgctgctttgaagatcttaatatgataatatcttaactatctcaatttggagtgaagacacattgtacaaaattaaaataaatgaatataaacaaataaagtgttaaattattgtatttaatgactaaattaatttaaagtaatctgaaatgggaatctcttaatagcatctttacaagcttatatgaataatttgaatagtaatagtaatatttaatgctaaccatttccacctttctgcagaaacgacgaactctatatggccaccactaccacgtcgacgagtaccacaactacgccagcgccacccactctgccacctgcacctcgtcgtcgccctcagagaccacagcgtccgctgagacgaccctacaatcgcagacccatcgatgactactactacgaggatcaggatcagtacgaggatgattactacgaggagcgacccgtgagacggccaaagccaagaccacgtcaaaggaagccccaagtggagccggagtacgatgatgagtacgatgacaagcgaacggaggccaagaaacccatccggcgcaataggaatcgttaccgcgatgaggaggaggcactggatgaggactacgacgagcgaccaagtaaaagaccaagaggaaaacccactgcaggaacggcgggtcgaaagatatctccccggaaaccaggacgagtggaggaacgacgcagcttcaacgaagatcgtccattgggcaggaggcgaagtgaaaaggagaggacaactccatcatccgcactggacgacctagatgaatatgaaaagccctataacagtgcagatcaggtggaggccgccgaggagcaaacgcctcaaaaagtgaagactactccaaagccattgacagaatttatcactccgaaggcggcagccgcttccgtttatgctcgtcctcgagctccgccaaggattgcgcgacctgttcccatcaatgagaagaagaaattctcctatccagtgcaaaagatcacggccaccacacaggcaccatccaacagtgcccaagaggaggaggactatcctgaagagcaggtggaggaggactacgaacagcctccagctagaaacactcctcgcagacgtacgccagcatctcgggctgagcagaagcccaccagaaccactttgcgcaaaccagtaacagacaagaagcccgtcgatgaggagtacgatgagccggcggagccggaacctctgagaaagcgcaagcgtcccttggcccccaggtcccgtgtcccagcagcagatgtggacttcgaggatgaggagtacgaggagagtccagcgcccgtttccacagcagctcccttgagaaaccagagactgagagccaagacaactacccggaagcccacagcgccaccacgtccacgcaaaccaatcgtagaggacgaagaggagctggagcatccagtggaagccgtcgaggacgaagcacctgcacccagatcgcgggcaaattcattgagcgggcgaaacgctggcgctggtttttcccaacgtccttcctcggtacgtgtggtcaagagacctttcctaccatccaggggcggcagtccatatctgccccgtggccttcagccggtgggtgtggccttaaaaccattgccaaccaccgatagcacgcccatcgacatgggttccaccatttcgggagtgcgtctgctcgagcatggggctcctctgttgaggggtaatcctgatagcggtgaagatgacgaggaggacgctcctccatcgcccagtccacccagaacgacactcccgcctcgcagtgctctgcccgccacgcctaagcgtgtggaaccgcagcgaccaaaactgaatctcgacgagctctacgagaacgactacgatgtgacattgaacgatgcgctcgatcccacgctgaaaccgctctcgccccagcatccgcatcctcattcgcatcagcttccataccagcagcagcagcagcaatcgcagcggcaatatgctagcgcctataatccatttgcctatcagccagcgtatcaatcaccaacatccgcttcagcatccgcccctgcatccgcatcgcaagcagcgagctatcatagtgattcctatttctcgtcgacagatatacgcaggcgggctattgtcccggcgcaaaccgcgcgtccacatcgactcgaatacgctgctgccggaggagcagccggcggaccttccagcggaggagccgtctccgggtcgggagtgagccggagccaccagccgctgggcggacggattgcccagcatttctacgatgactttgcctactgaaaagttcgcttgtaataaggtgcgtttttagtttgataacatagcatagcatatgtagtaaaatggtgtcatatctttggttttcagtttcttcagctgtaaataagtttccccaacacaaggagagttccaatttggtgcacggctccaacttcttaaacaaatctgtgtctactttagtcgtttagccgcacaaaacgtactcgtaattcgaaatggctcgggacatatgaagcaatagccgccgaaaaacaacataaccgatgataacctacagcaatcatttatctgagaattttttgggtacattctgcagaaagctcttttcaaaatttaccttcgatcgattatgctatttttgctgtatgagctatatatgtccagaacccccctacttatatatacgttgtataatactcaaatgtcgtgatagtagcagcttgcgaatttgtctgctagctcgtatctagtagtttataaaaataactccctcctacttgattatgtccaattaatcgagaagcataacataaaatatccagcagaacagaacaataaggaaaatatgcattgatgtccttgatttacatatagaatgaaaaatacctaatgtgttaatttaaaactgcaatttgcatacaaattgtctataatatttaagcttcgtcggagatcgtgttcgttgtagagaacccagatgcaagacttaaatcggagtgcataacaatcaaaacaaaaactgaaataaatttaaaacccacttaagctgctgtttttacttgtgtttacgtcctgctaatttttatcagacgtttttaaacagtccttcaggttctccgtttcctcttccaggtggtcgagctttttcattaaaattatctagaaggaatccaatataagcttattaaatgggttacagaatcaaaagaacaacgtgtacctttgctgccgagacaatttccgtggccactctaagcggcatgtgctctaaggattggac

SEQ ID NO: 32168 - DNA, 2625 bp, DROSOPHILA
atgacagcaacagtgctgctgctgctgagcctgttggcctccacagatgccgccctgcccttcaagaaggtgtccattgccaagacacccgtctccacgagcagcaccaccagcaccacgacggaagcgccggccgtcgaggaggaagaagtggaggaggagcagccagtgcccaccgcagatagtagcgacggtagcaagtcggacaatggcactctgttgaaaaactccaagctgactggcatcccgcagatcgactacatctgggatcccaatttgcccagggaactgagaggctacaacctgtcgacctatccatttctgtccactgtgccgcccatggacgagatccacttcaagtgcgaggggctgcacgatggcttctatgcctccatcgagtacaagtgccagatctatcaccattgcgtctatggcataagacacgactttctgtgcgccaacttcacggccttcgaccagcgcaccttcatctgccactttgcatccgatgtggactgcgagggatcccagaaatactggaacagaaacgacgaactctatatggccaccactaccacgtcgacgagtaccacaactacgccagcgccacccactctgccacctgcacctcgtcgtcgccctcagagaccacagcgtccgctgagacgaccctacaatcgcagacccatcgatgactactactacgaggatcaggatcagtacgaggatgattactacgaggagcgacccgtgagacggccaaagccaagaccacgtcaaaggaagccccaagtggagccggagtacgatgatgagtacgatgacaagcgaacggaggccaagaaacccatccggcgcaataggaatcgttaccgcgatgaggaggaggcactggatgaggactacgacgagcgaccaagtaaaagaccaagaggaaaacccactgcaggaacggcgggtcgaaagatatctccccggaaaccaggacgagtggaggaacgacgcagcttcaacgaagatcgtccattgggcaggaggcgaagtgaaaaggagaggacaactccatcatccgcactggacgacctagatgaatatgaaaagccctataacagtgcagatcaggtggaggccgccgaggagcaaacgcctcaaaaagtgaagactactccaaagccattgacagaatttatcactccgaaggcggcagccgcttccgtttatgctcgtcctcgagctccgccaaggattgcgcgacctgttcccatcaatgagaagaagaaattctcctatccagtgcaaaagatcacggccaccacacaggcaccatccaacagtgcccaagaggaggaggactatcctgaagagcaggtggaggaggactacgaacagcctccagctagaaacactcctcgcagacgtacgccagcatctcgggctgagcagaagcccaccagaaccactttgcgcaaaccagtaacagacaagaagcccgtcgatgaggagtacgatgagccggcggagccggaacctctgagaaagcgcaagcgtcccttggcccccaggtcccgtgtcccagcagcagatgtggacttcgaggatgaggagtacgaggagagtccagcgcccgtttccacagcagctcccttgagaaaccagagactgagagccaagacaactacccggaagcccacagcgccaccacgtccacgcaaaccaatcgtagaggacgaagaggagctggagcatccagtggaagccgtcgaggacgaagcacctgcacccagatcgcgggcaaattcattgagcgggcgaaacgctggcgctggtttttcccaacgtccttcctcggtacgtgtggtcaagagacctttcctaccatccaggggcggcagtccatatctgccccgtggccttcagccggtgggtgtggccttaaaaccattgccaaccaccgatagcacgcccatcgacatgggttccaccatttcgggagtgcgtctgctcgagcatggggctcctctgttgaggggtaatcctgatagcggtgaagatgacgaggaggacgctcctccatcgcccagtccacccagaacgacactcccgcctcgcagtgctctgcccgccacgcctaagcgtgtggaaccgcagcgaccaaaactgaatctcgacgagctctacgagaacgactacgatgtgacattgaacgatgcgctcgatcccacgctgaaaccgctctcgccccagcatccgcatcctcattcgcatcagcttccataccagcagcagcagcagcaatcgcagcggcaatatgctagcgcctataatccatttgcctatcagccagcgtatcaatcaccaacatccgcttcagcatccgcccctgcatccgcatcgcaagcagcgagctatcatagtgattcctatttctcgtcgacagatatacgcaggcgggctattgtcccggcgcaaaccgcgcgtccacatcgactcgaatacgctgctgccggaggagcagccggcggaccttccagcggaggagccgtctccgggtcgggagtgagccggagccaccagccgctgggcggacggattgcccagcatttctacgatgactttgcctactga

SEQ ID NO: 32169 - protein, 874 aa, DROSOPHILA
MTATVLLLLSLLASTDAALPFKKVSIAKTPVSTSSTTSTTTEAPAVEEEEVEEEQPVPTADSSDGSKSDNGTLLKNSKLTGIPQIDYIWDPNLPRELRGYNLSTYPFLSTVPPMDEIHFKCEGLHDGFYASIEYKCQIYHHCVYGIRHDFLCANFTAFDQRTFICHFASDVDCEGSQKYWNRNDELYMATTTTSTSTTTTPAPPTLPPAPRRRPQRPQRPLRRPYNRRPIDDYYYEDQDQYEDDYYEERPVRRPKPRPRQRKPQVEPEYDDEYDDKRTEAKKPIRRNRNRYRDEEEALDEDYDERPSKRPRGKPTAGTAGRKISPRKPGRVEERRSFNEDRPLGRRRSEKERTTPSSALDDLDEYEKPYNSADQVEAAEEQTPQKVKTTPKPLTEFITPKAAAASVYARPRAPPRIARPVPINEKKKFSYPVQKITATTQAPSNSAQEEEDYPEEQVEEDYEQPPARNTPRRRTPASRAEQKPTRTTLRKPVTDKKPVDEEYDEPAEPEPLRKRKRPLAPRSRVPAADVDFEDEEYEESPAPVSTAAPLRNQRLRAKTTTRKPTAPPRPRKPIVEDEEELEHPVEAVEDEAPAPRSRANSLSGRNAGAGFSQRPSSVRVVKRPFLPSRGGSPYLPRGLQPVGVALKPLPTTDSTPIDMGSTISGVRLLEHGAPLLRGNPDSGEDDEEDAPPSPSPPRTTLPPRSALPATPKRVEPQRPKLNLDELYENDYDVTLNDALDPTLKPLSPQHPHPHSHQLPYQQQQQQSQRQYASAYNPFAYQPAYQSPTSASASAPASASQAASYHSDSYFSSTDIRRRAIVPAQTARPHRLEYAAAGGAAGGPSSGGAVSGSGVSRSHQPLGGRIAQHFYDDFAY

SEQ ID NO: 32170 - DNA, 2639 bp, DROSOPHILA
ctaaagtgttcagccgagcacttcatatgccatttaataatgattaagtacttggattcgaggggtggcaaatgagtacggataaatggagcgcctgattcgaatgtcatcaaaatcatcatcaacataaggaggaagcccagccccctgaatctcctacccaactgaaccgaaccgaactgaactgttgacgcattttggtttcaggcctcattagcgccgggagtgaagtaaacccaagtcggccttcgataccaagacctctcaaattgtgtcagcatcaggtgtcaattttaatttactgctccgagccggcttgtcatctctgatgtctgtttgccttgaggtggtgagggtgttttcggctttgagccggaggaattcgagaattggggatggaggacggagaacggagaatgaaggatgctaacccatattttggtggcttgcggttgctgcggcaatttcggttttcgcaggcttcaggatgtacgtactacgtacgagtacatatccaaactcattgaagcctgcggctggagcccgacaatttcatcgcagatgaaagaggcttccatgctcatttatatgcaggcccaatccgcagcctcgacatatagcaataattgaacgcttagcttgaatggccgcaaaaaaccgctcgctaatggagcatttaaatatgcgaatgccagtgcttggcatgctaatccataaaactgtaatctcacatgttatatgaatagttttgaagtcagctaaaatatgtactttgcaagtagtaactagaactcataatggattgataaatgagatacccttaagattgctaaagttaattacttttgaaagctataaacccataaatgaaaaacaattataacatgtagattctaaacggtttaatgcatcacaagtaggggttgcatggaaaataaatgccagtccatgagccaagctcatggggcaatatcttccgcagggtttacaatccatggatttacttcttcagcagcagaggagcggcagcagcggcgacatagggacgagccacatagggcgagctgtaggccaggggcgaggtgtaggcggcggcgtagggcgtggcaaatcgggtgtagggagcggtgtaggcggcagccagaggagcagcaatgggagcggtataggcggcggcaactggagcggcataggaagctgggaaggcggcgctgtgggccaccgagtgggcggtgtagctggaggcgtagggagccacgtaggcggcactgcccaccacagccggagcggtgtaggccagaggagcggcggccagaggagccaaaattccaggcttggcagcagccacagccacaacagcgaagaagatagcagcctaaatggtggaagtttcaatgtaagtgttaagtgaagtaatattaaaagaattactacaaaaattaatatttaaaatgatttaagttctgcaaatggaactcattcttataaggttacttaaaatggttttctcagatatctactatcttttgcaatattttgtttaaatatcagttatactttttatattagtttataaaggcttccttctccttcaaaacttcgttctaaatagttttcctgtacttacgaatttgaacatgttgatgtattggttttctttttggattgtcacttggtagatggccaattggtttgtgatgtccaacagccagctgcacgactcttttatagccacttacacttttcgagctatttaccaatgcagatcacgcttttagatcagccatcgatggttgccaagtcaacgactttcgattgacgttgcgcatgcgcaattcttggctactgtttttgaatttgttttttttttttctttcaattttttcgttttagttttcgtggtctagacctgaccatgtcttatttttggtgcgtgcctgaacgtccgttactcggcgatttgtccctgaccttgacgactgcaatgggcttacaatttaatgggtcttacgggtttaaccgccaacgaaaaggtagctgaagttcgagtgatttatgagtgttatgccgggccgatatcaggaaattatcaagtcattccgctccattaccattcgcctgtttgcctattttaatagaccacaataaatccggctaatcactgtctaattatccgctctcaccgctggaagaaccgaaattaattaataaatgtcacaaattgcgggcaaagagcttagaactcactaattagaaatatcgagtgcaggccgccgccgtgtgtggtaaagcgtacgtcacaaggatgcaccaccacaaaggccactccacccaactccacccaacttcacccacttcttgcaggctgttcgggaacacatatcctgatgctcctgctgcgccaggctcacacttgaaaaagtgttgaagcgtgaattttgcttaaaaatgccaattacgcgatttcagcagcgcaatggattggtggatggtggctataaagcaccgctcaaaatgggcggtgaatttcagggggtgtggcaacatacacacagaaaaaatgatgtgcaattacatatgtatattattctaatatataaaaactatattactattatattatttgaggccactttcct

SEQ ID NO: 32171 - DNA, 387 bp, DROSOPHILA
atgttcaaattcgctgctatcttcttcgctgttgtggctgtggctgctgccaagcctggaattttggctcctctggccgccgctcctctggcctacaccgctccggctgtggtgggcagtgccgcctacgtggctccctacgcctccagctacaccgcccactcggtggcccacagcgccgccttcccagcttcctatgccgctccagttgccgccgcctataccgctcccattgctgctcctctggctgccgcctacaccgctccctacacccgatttgccacgccctacgccgccgcctacacctcgcccctggcctacagctcgccctatgtggctcgtccctatgtcgccgctgctgccgctcctctgctgctgaagaagtaa

SEQ ID NO: 32172 - protein, 128 aa, DROSOPHILA
MFKFAAIFFAVVAVAAAKPGILAPLAAAPLAYTAPAVVGSAAYVAPYASSYTAHSVAHSAAFPASYAAPVAAAYTAPIAAPLAAAYTAPYTRFATPYAAAYTSPLAYSSPYVARPYVAAAAAPLLLKK

SEQ ID NO: 32173 - DNA, 2644 bp, DROSOPHILA
accggtttaattgcaccgcagtcatccatcaagaaaatacttaagagatatatatccgcaagtacgacccagtcgcttctgagattccattcccctgggccatctttgtttaatgtgtctacataatagcgttcaccggcttccatctggctgcatgttgctagattctttctttccgcctctaaatttggtctgggtctggccaagatgctgtgcgagcgtttcctgcatcctgtcgtttcctgtgccccgccagaccagcgatccaccccccaaaacaccagcatccagcggctcctgcttttgcctctgccagtgctgcggtggccattatttcctgtatttaattgcactactctcggctgcggttttctgctacatttgttgccgcctgcagccgaccaaggactataatgtactttggctaaccatccgggcagtgcagtcctttcggctcccaggacctcgcccatttacttcttctttcctttttgagctgattgtcgtttgccggcttcttctttgtgacgtatttgttggtcactttgcagaggcagtcatcaaatgatttatactttaataagcgtgctcgagacatacagagaaattagatgtggccacaagagccgcctccactcgacttccacccaacacctcttcaccaccgtcgtcccgatgacatttttctttgacgctcgcaagaggaatttgcgcaatttatgagaggcggcaggcgggctgaagaaataccaaagcagcattcgagaaattaataaggaagttggaaacgatggcagttggctcctcgcaggtatttccggtatttgtgccattaaggcaaacgaaaggcagcgaaaggtggcaaaaatgcacggaaactcagaccccgcgattattaaggggttaaaaggttgagttgagttgaaaccatagcgagtggattttaaaatcatgtatttaaaaatttgttattgaggcgtaggattcacagtccgttgaattacttcttcagcagcagaggagcggcagcggtggccacatagggagagctgtaggccaggggcgaggtgtaggcggcggcgtagggagcgatgggagcggcataggcagcggccactggagcggtataggcggcagcaacgggagcggtgtaggcggcggtgtaggcagctgggaaggctgcgctgtgagccaccgagtgggcgctgtagctggaggcatagggagccacgtacgcggcactgcccaccacagccggagcggtgtaggccagaggagcggcggccagaggagccacaagtccaggcttggcagcagccacagccacaacagcgaagaagcagacggcgatctatagacagaagtactccttaattaatagatcccatcaatccttaagataatcaatgaacttacgaatttcatgttgattgttgattggtgctttgtttggtagaagtgactactgggagctgtgagctaggtttgatgttgaattaacccagctggccagcttatatacaacccacttggtcatccggcgaaggccgcgcttacacatgcagctgtcgtcgtcgacatggcagcacaacgtctttgactccgatccaacttactggccagttgaagacgttgttgctccatacgcacacttgtcacgtgcggaccgaattcgtaaagggcattgccgggtttcctagacccgaacgaccttgagcgaaatcggtttcagttactctaattaatttaaatcacaattctttcagcatgcttcataatgagtaattaattactatcatttggtatccgaaaatatcaatgtagcagtatattttctatatatttgtaacattttcgatcaactgttcgttttccgcctatcacaaaattctaacccacaaaaaatctaaaaaatataaaattaaaatttcaaaaacctacaaaaaagcatccaagaatgactcagttaagcgagttcgccctggacagccactttgcctccgagctgcgcagcctgcagttgtattccaaggagcaccctgtcagccaagatgaccacgacataagtcagcgttggatgcagcacttccaaaacgccaagggtttggataaattcgcacgaaactgcatgctgctgatgatgtgcgaacagttgcgagatcttggccacttgagcaaacccttcaccgaactgaagaacttgagtcgccccatggacgatttgctgaacgagtaccatgggacgactactgtggaggaggggcaaatgtcgccggttgaagatattgaggactcggacaccaatgtctccaactatggcagtggcagtagttctttctcccctggggtgccctatcccatttccacgcccgagttcgagagcattaagcggtctaaccaggatctgcttaaggaaatcgactcgctgcactgtcgcacggtggaagcggaaaagctataccttagcaggagccaaattctggagaagcagattgccgagaagtcggcgttggccaaaacgaaacttccccaggagggtatctatcaatcctgccgtgcggcctgccagcttctgaaaaaatggccaggcgagtcagtgcgactcaattttctgaccacctgcctggagccctttctgcggaac

SEQ ID NO: 32174 - DNA, 438 bp, DROSOPHILA
atggagcaacaacgtcttcaactggccagtaagttggatcggagtcaaagacgttgtgctgccatgtcgacgacgacagctgcatgtatcgccgtctgcttcttcgctgttgtggctgtggctgctgccaagcctggacttgtggctcctctggccgccgctcctctggcctacaccgctccggctgtggtgggcagtgccgcgtacgtggctccctatgcctccagctacagcgcccactcggtggctcacagcgcagccttcccagctgcctacaccgccgcctacaccgctcccgttgctgccgcctataccgctccagtggccgctgcctatgccgctcccatcgctccctacgccgccgcctacacctcgcccctggcctacagctctccctatgtggccaccgctgccgctcctctgctgctgaagaagtaa

SEQ ID NO: 32175 - protein, 145 aa, DROSOPHILA
MEQQRLQLASKLDRSQRRCAAMSTTTAACIAVCFFAVVAVAAAKPGLVAPLAAAPLAYTAPAVVGSAAYVAPYASSYSAHSVAHSAAFPAAYTAAYTAPVAAAYTAPVAAAYAAPIAPYAAAYTSPLAYSSPYVATAAAPLLLKK

SEQ ID NO: 32176 - DNA, 2429 bp, DROSOPHILA
tgtaagggatgttcaaacatttgcgacattcattgcagcgcctaactagcgcgcaaaatgtgtcataaaattattacaaaagcgaattatttctctgtctacctcatttataaactgtcaagttctaatttagtaaattaaataaagcgcgaataaagctcgatcaggtcagggactatttttagtggtatgaatggtcaatagcataggaaattttctatcaaaatcgatttccatcagttcaaaactatttttatgtctagtgtgataacatacagatcagatagtgcgtgaaatcaaaaatgtaaaatgttgatggacagtccaaatgacaaattgcaaatgggtcagtatctatttttagcggataaaaactgtcgactattagattgccagcattcttatcgaaatgaaagcgggaaaaatgcaaagataaaaacgtgtgctggctatgcaaattctagtgaaaacccaattcgtatctaatctattagaatcgtaaaaccgaagcataaacaagttgttaacaggtcataaaaacttttaaaaaatatttgcggcacgtttcgccttgccttttgtctaccccccccccccccacaactaaattgttcaataattgtttgaatgcttatttatgtagctacaactcaatcaagccgggcaaataataaatacgtgattaataaaaacgattttgtttgcccagcagccagaacgtcgccagcggggctatgaaatacgaaaagggtaatcttatcatgccgaatggtttccaatggaagggcgttgagttcatcatagaacggcggatcggttatcaagtgttaacctctagacttatcgatgaagccgcacaaccgaaagttactgaagattaggggggttccttaagtaagcacgttaaaaatagcggcattatgcgagctctactagattccatacggttcactttagatatctgaactgatgattacggctgcgtcagattctattttgtctaatcggtgttcttggtaaaggtaaaccaaaataatactatcagaaggtaaaaactaggaaagaagtggcttatcttttaaatatattactgcaaaagtgatcctcgcatttcttgttgaacaattattgaattattaacgtaacctacctgttgtgatgtggatgtggactggtgtgaggtttccttaagactactgcatgaactagagctggtattgatttgcctgccattctcgatgctgtggtgtccagcaccacccactccaccgccaaccacagatccattcaaggttgttggagttagggtgcttatggcgctgctactgccaagtggctgcggtgagctgttcttcttgtggaaattctcgatcagcgaggtgggtggactcagcaccccacttggcgagctatccgagaagtctgtcatctgtggagttaacaaaaaaaaacgagtgggaatatgaatgagacgtgaagaagattatattcacaatgcaagcatatcagtttaaataatggcgagacatgttccttgcatggtaaaagctataatacaattgcatagctgccaaatcaaacagctttaagtaaaacgtcttggtgataagcagccagcatacagaaattgtggaatccccatgaagtagtaaaatattcatacaaattatgtatgtgccattaaaactctttattaaccatataacgttccattcaatgagatttatgtgttgtatttattgattggctgttttaatgggaattctttaaattgcatgcattcatgacttctaattaagtggaataaattcttttttcagtaaagtaaattaccataaatacacttcaaattataaattcccagatcttcacaatcaggtgtgcctacaatcaatattttccgtattttcgtaagttaatgctgcagctttagataaaactacgtctgaccatgaaaaacctgaacaaggccgtaagtttcagaggctagataaatggactttaaactgatttccaggcgaccaacaacaaacggcacaaaccgacaaggcgcagcataagttctggtttgattcggtggattcgggttgatttatattccctggtttgcatttgcgtgttttgcaattacaaatttgcataaatacaatacggtgatttatctgcatttgcttgaaacttaatataattaatatttctgcaatgcgatttgtgaaattcgattggcgcgtgggttgtgtttattaccatttaaatcatacgacgggtgtgttttgtggtgtattttgcgtgtgggaagcacgagaccatttatagttaatacagcagcggttattataatatcatccgaaagcgaaaatgaaattgtatgattcatatcgctttaaatgacatgatttatgaaatttaacatttattatttattatta

SEQ ID NO: 32177 - DNA, 291 bp, DROSOPHILA
atgacagacttctcggatagctcgccaagtggggtgctgagtccacccacctcgctgatcgagaatttccacaagaagaacagctcaccgcagccacttggcagtagcagcgccataagcaccctaactccaacaaccttgaatggatctgtggttggcggtggagtgggtggtgctggacaccacagcatcgagaatggcaggcaaatcaataccagctctagttcatgcagtagtcttaaggaaacctcacaccagtccacatccacatcacaacagaacaccgattag

SEQ ID NO: 32178 - protein, 96 aa, DROSOPHILA
MTDFSDSSPSGVLSPPTSLIENFHKKNSSPQPLGSSSAISTLTPTTLNGSVVGGGVGGAGHHSIENGRQINTSSSSCSSLKETSHQSTSTSQQNTD

SEQ ID NO: 32179 - DNA, 2513 bp, DROSOPHILA
attgtggtggttatagcgctatatactatatgtatagtgggcctgtttgccacgattcttttccccttttccttgcagttccctttctagttctgttttgaaaacgtgctaaatgttatttattaattaagttgacgctattttctaaccatttacgtaaagcaacgctgagcgggagagagttatttctgctcaaagccggttttaggaaagtcgccactcagggagtggttcagaccccaatccccaagagttccccaatccagacggagtcgcgtgtgaggtgtgagttatgtatttgcttaaatatggcagtgtaaagctcatcgtggtttacttttagttcgaagagtgcactcagaaaagtaatttaattatgaatcgataggggaaaaaaaataatatatctaacagcgagaaatcatgaaagagtgcctataattcccaactagttttgacaactaataacgtcaaaatacctactaattatttctagctactttgtattttcttagtgcagaacgccactttttctttaagtgtatgcaaaactataatgaaaatgagcctaaaaagtggctcaggggttgttaaaggtaacgaatgagggataacaaaagcttgagtgagagtttatggacaccataaaaccagagaacagctccaagtgagtcatgacctttgctccctcagaatgtttataaatagccatcggcaattagtacgagtgggaatttgtaaagtcaaagggcaatcaggaacttttgttaccctataatatactattatataaatctagataactttaaatccacttacatttccgtaacttctgatgctcgaaggactgaggctgaatagcctgcccagctgctggtgatgtgttggtgaaccattgctattagctgatgataggtcggtaaacataggcgagtggcaatgttctatgggaaaaataagtattttcaaactaaatttgaaattatcttagaaatacccatcacttaccactcatcacaggcgacatgtccttggggaaggcgaacagatcgttgttgttccggatatccgatgagttcaaggtcaggctgggcttgcgcacgcccagaaaattggatgctgatgaggcactggaacagctactgcctccccccgcgccctgcatgccatagcccaaacgggtgtgcgcgttggtgggcgtgacattgggcaggtggtgcgattccagtggcgaggcggacttcggtattccactgcacccgccgctgaccgctggaacgcgcttcaaaatcggtgccggtggcagttgcgatggtgagggacgaaagaggccgacactcgttgggtgattcagtgggtcaccgggttgcgccttcggtattgccaatcgaagagtttgccgcgcagctagccttcttccaggcgcatatttatttccaggcggcgctgttttgtcagcgctctcagcgtggtgagattgcgcagtggtgggcgccagctgtggtgagttcattatttgattttcggtttgtttttgtcgctgcctttctttctatagatactttttgaggcacttgttattgtttatagctcttaaatatttcgctgtaaaatgttttcttcatttagtagtagtaattattgttgagattgatttaggtttcatataattaaattgtgtgcattgtataaatgatacaaagtagtttcttgtttgtttttaatttgtacacgtttgtttattacgacatccgtaacaatttattttagtttatttgtcgtttaacttcggtctgtttaaacgttttttcattgttactcctctttaggcacttgttaatttatagcacttgctgtcaacgttttttatcaatgaattgtccgctgatattgcctggcgcgttcacgggaactgcagcgattgcataattttatatgcacaagccaaatcaaataaagtaaaataaaggctaagcagtactataaataagttacaatggtcgtagttgttgatattgcagtttcttggaacgtgccaatgttgctttaatttatactcattttcatttgacccagttgcattcaataccatagaattattttttttttttgagatgataaaagtgcgcaggattgttttacgcggaaattgttatctgccaagttttcaattgtgtcacacacttttccacggcgctttaacaaagcattttaattttctacagctgaacttgagaattgctacgtggtggtcgggcaaatgtgaaatctccgacaatgagaaatctccgtccaattttcgtgactttgcgtgggaccggcgactataaaagccacacgccatttaattctcgggttaatctgtaataaatatatacacacatatggtcatcagtatatagacatagcgaaattcgttttagttaaattacttggaaacgtgaatgaattctagactttatttgtctagaagattgtgggttgaaagatcgtctgaattaagagtgcccttg

SEQ ID NO: 32180 - DNA, 513 bp, DROSOPHILA
atgaactcaccacagctggcgcccaccactgcgcaatctcaccacgctgagagcgctgacaaaacagcgccgcctggaaataaatatgcgcctggaagaaggctagctgcgcggcaaactcttcgattggcaataccgaaggcgcaacccggtgacccactgaatcacccaacgagtgtcggcctctttcgtccctcaccatcgcaactgccaccggcaccgattttgaagcgcgttccagcggtcagcggcgggtgcagtggaataccgaagtccgcctcgccactggaatcgcaccacctgcccaatgtcacgcccaccaacgcgcacacccgtttgggctatggcatgcagggcgcggggggaggcagtagctgttccagtgcctcatcagcatccaattttctgggcgtgcgcaagcccagcctgaccttgaactcatcggatatccggaacaacaacgatctgttcgccttccccaaggacatgtcgcctgtgatgagtggtaagtga

SEQ ID NO: 32181 - protein, 170 aa, DROSOPHILA
MNSPQLAPTTAQSHHAESADKTAPPGNKYAPGRRLAARQTLRLAIPKAQPGDPLNHPTSVGLFRPSPSQLPPAPILKRVPAVSGGCSGIPKSASPLESHHLPNVTPTNAHTRLGYGMQGAGGGSSCSSASSASNFLGVRKPSLTLNSSDIRNNNDLFAFPKDMSPVMSGK

SEQ ID NO: 32182 - DNA, 3524 bp, DROSOPHILA
gaccagccagcgaccacccttgatgttggcttcatcctcccacatgggtctttgggagtagaggatttaagttagcatctctcaatgaacaatgatttattcgtactttatgcccttcttgaacacggagtaatcgcatccaatcttcagctccgctggggtcttgatggtatggtacaagctccagaaggtctccacactgtcaatctcggtaatctcgtttagcatgtccttccagtgcttggtgcgatcgttttccaaataccacaaagtccacacatgctccaaaggatgcttgtactcgacttggtatatctcttcatcgataggttctgggctattgctctccagtggaacaccttcgtggtgatgatgatgcttatggatactattcagctgatgttgctgatcctgctgcttcataatatcaaaactttgcacttgtgcactggccatgttgttggttgacttgttttttttttttcgatacgaacaggtaaccttaatttatttgctgacggctgtgttctcaacgaattttgtcgcgattcgagtgggaattgcttactaataaccaaaaatactttagcacatttttctagacctaaacgaaacctgtcgaaaagaaggaaatgaaatgacaatgacacctgggtgtaagcatactatgctggttttttcttttaatataaattatttttattcatttataaatactgcaaaacttaagacaaatcaatttacatattgttaacatagaaatgcgcgcttggtccttaaaaaaaaaaataataacatacaaaatgaaaatgtatgcactctattccaatggtcaattaaacactaagcggaggcactagagaaaacaaatcgaaacagctacggggtgttcaaaataaaaaaaaacacggttttcgtaaccatatttgaaaagattctcaattcttttagaaatacgttaataaattatctcaaggctggttttgaatcatccacccgtctagacccataaaacagcggctgcatcctcgttggacaaagtggagaagcgctggtagcgattcgcattgcgataggttttcgagggcgatggagcggttgatatctgagcttgaacctgtacttgaacttgagtctgattttgcatgggcagccccaccatatttaatccggactttagtgtggagttcctgctgtccgaggacatggacaggcgtcgctggtttccattcatcaaggtggaactcaggggcaagccgacatcgtgaaaggagctaatcgaactgaagccactctcatcctcggtactggaaccgctctgcttattgctggtggttttgttattgctattgctgatggctgtgttgctggcggtggtctgtgtctgcgtctcctcatccgtttccactttcgaggaggaggatgccgtcgacgagatggtggaatgcacggaactgtcggtggagctgcgcaacgatagcctcgagtcgcgcatgttgttggcccgcagaaagatgagttccgcatttgatttcccgcccggtgatggagtctccagtgtggcactcatgatactggtggaattgtgcaatggtggcgtcagtagtgtcatcaccgaactggttttccccttgcataggcggtgatttcccgagggcagcgatgaaatggaagcgagcgagtggcgcggctgcgtgagatctggttgctgttccgaggtgtgcaaaagattccttatggttctggccaaacgaaaggcctcctgattcagcttttcctcggctgcctcaggagccgatagacgtgacttgcaaccgccactgcctccagacttcttcggggatcgacgcctttggcagagagaagacatttcgttattaattgtttgaaaattattagcactgctattgatctccccttaccatgtaaaatccttgaaggcattatagcttccagctggtgcaatcgtctcgtaattgtgctcctcgtccatggcatgcattgatttattcaacatcaaattggtgctgctccgggcgcgtagatatgaagctgatccgccgctggaggcgtcatcatcccgagcatcgctctgcagggaggtgttgcccactccgtggacatgatgcagactcttggagcgggcaatctgctctccattgcgttgggtctgctggagttgttgctgcaactggtagcgctcaaagaagcgggccacctcctccatcaccgctcggtacatctcgcaattggtttcggtctgaaatttaggattataaagtgatttagaatacttagggattgataagtggtagtttttacgcataatgaagatagattagatagatattgtatctttctttgggaatgtaactttagaaacgtgtggcccatattttaggtgagctttcagctcttcatgtaaatctcattcaatcgacctttctccggctaactcagcttgtatttcccctccaaaacttacagctttgctccaatgtgccaggtcattgctttgacacattgataatgcatttgaaccgatgactttaatttattatttatgttaattgtaaatgattttgcttggcagcaaacatttgtagagcagcagcatcggcatcagcatcatcatcagcctataaaaactttcacttgattttttatcgcgcccctttactctgcgcgcatttctctacttcattgtgctgtgggtctttgggccatatcagcatcattggccaagttgattgggggggaatgtcgcttttggttaacttctgtgggccaaattgtctaattatcaaatgccattcgagtctatggcgcttgccaaattggcagagacctcaaaaaggcgttaagattgccgattgccatcacctggcaggcaggcacacgcccacctcccgggccatttgaaatttggccaaaacgggtgggcatgcagtttatatgtacatatatatgtgtgtatatctgctggttttttggggaggcttcacacgatgccaaaatagttggtgtctggctgattatgtaagttggcgatgcagtcgttgctattgctattgcaacgcttggaaattgttgctaatttttcattggacgtttttccgttttcggaggttttcctactgcgtgttcgccagaggttttcattcgaattacgaattgttttcgtgtgtctgagatttatttgaaaatgatgtggaaattgttgccggcgcgcactgctgctgctgctgctgctgtatttgatttcgattttgttatgctttgtttaatttcattaatgcccaaagtgtttttagccatcgtcgagcaattggagctgagaggattcgggtacgaatttttccgattccgattcggactcgcttggcctgccagcagcttcccattgaacgcatttcctggctacaccggtcggtttagtctgggatcttaccggtgcataaattaaatgcggttccctcccatcgactgcatcgtctactcaatcaatcaatcaatcaatctcg

SEQ ID NO: 32183 - DNA, 1227 bp, DROSOPHILA
atgtgtcaaagcaatgacctggcacattggagcaaagctaccgaaaccaattgcgagatgtaccgagcggtgatggaggaggtggcccgcttctttgagcgctaccagttgcagcaacaactccagcagacccaacgcaatggagagcagattgcccgctccaagagtctgcatcatgtccacggagtgggcaacacctccctgcagagcgatgctcgggatgatgacgcctccagcggcggatcagcttcatatctacgcgcccggagcagcaccaatttgatgttgaataaatcaatgcatgccatggacgaggagcacaattacgagacgattgcaccagctggaagctataatgccttcaaggattttacatggcgtcgatccccgaagaagtctggaggcagtggcggttgcaagtcacgtctatcggctcctgaggcagccgaggaaaagctgaatcaggaggcctttcgtttggccagaaccataaggaatcttttgcacacctcggaacagcaaccagatctcacgcagccgcgccactcgctcgcttccatttcatcgctgccctcgggaaatcaccgcctatgcaaggggaaaaccagttcggtgatgacactactgacgccaccattgcacaattccaccagtatcatgagtgccacactggagactccatcaccgggcgggaaatcaaatgcggaactcatctttctgcgggccaacaacatgcgcgactcgaggctatcgttgcgcagctccaccgacagttccgtgcattccaccatctcgtcgacggcatcctcctcctcgaaagtggaaacggatgaggagacgcagacacagaccaccgccagcaacacagccatcagcaatagcaataacaaaaccaccagcaataagcagagcggttccagtaccgaggatgagagtggcttcagttcgattagctcctttcacgatgtcggcttgcccctgagttccaccttgatgaatggaaaccagcgacgcctgtccatgtcctcggacagcaggaactccacactaaagtccggattaaatatggtggggctgcccatgcaaaatcagactcaagttcaagtacaggttcaagctcagatatcaaccgctccatcgccctcgaaaacctatcgcaatgcgaatcgctaccagcgcttctccactttgtccaacgaggatgcagccgctgttttatgggtctag

SEQ ID NO: 32184 - protein, 408 aa, DROSOPHILA
MCQSNDLAHWSKATETNCEMYRAVMEEVARFFERYQLQQQLQQTQRNGEQIARSKSLHHVHGVGNTSLQSDARDDDASSGGSASYLRARSSTNLMLNKSMHAMDEEHNYETIAPAGSYNAFKDFTWRRSPKKSGGSGGCKSRLSAPEAAEEKLNQEAFRLARTIRNLLHTSEQQPDLTQPRHSLASISSLPSGNHRLCKGKTSSVMTLLTPPLHNSTSIMSATLETPSPGGKSNAELIFLRANNMRDSRLSLRSSTDSSVHSTISSTASSSSKVETDEETQTQTTASNTAISNSNNKTTSNKQSGSSTEDESGFSSISSFHDVGLPLSSTLMNGNQRRLSMSSDSRNSTLKSGLNMVGLPMQNQTQVQVQVQAQISTAPSPSKTYRNANRYQRFSTLSNEDAAAVLWV

SEQ ID NO: 32185 - DNA, 2183 bp, DROSOPHILA
gttacccaagcttaaaaacatgtctataatttgtaaattctttaccgctgatttaatcaattaattgtgtgtgagtacccctaggattcctgtttaagaattttcagaatgcccaagtcacttcattgatggccaacatattattacacaccatatagataccaatcagaattgttagactcaatctggcgcttctcactttaacagtaaggttttcaaaaggcagaaacccgtcagctccattagcaaccttttgtgaggaagtataaaattaatgcagctgttggccaaaggaaatggtcgaaagacaatgaaagacacacgatgaccaaagaccagaacaaaacaatgtatagaaaagtccgtccgactcgcagtgtggagtctataattaagcgtccaagaagaattctgccgcctaattgcgatggagcagacattttgccctcaccggggaggaactatgaagaaaggaaatgcctcgattgctacacaggtaaaatagtgtaaaaatatgaagaatataaaaaaaaattgtttgttataaaaagctatagcagttattaaaaaaatattcttttaagaaaattctaaattcttgcaataaatggattcaatacaatctaactatgccgaatttaaaaataaatttaactaaaattacagtgtaaaagaaccgaacctaacaagcgagtatgtctgatgactgaatcgttccccacatctcgcacatttccatttccattccgatttgagtaaattaagcgtgagaactatttgaataaaaaatgccagagacaggaaaacaggttgatccaaggagggcaacagaagttttcagccaaagcagatcgacatcgagatggggtttgttgtggggttgtttggttgacttggcacttaacacagtttccttcagtcgagaacagaaatcacaagtcacgtttgtgtcttgagtcttttgtttcgttgcggatttcttgctgtgcctttcgctggctcattcactcacctgtttcaattgccaatgcaatgtatccacctgattctgcaatatgacagcctcgacatttagttgatgttgttgttgctgctgctgctgctgctgctgttgttgttgttgttgtggttgttgttgctgctgctggtggtggtgatggtggtgatgctgatgtggctgcatttgctgtggcaagtcataaatgtggctctggatgtggtggctgggtgcggccaagatgttggcatcctgcaaatgttgtcacaaataaatacatatatggataagttaaagaaaaatgccagaaaaatgcgcgttaaattagccgggcaaaaacgaaaattgcaatttgaaaaatgttgtcaaagtgttggacaaccatccagtggctagctgttttgcttttaatgcgaaatcccgcgcttataaaaacccaccaaaagcggaaaggctcaggtgagcagctttaacactagccagaccatccaaacttgtacaattaattagagaaaattatttgcacaatactcgcctcctttgtatttattttgtacgttactccacacactgcatggctttaaatttctggtatacttaacattttccacatttattaaggctgtgaatatagcgagttagctggtcaagcgcataacccgtttgactctggccaaccatgttttcatataactttgctattatttttgcccattttttatgttcacggtttactttttcttttataacatcattttttcaaagactttgacccacaactcgaaattataaatgggggaaacttaaagaagttattgtacaaaatgaaaaaaaaaacaagctgaaaaaacaggagaacattagaccataaaatgtagcttaattacaaaactttagatctacccatttaaattttttttttttacatatttctaactttaagcaaagaaatcgttaaactaaagaccattgaaatgacattacaaaatttttcataattttattttcccaggtagtccattaataaatgatagaaataaagaaaacgcgaaaaagacaattactcttcatgttgctacataaatcatttgaagtctgacctccagtatttggaccaactaatgatgtaatctcttttagcccacttttcacgcccacgctcacgcccactgcccaaaagacaaat

SEQ ID NO: 32186 - DNA, 183 bp, DROSOPHILA
atgcagccacatcagcatcaccaccatcaccaccaccagcagcagcaacaacaaccacaacaacaacaacaacagcagcagcagcagcagcagcaacaacaacatcaactaaatgtcgaggctgtcatattgcagaatcaggtggatacattgcattggcaattgaaacaggtgagtgaatga

SEQ ID NO: 32187 - protein, 60 aa, DROSOPHILA
MQPHQHHHHHHHQQQQQQPQQQQQQQQQQQQQQQHQLNVEAVILQNQVDTLHWQLKQVSE

SEQ ID NO: 32188 - DNA, 3176 bp, DROSOPHILA
atgattttgatttcgttactttagccagcgtccgcgtcagttcgctctatgtgattcagtgttaattttcataatattatgtaatagcatgtgccgccgcctggttgcgattctattctatgccctaccttgcggcgatttaatggatttagtttggctttctacggcttccagggggcactttgcgaaagttcattgaactcgacagtttatataagaactgtgccttaataattagctctgtgctaaggtgctgaacgtcacgtcatcgctttttgggcctggtgatgtgggaaatgcatttcgagtgcgtgatatctgtggcgttctccagtggttaagtaatagatactgtagttcttcttcctcttcttcctgggccacccagtaatccaagagcgcgagagagagggttctctctttgatttgattgtgtgtgtctgtgtgtgtgtgtgtgtgggctgggaattataaaacagaatcaaaagctgcctctgagaatcagtcatttcatttctttggctgctatttattcttttttttttcgagcgttacgtaaaacccctatcttcttcttgttccgcttacttcacattctctctttatctctctcacatacatatatatgcacatatatttctcccggaatcgaaatcaaaatccaactcatattctctttgttctctgtgtgtttttcagatgccttgctgctgctgttgtcaaaacttcttcttcagttcaactaaaacagccaaaagcagagcacgcaaaagattaattgatggcaaatgaagtggtgaattatatataaaataaattcaataaatcaagaagtgaaacgaaggtgaagtgtagtgccgtgatgcggaaaatagatattgtatctgcaagatagattaacccaactgttgcatacgtgactgcaggcagctacgaaaataaataaataataaacaacaaatcgcggtgaatacgatcggatatagccatctatatagtgatgcctctgtcgcagggctattgtcagcaggagcagcaggatcagggtcaccacatgccacccagcagtccgatacagtgttacctgccccacaacgacagccagaactcgctgcactatctgctcgccgaatcctttgccaaggtgggcagtctaccagaagctttcgatgtctacgagttgatagccagcaggcagtttgatggccatgttccgctcgataaactcaatacactggccagtgcactgaccacgcacatccggcaaatgggcggcattgccacgcccacacccacgccaacgcccacaccaatgtccgcagtgcatgtgaagagccccagaatatcggagagactggatatgatgccctggtcaagatatcaccatcagggcaaacaaaatcaggccgagcagggggaattcctacgaggagttggtgaatctatggatgaagccggtgatagtcccctggacatgcactcacccacgcgagaactacgagtgccgagtccgctgcaagatttggaggatttcgatccgctaatgtgtccgctttgcagcgatatcctgcgctgtccggtgaccaccaattgtggtcacaccttttgccggcaatgctgtgagacgatcacgcagtgcaacatctgccaggtgcgattccctcgcatccaggcatcctcgccaggaccaccagtctgcgctctaaccacaaccactgcgagtggtgcgggatccagcctcttcacagcaccctccaaccacaatgcgaacctcagcctgatcagcttccccgtgggctatggcgtccagctgtcgtccagcgtccagcgattggccgcaccacccatgacagtgaccaccaccacagtggcatccacaacggccacggccaccaccacaatggcgtccacttcggcggcagctgccctgggcttgagtgcgtatccctcggctcacggaggaggcattggctccacggccatgaagttcatgccggatgttctggttcgcagattggtggagaagtggtggggtcccgatctgcaggccaagaagatcagcgagaaggccagcagttgcatgcacctcaatctgctcgacgacgctctcaagttttgcaatgccagcttggaaaaatgtgagttacattatgaaacacatatgggggaatcataaaaacatattatggctattattatttttttttttttaaatcgaaatcacctggttaccttcaaatttctgtctgtggagcagcaatccttttcgattcgactgcattgagggggggaattgaaaaatcaataaagggcaggtccgaaaatggcaaggctcaatagacttcatgtgctgacgtcaggcgaatggaatgaacccattggtggcgcaacaagtatcatcgcagaggagaaccgcccacacttaatccaagcgggcccatgcggcgtatgcgtattttcaaccattacttccgagaaactttgctccggcaaatgtcaacttgttactctaattgtgtgtgctcaacgcgacaaatggaacaactggtataaggcaggccaaggacccaattatcaaatatttattgagcaaattcaaagtaaataaaccttgacagaaggcagcgggagcagcacaaacggtatctgatggatacgcgaattgtggcacgcgctgccagctcaactctttccgcactcgcaatgatatgcagagaaatcacagcgttttttttttctaatgaattattaaggcgctgagtcagtcacttgagctcaagaggattttccccttcacttggagggaacacacaagagaaattttgaaactaagaacagctaattaatcacttcaattttcccagagacaattttgttgttgctttgttgcgctgtcttttaacgaaaatagttttgctattttttaaaaaagaaaaaaaatcaaaacaatttacgcacttagaaatccatcaaacaaaatgcttaaagttgaacgaaaatgaacaaaaggcagaaggcaccagacgagaaacacttgactcgtcaagagttcttcttgggcgcaaaacaatggcaatgatggacagaattaggtggaagtggggagaaaaattgaaaaaaaaaaaaaactaaaattaaccagattctgaggtcgaaatttttgttggctggcaatt

SEQ ID NO: 32189 - DNA, 1176 bp, DROSOPHILA
atgcctctgtcgcagggctattgtcagcaggagcagcaggatcagggtcaccacatgccacccagcagtccgatacagtgttacctgccccacaacgacagccagaactcgctgcactatctgctcgccgaatcctttgccaaggtgggcagtctaccagaagctttcgatgtctacgagttgatagccagcaggcagtttgatggccatgttccgctcgataaactcaatacactggccagtgcactgaccacgcacatccggcaaatgggcggcattgccacgcccacacccacgccaacgcccacaccaatgtccgcagtgcatgtgaagagccccagaatatcggagagactggatatgatgccctggtcaagatatcaccatcagggcaaacaaaatcaggccgagcagggggaattcctacgaggagttggtgaatctatggatgaagccggtgatagtcccctggacatgcactcacccacgcgagaactacgagtgccgagtccgctgcaagatttggaggatttcgatccgctaatgtgtccgctttgcagcgatatcctgcgctgtccggtgaccaccaattgtggtcacaccttttgccggcaatgctgtgagacgatcacgcagtgcaacatctgccaggtgcgattccctcgcatccaggcatcctcgccaggaccaccagtctgcgctctaaccacaaccactgcgagtggtgcgggatccagcctcttcacagcaccctccaaccacaatgcgaacctcagcctgatcagcttccccgtgggctatggcgtccagctgtcgtccagcgtccagcgattggccgcaccacccatgacagtgaccaccaccacagtggcatccacaacggccacggccaccaccacaatggcgtccacttcggcggcagctgccctgggcttgagtgcgtatccctcggctcacggaggaggcattggctccacggccatgaagttcatgccggatgttctggttcgcagattggtggagaagtggtggggtcccgatctgcaggccaagaagatcagcgagaaggccagcagttgcatgcacctcaatctgctcgacgacgctctcaagttttgcaatgccagcttggaaaaatgtgagttacattatgaaacacatatgggggaatcataa

SEQ ID NO: 32190 - protein, 391 aa, DROSOPHILA
MPLSQGYCQQEQQDQGHHMPPSSPIQCYLPHNDSQNSLHYLLAESFAKVGSLPEAFDVYELIASRQFDGHVPLDKLNTLASALTTHIRQMGGIATPTPTPTPTPMSAVHVKSPRISERLDMMPWSRYHHQGKQNQAEQGEFLRGVGESMDEAGDSPLDMHSPTRELRVPSPLQDLEDFDPLMCPLCSDILRCPVTTNCGHTFCRQCCETITQCNICQVRFPRIQASSPGPPVCALTTTTASGAGSSLFTAPSNHNANLSLISFPVGYGVQLSSSVQRLAAPPMTVTTTTVASTTATATTTMASTSAAAALGLSAYPSAHGGGIGSTAMKFMPDVLVRRLVEKWWGPDLQAKKISEKASSCMHLNLLDDALKFCNASLEKCELHYETHMGES

SEQ ID NO: 32191 - DNA, 2750 bp, DROSOPHILA
gtcaacatgtaaaagaaaattttcattattaaattaattagtaaaatggcaataggtttataaaattctccctgaaagtattataactctcgttaaaatgaaatagatagtgcttataggtttcggttgagctagaatttccttctttttttttatttaatcaaacattcccagtattaatataatatccatatataagttatatcgtttgcttggtatcaaaaaattgtataaaaaatgtttgcttaacaaattcctggaatcttcttattttggtataaatctggctcttaaaaattgtgtgtgtttggtttgcaaaaatgtttcggtgttggtttaatagtttatcattatttatattctattggtaatattatgtttgctttaagcttcaaattgcgtttggcctgtaatttcttgcaaattgtggctacgggattttttgcactgaaaatcagtgatgaacagggttttaaaatttcagtacaatgtttattacaaagcatttcaaaaaagccattcaaacaataagttcaaggagtttataagaattttactatattaaaagtgccctgtttattaccaaagttgatttccagtgcaaaataaaatcgctagccctccaagttccttttcgataaattcccataattccaattaagccagaaattatcccagtgataaatcatacgccaaatatatatacccctgactgcgaatcggagtcggtcgaatgatcctagtacgcgatcctgcccagacgcgtggagggcaacgaggcgggctccgaattgggaagctccccgcaccgctggagccaactccatgcctggccacaaacgacaccgactccggccaacattcagaagcagttactccggcgcttcgacgtggtcgtatccgtgtccgtggttgcattggtcacggctccactggtggccgtggagctgattgtggaggtcctagtggacatcgctgctggcagcagccgggccgtgttctatgtcttcttcagcggctgcccaactggcacatttgccttgggggtgcgcgacttcttcaccagaaagcaggtgaggaactctatgggcgagggtatcttctggaggctttcctccgaactggagctggacttatggctctcggagcgcgcattgctgcacttgaccttgccactggcgccgggtccggtctccaaggcgtgccgatagtagttcttgcagcacttcttggacaaattatacatgcgcaccgtgcgatcgatgttctcatcgtcctcatcctcgtcagctttgagattcaggcccagaccaccaacacccacatcatgcgagtgggagttgaccatgcccagtcccttgcgagttgtggctgcagtggcagttgcactcgtcggttgctggggatccgatatcgtctggttggtctgctggaccaactgctgtggcaacttcatctgttcaatgggttgaggatcctccacgggcggctcctcctcctccagattgttctgtgagtcatcgtaaaacttatagctgcggtagcgagtatgcctgttgcccgctgtctgggaccagtcccgacccgatcccgtccagtcggtgctggcgggcagggacaactgaatggtgggtgtgcgatagtactggcggtgcggatggaagcccaagccaaagtcatccatgtaggactgtgagtgtatgttgtccagctcgtcggcgacgctcagcaaaaagggtaacgtcgacatggttgttgatacttcgggatttctctgcgttttcagcacaccgtgtttttgggaccaccaaaaatgtaggtatctatgctaggtccgagggattaatctcccctttccgtacacacttctcttccaacaaaactgcacttgtttgcttatttacttttctctatttctctatttcctctgttttgtattatttgtaactttttattttttttttttttgcaaattttccacgtcgcttttcactccggtcaacacgactgcacggactcgaaactgaaacagaactgaaggaaaatgcaattttcaactggcacacgacgtcgcatttatgttcatcgtcatgatgatgatgatgatgatgatggggaaactccttcgtgagtgagagaaagcctttctcacaacgctctctctcgcggactctctctcacactcgcgcgttctctctctctctgttttggtcacgcgctgaggaaaacccgatgcagtcactggatttgggtttatgttttgatttcgctgttgcaacgcggcgtatgcgtgatatttttgttagcgacccgaggcaaggaggtgtatgcgtgatattcggtgggtggctggttgggcggcacgagggattttcccagttcgcgccttattgtcattagttggtgcttctgggcatcgccaactgcatgatttcattttggcctccaacgtctctgccgctttttaggtttcgcgtttttcatgccttttcaagcgcgtccctggattgccgagcgaaggacatcgagaagtgggtggggatgtcctgccgccctgcagccccatttgggtgtgtgtgtgtgtatctgtatctgtgttaagggaggagtgggtggcgaaatcttagtgcgcaataattcatttgttggcacaactgtgagctgtgaaggctgcgtgtttggaaattgccgttaaatcaatttaatttttgctcgttaagtcctgaattaaggatgggaataacgtgtcg

SEQ ID NO: 32192 - DNA, 750 bp, DROSOPHILA
atgtcgacgttaccctttttgctgagcgtcgccgacgagctggacaacatacactcacagtcctacatggatgactttggcttgggcttccatccgcaccgccagtactatcgcacacccaccattcagttgtccctgcccgccagcaccgactggacgggatcgggtcgggactggtcccagacagcgggcaacaggcatactcgctaccgcagctataagttttacgatgactcacagaacaatctggaggaggaggagccgcccgtggaggatcctcaacccattgaacagatgaagttgccacagcagttggtccagcagaccaaccagacgatatcggatccccagcaaccgacgagtgcaactgccactgcagccacaactcgcaagggactgggcatggtcaactcccactcgcatgatgtgggtgttggtggtctgggcctgaatctcaaagctgacgaggatgaggacgatgagaacatcgatcgcacggtgcgcatgtataatttgtccaagaagtgctgcaagaactactatcggcacgccttggagaccggacccggcgccagtggcaaggtcaagtgcagcaatgcgcgctccgagagccataagtccagctccagttcggaggaaagcctccagaagataccctcgcccatagagttcctcacctgctttctggtgaagaagtcgcgcacccccaaggcaaatgtgccagttgggcagccgctgaagaagacatag

SEQ ID NO: 32193 - protein, 249 aa, DROSOPHILA
MSTLPFLLSVADELDNIHSQSYMDDFGLGFHPHRQYYRTPTIQLSLPASTDWTGSGRDWSQTAGNRHTRYRSYKFYDDSQNNLEEEEPPVEDPQPIEQMKLPQQLVQQTNQTISDPQQPTSATATAATTRKGLGMVNSHSHDVGVGGLGLNLKADEDEDDENIDRTVRMYNLSKKCCKNYYRHALETGPGASGKVKCSNARSESHKSSSSSEESLQKIPSPIEFLTCFLVKKSRTPKANVPVGQPLKKT

SEQ ID NO: 32194 - DNA, 3108 bp, DROSOPHILA
ttggctctaggcggtagctgcagcaacaacaccgagtctaacagaagtacaaaaagcgaaaaaacaaagaaaaacccaaggaaaaacaacaaacggtagctgcaaacaagacaaaagacaaacttatcgtttgaattatcggcattcatttgcatttcggaaccctgcgatatcccctcgaatcccctttctccaccatccattaactccggggacattcagcgaaacagagacgaaaatagtagcaaatgaaacaaataaagcgaaaaaacacgccgcgaaatcatttgattcgaatgacaattgtcctgggtttaaagtctaaggagagctgaggggctatatgtacatgtatatctcatataacaaaaacggttgaacggttatactcgccgtttttaaatttaaaaggaatagtttatttgcttttagaatcgatgggttgggttatatagttgtgacacatcaataataaaatgaattgtttagtatgaaaaattatgataaaatactaaaaaatgggtacccgttgttattctatagggtatcaaaaccacacacattctgttcggactttcatgctccatcgctcacttgacttgcgttgccttttacagttagccaccgagggccccgtctataagtcgaaaaaaaaccgttgggccttcccagccaaggaaattagcatgcgcgaggctcctttggtaaaaaaaaaaaaaaaaaaacaacgacgtggggggggggctgaggattgaagggggaggcctggaatgtcaacggcagctgagatttttcctagcttttctccagcgcaaggatttccacactaatgttgttgctgctgcaggaaaacgtgatcgttttaacatttcagcttgttgtccgctggtgattttgagtatcttttagcaattctaatgtttttgttgcttctgcagctgctcagcggagctaagaaaaaaaagatgagggagcggaatggcagtcggttctcagaacgatgccacatgctccaataccgtacgatgagcggtttatccgccgctttcccgactatcgtttgatcgattgtaggtgaattggtcagaagcaactctgcagtgctcctacctgcattctttttcgccagttatgtatttattagatgaaagatttaagtatgttatggaatattaactacaagttgttggagcacaaattaccataaaatctaggttaattgtattatatatatttgtatatgtaatgcgaacaattttttaatagcaatagttacgctttaatgccccgcttcttaaaatatctaatagaatcagtaagattgaagcattcgcattcggtggtgattgtcactcaatatgttcaaatacgatacttatttcttgtacctaatcgtcctgttagatccgcagggtgcccaggaaaataactgccccaaagtttccctgagcgaacgacttgaaaaacgcggagaattcagcctggtcgagtttgatccactgctgaaatttattgtgaaaaacccacataaggaattgctcggcgaaatagaaggtctcgtggggcacacagaaaataaacttcagccaatgaaatcagtgattccaaaccaatcgaaggctttgctaaattatttggatctacatagcaaattggagtatctggacgcagccttgcagaaggcaataaattccctgcaatgctcgctcaaaaacacaaaggtcatgtcaactgggaaaccacatccggaattccagaagttgggttcgaggtatttctacatcgagcggcatgtcaggcagaattggttcgatgccgctgacaaatgccgtaggatgggcggccacctggcgacgccccaagacgaggatgagctgtacttaatccgcaagcagcttgaagccagatggttttggctggacattagcaatctggtcgataaggaccaatacatatccctggccaccggaaaagaagtttcgtatctcaagtggcgacacggagagcccaaaaagagttctacagcaaattgtgcttatttatacgccggagactattacacataccagtgcagtgacagaaactttttcatttgccaagctgtgtagtgtaaggagattgcccttagcatttgatgggacaatcgaaacgatttattgtattatggatttcattgcgaaatgtcccctgaagtattaataatgagtgtaaataaaaccgctagtacgtataatattcaaatgtaaaaaagtaatgactttttcgctacttgctgactttcgatcacgagttgcagatggcaccctacccccgtgataagtccgtctactgaagatctgccgatcgggttaacaagctggccgcgtgcaaatgatgctattaaagtggcatttaaaatttaagttgcagttaaatcgcgccactctctctctctctctctctcatccccctctagcccactcttttgagccgcaaaacaaaagaacaacaatggcaactgcagaatcgatgcactgtagaaaattttgattaaaaactggactttgtaagtcatttttgcaatgtcatcttagcactacaaatacaatataatttccaattgagaatttcgtttttcacagtgtaggcaacatcgacatcggcgacacgacttttctccggataatgttttgcatatgtatgagagccagtaatttgcacttgtgtgccctgccccgcgactgtgttggtgcttgagtatctgtgtgagaccatctaagatgccgcctggcgatgcacgctgctcgtttagatcgtcaccattgccagcgtctgcctgacccaactaacaacttgcaacttgcaaccaggcactggcaaccaccgccagcgaccattgaaagcaccagcaacattgtgcttaaaaccagtgaaatgttttgctcttggcactgctagaaaattcgccttaaaatcacaaaatactaactaactgactataaactatttaaattgcaatcttgcaatgcgaggttctttttccgagtgcagcttacttagttgtcttttcttcctcaaataatcaacagcaccgtagcaacaaatgcaattggcaaatgtgttacggtc

SEQ ID NO: 32195 - DNA, 774 bp, DROSOPHILA
atgccacatgctccaataccgtacgatgagcggtttatccgccgctttcccgactatcgtttgatcgattatccgcagggtgcccaggaaaataactgccccaaagtttccctgagcgaacgacttgaaaaacgcggagaattcagcctggtcgagtttgatccactgctgaaatttattgtgaaaaacccacataaggaattgctcggcgaaatagaaggtctcgtggggcacacagaaaataaacttcagccaatgaaatcagtgattccaaaccaatcgaaggctttgctaaattatttggatctacatagcaaattggagtatctggacgcagccttgcagaaggcaataaattccctgcaatgctcgctcaaaaacacaaaggtcatgtcaactgggaaaccacatccggaattccagaagttgggttcgaggtatttctacatcgagcggcatgtcaggcagaattggttcgatgccgctgacaaatgccgtaggatgggcggccacctggcgacgccccaagacgaggatgagctgtacttaatccgcaagcagcttgaagccagatggttttggctggacattagcaatctggtcgataaggaccaatacatatccctggccaccggaaaagaagtttcgtatctcaagtggcgacacggagagcccaaaaagagttctacagcaaattgtgcttatttatacgccggagactattacacataccagtgcagtgacagaaactttttcatttgccaagctgtgtag

SEQ ID NO: 32196 - protein, 257 aa, DROSOPHILA
MPHAPIPYDERFIRRFPDYRLIDYPQGAQENNCPKVSLSERLEKRGEFSLVEFDPLLKFIVKNPHKELLGEIEGLVGHTENKLQPMKSVIPNQSKALLNYLDLHSKLEYLDAALQKAINSLQCSLKNTKVMSTGKPHPEFQKLGSRYFYIERHVRQNWFDAADKCRRMGGHLATPQDEDELYLIRKQLEARWFWLDISNLVDKDQYISLATGKEVSYLKWRHGEPKKSSTANCAYLYAGDYYTYQCSDRNFFICQAV

SEQ ID NO: 32197 - DNA, 2810 bp, DROSOPHILA
gtagctgctgatggctaagcgatgtcagattgtccagctgtgcatgtccaaccttgtggcacgggcactgttcttgcctcgacgacgcgaattcgactgaggaggattttggatttccacggggaacagtgacagtgcgtgctgtccgtcgacagaagccgtagaagtcgaccacagtccactggcactcgcacactcgcgggctccctacgaacaggggtatatactatgtgcctaagaggtctgacccggtctagcctcttggacagtcgttctagccgggcttgttatgccagtggcggtgctcctcacccaaactggcccaagtgggagacatagtgagctcataatttatggcaactcatggtgccttcggaggatgtgcatagctggaaaatgtttaagaattctacataagactataaaccactatttttaccattcatctgcctttgcacattataaaaacaatattctttaaacaagaccatgaaacggaaatgtcatccatttgggggaaatccgacaagtaaaatacaatcggaattgcatttcccacagctcctcactcaaaagtatgctatggaaaaagtttcggagccgtttcggaaaccaaaaatccagaaacccaccctggtcaacgttatcgatgggaggagatcggattgccctttgcctctgcacacatgtctgggtcagtgggcttcttttggctactcccaccgcccaaagttctccacctctgccggcacttgaggccttaaagccatttcccccattgaagcattgaaagcagcagaggagtataaatagccgagggactcaaccccatcagccgggccacttgagcttggcatggcttgccattgttgtggtgtcaactgtggagtccattgttccatcctgtccaggtgacgaaccgtaatggatgctgctgctctcatctctggcacaaaaggtaatccgagaggcggcttttgtcctaaatggatataaaagtatggcgactccttggccagagctgcagaaggagtacagcgctggtcaggcacagatcgagcatgatgccgtgggtaagtttcatctggatgagagccgaaagatatagaaacgaaattacaaaggagggcgcacaaggatatactccgaactgaattcattttaaaacccttccgttccaagttgcccatttccattatggcaatggcgctgcttagcctgacaaataaaggaatcgccagtcagtacgccagcgatgaaggtttggacgagatggtgggtctaaggagtctggaacaccgcgcggaggagcagcagcccgatcgcagtacatcgaaaatgctcagtgccctattcggattcagtcccagcactccacatcccacagagatggcgatggtcatgccccatcagctgccgcccatgtactataacgatttctatgaggatctggtgaccaccaaacgcaatgatgtccattccgcaggctgcgactgcaaagttacggttcgttgggataccattcagccgcgtcagatgtttataattattttgttattcccagaatgagctcgtggatctgggtggtctgcacttccctcgctttctgatgaatgccgtttgcgaatcgggcgctggtcgggatctggccaagtgctcgcatggatccaattgcaggccactggaatataaggtaaaggtcctggcacagacctctcagtccgatcacccctattcgtggatgaacaaggatcaaccttggcagttcaaaacggtcaccgtaactgccggctgcttctgcacaaagtgattgaaaggatgtgagcaactatcgtgaatgtgaattaattgtatattaaagcgccaaaaagacgtcaaagttgctttattgtgggagagattcgatatgaaacagattgttatttttaaggcattcttttgattcttatatgtagcttaatgttcatgtttgagctttctcttagataatttgtctaggatatgtcgtggatgcaattcgtattcatcagcaaaattcgaaataaagcaataatcaaaatagctcttgttgtcattgatgcacgagtataaaaactgtcccataaacgtaaaaaatctaaaaaacttgaatccagagaaacaattttgttacaaataaaatgtaaagtattagaaaagaaacttcgcttcgcaaggcatcaggatagtaaatggcattacttcccaactgagtcaaggcactttgacggtgtagttttaaatggagtgtggaatctacttagcttatggacggcttcgtttaaataatacaaaaagcgaaatgtgcttggtatagcaaaggctcttgaggctaagagcgtggaatgagccaagatccaagtcctaatagtgcggtgagcagggttaaacagacaccatagccttgtcttgaaggagcgccactctgtaacaattccgattagttggtagtcccagttaaatgtactatctacccacaatgacaaagtagttgcaccgatctcccttgcagcactcgttgcacgcccaatcctcgtaccagatgtgggtgcagtacagctgcatatagcgcttcctcttggactggcactgctccttggtcatgcacctcttggacacgtagtattgcttaagagcaccctccgagaagtacggctgggatccccagcggatctccgttccgcagacgttttcaaagggctcgcaggtcttgatggtgttcaggcacttctccgtgttgcccgtctggttggagcagacatagcactccagaccggccacgaaatttacta

SEQ ID NO: 32198 - DNA, 639 bp, DROSOPHILA
atggcgactccttggccagagctgcagaaggagtacagcgctggtcaggcacagatcgagcatgatgccttgcccatttccattatggcaatggcgctgcttagcctgacaaataaaggaatcgccagtcagtacgccagcgatgaaggtttggacgagatggtgggtctaaggagtctggaacaccgcgcggaggagcagcagcccgatcgcagtacatcgaaaatgctcagtgccctattcggattcagtcccagcactccacatcccacagagatggcgatggtcatgccccatcagctgccgcccatgtactataacgatttctatgaggatctggtgaccaccaaacgcaatgatgtccattccgcaggctgcgactgcaaagttacgaatgagctcgtggatctgggtggtctgcacttccctcgctttctgatgaatgccgtttgcgaatcgggcgctggtcgggatctggccaagtgctcgcatggatccaattgcaggccactggaatataaggtaaaggtcctggcacagacctctcagtccgatcacccctattcgtggatgaacaaggatcaaccttggcagttcaaaacggtcaccgtaactgccggctgcttctgcacaaagtga

SEQ ID NO: 32199 - protein, 212 aa, DROSOPHILA
MATPWPELQKEYSAGQAQIEHDALPISIMAMALLSLTNKGIASQYASDEGLDEMVGLRSLEHRAEEQQPDRSTSKMLSALFGFSPSTPHPTEMAMVMPHQLPPMYYNDFYEDLVTTKRNDVHSAGCDCKVTNELVDLGGLHFPRFLMNAVCESGAGRDLAKCSHGSNCRPLEYKVKVLAQTSQSDHPYSWMNKDQPWQFKTVTVTAGCFCTK

SEQ ID NO: 32200 - DNA, 2930 bp, DROSOPHILA
attccgattagttggtagtcccagttaaatgtactatctacccacaatgacaaagtagttgcaccgatctcccttgcagcactcgttgcacgcccaatcctcgtaccagatgtgggtgcagtacagctgcatatagcgcttcctcttggactggcactgctccttggtcatgcacctcttggacacgtagtattgcttaagagcaccctccgagaagtacggctgggatccccagcggatctccgttccgcagacgttttcaaagggctcgcaggtcttgatggtgttcaggcacttctccgtgttgcccgtctggttggagcagacatagcactccagaccggccacgaaatttactaaaaatatgttatttattcgagaggttctaaatattttaaaggtgtggcccaaagtcgggcttcaaaaatgaaacttaccttgcgaacacaagtaaacagcggcgactagcaccacagctatctcccacgatttcatcgtatatctggagtaattaacgcaatcggagccgataagctcaaagtaaataaacaagtcaaattaacaaacaaaaccactcccaaaaaaacattagcaacaaattagaagaacgcgcgttctgcaacaccaacttcaaggcgctttgcagcactaaacatggccaagtgctgccacctgtggcgcttgcttattaataacttttaagtggataaataattgagagacacgttgtttgaaatatttataaaccaaaaagaattaataataatttttttaacgtacctagctaatagttcattgtcgccttgaaatgattgcatcttgctaacatgttcccgccaaaaaggccagaccctggcgggtagccagccggttagtcatcactggttcagagcggtaagtgcgcgctacgttttctgtgcgacatttgcaaaggcaatccgattgccgccttcagaggtgctgctcctggaccagactactggactactaccgcgccgtcatggccaagagtgatcaggagcttcccgagggatttcgccagctaaagacacaggttgcgggtcacacattcgaggaaagcaacgcggaggcagtgggtcttctgcaggactcgaaggcgggatgcgtactgaagcctctggggaagccggagtgcggcgaacgggagctgcgcttctatgagtcactcgcagaggcaggtgcttcaggtgataatgacctcctggcgctgctccgcggtcacgtcccccggttttacggccccctaaaactggttgtgaatcggcgcgagcgcacgttcctgcgcctggaagacctcacgcgatcgtacgcaaagccgtgcgtcatggacgtgaagatgggtaaacgaacttgggatccagagtcctcgcccaacaaacgaaaggttgaggaggccaagtacgttatgtgcaagcaaaagctgggcctttgcttgccgggattccaagtgtaccttcccaaggaggagcacactcaggagaccacaatcctgcgccacgggaaggactacgggaagagcttgaatgtggagggattcaagcaaactatggccctgtttttcaatgccagcacaagtgattccaagagcaggagagcgggctgtgagttgcttttgaaggaagtactccgccagctgcaggagatcctagcgtggtttcaacggcagcgcctgctgcatttctatgccagttctttgctcatctgctacgactattcaagactggctgatcccccaaagccgttgataaacggctaccaccaaaatgatgatgaccccgccacttgggtgcgggtcaaaatgatcgactttgctcatgtttacccggcagaacagggcttgccggacgagaactacatgttcggtctccagagcctgatagaagtcgtccaatcaatactccaccgatgatgatcaaagcggaccaagaccactcaaagatgtagtagaagttccaatctcattgcaatgagacacttttgtattatcgtctaagccaaatgattagtccacagtagatacccatccgtttaaggaacacgggcggagctactctaaacgtagaataaaaccagattttttagaaattgtgtatgtacttcaaatcgaatttgtgaatgggaatgagaggtgcgagatgggactatgatgatgactcattgcgaggcaattatttcccatgaaatgattccacggatatgagaaatggatgcgcattggcatgattcgtctttctgtaatattacttcatatacaaacaaacaataaatctatcttatctgtttaaagataatagaagtcgtcatgcgattacgattagagattattcatgtaataattgaagatccaatgattttctgtattttacggcaggaaagatcaattaagaacaaatggtttgaatagtttggatttatatattggtatcttagagaatcctaccactagcagataagctattacaatttatagcgtgtagtccaactcgtaccgctcgtactggttcttgggatcattagtaatccgcggatagccggcgatcagagcgtcctgacctccaatgtacagcgaattgtagatcttccagtaaacgtctctcactttgcgagcggggtggaaaagtccctgtagcgtatattgcaggatcttaatgggtcccagggacacccttaaaccgtccacggaatccatgaaggcttgcacgagatggggggacgtctcaaaaatgttgggccacacgtagttgagaagatgggtcaaagcatcctcgcagccgaaaccatacactcccagtgacatatgcttgatggcagagcaggcggtttgccggtggactagatctcggtccatgagggcatcttccagaagtggacagacggcgtatatgtaatccttgcccatttctccgatg

SEQ ID NO: 32201 - DNA, 876 bp, DROSOPHILA
atggccaagagtgatcaggagcttcccgagggatttcgccagctaaagacacaggttgcgggtcacacattcgaggaaagcaacgcggaggcaccggagtgcggcgaacgggagctgcgcttctatgagtcactcgcagaggcaggtgcttcaggtgataatgacctcctggcgctgctccgcggtcacgtcccccggttttacggccccctaaaactggttgtgaatcggcgcgagcgcacgttcctgcgcctggaagacctcacgcgatcgtacgcaaagccgtgcgtcatggacgtgaagatgggtaaacgaacttgggatccagagtcctcgcccaacaaacgaaaggttgaggaggccaagtacgttatgtgcaagcaaaagctgggcctttgcttgccgggattccaagtgtaccttcccaaggaggagcacactcaggagaccacaatcctgcgccacgggaaggactacgggaagagcttgaatgtggagggattcaagcaaactatggccctgtttttcaatgccagcacaagtgattccaagagcaggagagcgggctgtgagttgcttttgaaggaagtactccgccagctgcaggagatcctagcgtggtttcaacggcagcgcctgctgcatttctatgccagttctttgctcatctgctacgactattcaagactggctgatcccccaaagccgttgataaacggctaccaccaaaatgatgatgaccccgccacttgggtgcgggtcaaaatgatcgactttgctcatgtttacccggcagaacagggcttgccggacgagaactacatgttcggtctccagagcctgatagaagtcgtccaatcaatactccaccgatga

SEQ ID NO: 32202 - protein, 291 aa, DROSOPHILA
MAKSDQELPEGFRQLKTQVAGHTFEESNAEAPECGERELRFYESLAEAGASGDNDLLALLRGHVPRFYGPLKLVVNRRERTFLRLEDLTRSYAKPCVMDVKMGKRTWDPESSPNKRKVEEAKYVMCKQKLGLCLPGFQVYLPKEEHTQETTILRHGKDYGKSLNVEGFKQTMALFFNASTSDSKSRRAGCELLLKEVLRQLQEILAWFQRQRLLHFYASSLLICYDYSRLADPPKPLINGYHQNDDDPATWVRVKMIDFAHVYPAEQGLPDENYMFGLQSLIEVVQSILHR

SEQ ID NO: 32203 - DNA, 4388 bp, DROSOPHILA
ggtgctgcgcaacgtggttgtttttggaggtgaccgatttttatagctagattctaaccaatgcacggagagctctgtacagtatctttcgataacgacactgactttcgatacgtattatcggctttgaattgattgaccgcgaacatttttttctccatactgtatgaaatagttttgatcctagaaaggatccaaaatctatataaggcgacaaagatgaacaaaagtagtagatgttttatttaaatttgtacgtgtaactgcaaaagttaaaaccaagatgttaagttgtcagattatccaattctttactctcttgacttcataatctaaaattaaaatgtagtgtttttatttggtttgcacaaataattctgaaaccatttactaattttattgattggcaaaaatggatataatttgcaatgcattcctgaacttaatattctctcttatcaaacatcccacattgcgagttattctgcgaccgcaactgccaggagaaaagttcgcattctattttggggacccatcccatgtaccatctgcggacccatcccactcccatcccgagaggcgtctgcggttcaacagccgcttgggcatcgcctcatgccgagaattcgcacaaactaaactgaagcaaggcagaccaaaggcatcggcatcggcataggaaatgtgcagctatttttaagcactggggcgacatttttctttttttctgcccgactcgcctgcgaaaacacacaaaaatctgcgaaaaaaagagcaggccgcacgatattaataaaagcagcgctgctgctgcgatggattggttggattcgggtggttccgctggcggtgggcctgtgcactgcattcgtgatttcggccgtggagttgcacatcgtgtgtctgtctgtggctggccaaaagtgaggtgacttcttggccattttatgtaatatatatgcggtagataacgagtccttctccccgaccagatttcaacatgaatgtggagaagctgaagcgtctgcaggcccaggtccggatcggcggcaagggcacgccccgtcgaaagaagaaggtcatgcaccagacggcggccaccgatgacaagaagctgcagagctcgctcaagaagctgtcggtgagcaccatcccgggcatcgaggaggttaacataatcaaggacgatctgaccgtgattcacttcaacaaccccaaggcgcaggcctccctttcggccaacacctttgcggtcacgggtcacggcgagacccggaaggtggtcgaaatgctgcccgatatcctgccccagctgggccaggagacagtcgtccagctgcggatgtatgccaatgccatgaacagtcaaaagggggcgccgggaagcggagatggacctctcccagcggaggaggatgacgatgttcccttgctcgttggcgatttcgatgaggtggccaaggtggaggcgaccaagcagccagtacatgagccaaaggaatctgcggagatcaaagccaaggataagcagcagcagcagcctaagaaggaacagaagcagtcagcgaaagtgccggagacaaccaatcccagcgagaatcccaaagagaaacaggaaaataagaagggtcaggccaaaaataacaagaagggtgatccacagaccaacaaggacaagaccaataaaagcaaggatcaggccaagggtcagcctgctccccaagccaacaaggaaacgacacaggctgcacaagctctcaaacagaatccttcgaagcccgctgtacagcagaaaaaggatcaagtgctcgcagttgaccagaagattgaagccaacggtgcgattcaaaaggcgcaacaaccaaagcccgccgagaccaagtccactgaccagaaagttgaacccaaatcggcagagaagcaggtggacaaggccaaacccattgaacagaccaaaaccaaagagtccaaggtggaacatccgaaaccagctcaaaagcaattggatcagaacactcaggccaaacccacggcggagagaagtgaagctaagccagtggtaccgacaccagaaccccagaagtccgctcctcctgctgtccagactctcgcccagattgtggctttgcctgcggagaaaccagccaatgaagctgttgccgctcccaaagctgaggagcagaaaaaagactcgtctggtccagctaaggtagagccagcgattactccatcggcaccacaaccagtcaccactgctgagccacccaagagtgctctcaaacaggactcacctcctaagagcgctcccaagcagggatccccaccgaagaatgttccaaaacaggaatcaccaccacagagtgctcccaaacaggattccccaccaaagggtgctcccaaacaggattccccaccaaagggtgctcccaaacaggattcaccaccaaagggtgcccctaaacaggattcagcgccacaacaaaagactccaccaccagttaaacaggaagtagcaccagctaagcaggatgaaccaccagctaagcaggatgcaccaccagctaaacaggatgcaccagttccagttccagaagttatcaaaacgctagcaccggaagtccccaacgtttctcaggcacctgcacaacctcagggtcaggctgctctcgcttctgaaaaaccagcggatgcgccaaaggccattgaggaaccgaaggctgcacccaagaaggaatcaccaccacccacaaaaccagtgacggcaacagttccggtagcacctgccactcctgctgaggcgccatctcctctggctccctccactccgccatcgactcccacctcggtgccgccctctgcagcgacagtgactcctccatctcccgccacggtgactcctccgtcgcctgctgtagttactccgcctcagaaacagtcggcggctccccaagcgggaatcaagaagcaggaggcaggaacgaagacaaaacagcagcagccagccaacaagccccaacaaccgcaaaagcagccaccaggaggagcaggaggatcagctgggccaggagggaacaagggcgtgcagaaacagccgaaccccaatgccaagccagcagttgctccaaagccggcccaggccactccaaaacccgctgctgcttctccaaaagcatcccccaaccagacgaatccacaacaacagcagggaaaagcagctaacaaagcgtctcctccaaagcaaactggaccaactggggggcagcagaagtcggcggcgaacgcctcgaaggccacagcctccccgaaatcggctgcatccccaaaagccacctccccgaaggccggaactcctaccaatcctgcttccgcctctgggggtcccaactgatcctccttcagtctattttctaatcggcgcccttgcatttcaaactcactcgcattttcagagcccattttcgccttcgttaatctctgatgaacccgggtactaaccgttttttgattatttgtggcctttacatttttgaataaaattatgatttaacaaagactgaagtgaatcgagaaattctttctcaatatctttggttattccattgcaatgtcacaacaaattgtagcctattaatcgttctcgagaatagcattgaaaattacgattctttaatttattattaacacataacacatagggaatttttgaacgtgcagcagcatatgatactttgaatttagcgccccattggaggcactgcttatcgatattttatccaactttgcccagccctggttcgataggtcggaaagccctgcaatttgcatgaaagacacccaaaattacttgtttttcgtttatcctgggcttaactcgacttagcgtggctgctagagggcttctcctcgtccttgggcgcctgctccttctccgggttcagcttccagatggcgtagttcagagccgtcgcgaatcccagccaggcgacgtagggtacgaagagcaatccagcggtcttgttcactcggtagaacagaacgccgcaggcggacgcggcggccgtgagtgcaactatgtcaataaggccctggtggatgaagcggattagacataacacctgggcttggtgatatcagcagtactcacgcccttgatgttgtgctgcccgaagaaaatgggcgtccacgcccagttcaaggccagctgggtgccgtacgcgatcaggggcagtttggccgcctcgccggcgaagcctccgccatcacgccacaccaggtaggagccgtagcccattcccgcgtacaaggagatccacatcggcgcaaagaccgagttgggcggcttgaaggacgggaacttaaggttggcgtaccagctctggagatgctgc

SEQ ID NO: 32204 - DNA, 2388 bp, DROSOPHILA
atgaatgtggagaagctgaagcgtctgcaggcccaggtccggatcggcggcaagggcacgccccgtcgaaagaagaaggtcatgcaccagacggcggccaccgatgacaagaagctgcagagctcgctcaagaagctgtcggtgagcaccatcccgggcatcgaggaggttaacataatcaaggacgatctgaccgtgattcacttcaacaaccccaaggcgcaggcctccctttcggccaacacctttgcggtcacgggtcacggcgagacccggaaggtggtcgaaatgctgcccgatatcctgccccagctgggccaggagacagtcgtccagctgcggatgtatgccaatgccatgaacagtcaaaagggggcgccgggaagcggagatggacctctcccagcggaggaggatgacgatgttcccttgctcgttggcgatttcgatgaggtggccaaggtggaggcgaccaagcagccagtacatgagccaaaggaatctgcggagatcaaagccaaggataagcagcagcagcagcctaagaaggaacagaagcagtcagcgaaagtgccggagacaaccaatcccagcgagaatcccaaagagaaacaggaaaataagaagggtcaggccaaaaataacaagaagggtgatccacagaccaacaaggacaagaccaataaaagcaaggatcaggccaagggtcagcctgctccccaagccaacaaggaaacgacacaggctgcacaagctctcaaacagaatccttcgaagcccgctgtacagcagaaaaaggatcaagtgctcgcagttgaccagaagattgaagccaacggtgcgattcaaaaggcgcaacaaccaaagcccgccgagaccaagtccactgaccagaaagttgaacccaaatcggcagagaagcaggtggacaaggccaaacccattgaacagaccaaaaccaaagagtccaaggtggaacatccgaaaccagctcaaaagcaattggatcagaacactcaggccaaacccacggcggagagaagtgaagctaagccagtggtaccgacaccagaaccccagaagtccgctcctcctgctgtccagactctcgcccagattgtggctttgcctgcggagaaaccagccaatgaagctgttgccgctcccaaagctgaggagcagaaaaaagactcgtctggtccagctaaggtagagccagcgattactccatcggcaccacaaccagtcaccactgctgagccacccaagagtgctctcaaacaggactcacctcctaagagcgctcccaagcagggatccccaccgaagaatgttccaaaacaggaatcaccaccacagagtgctcccaaacaggattccccaccaaagggtgctcccaaacaggattccccaccaaagggtgctcccaaacaggattcaccaccaaagggtgcccctaaacaggattcagcgccacaacaaaagactccaccaccagttaaacaggaagtagcaccagctaagcaggatgaaccaccagctaagcaggatgcaccaccagctaaacaggatgcaccagttccagttccagaagttatcaaaacgctagcaccggaagtccccaacgtttctcaggcacctgcacaacctcagggtcaggctgctctcgcttctgaaaaaccagcggatgcgccaaaggccattgaggaaccgaaggctgcacccaagaaggaatcaccaccacccacaaaaccagtgacggcaacagttccggtagcacctgccactcctgctgaggcgccatctcctctggctccctccactccgccatcgactcccacctcggtgccgccctctgcagcgacagtgactcctccatctcccgccacggtgactcctccgtcgcctgctgtagttactccgcctcagaaacagtcggcggctccccaagcgggaatcaagaagcaggaggcaggaacgaagacaaaacagcagcagccagccaacaagccccaacaaccgcaaaagcagccaccaggaggagcaggaggatcagctgggccaggagggaacaagggcgtgcagaaacagccgaaccccaatgccaagccagcagttgctccaaagccggcccaggccactccaaaacccgctgctgcttctccaaaagcatcccccaaccagacgaatccacaacaacagcagggaaaagcagctaacaaagcgtctcctccaaagcaaactggaccaactggggggcagcagaagtcggcggcgaacgcctcgaaggccacagcctccccgaaatcggctgcatccccaaaagccacctccccgaaggccggaactcctaccaatcctgcttccgcctctgggggtcccaactga

SEQ ID NO: 32205 - protein, 795 aa, DROSOPHILA
MNVEKLKRLQAQVRIGGKGTPRRKKKVMHQTAATDDKKLQSSLKKLSVSTIPGIEEVNIIKDDLTVIHFNNPKAQASLSANTFAVTGHGETRKVVEMLPDILPQLGQETVVQLRMYANAMNSQKGAPGSGDGPLPAEEDDDVPLLVGDFDEVAKVEATKQPVHEPKESAEIKAKDKQQQQPKKEQKQSAKVPETTNPSENPKEKQENKKGQAKNNKKGDPQTNKDKTNKSKDQAKGQPAPQANKETTQAAQALKQNPSKPAVQQKKDQVLAVDQKIEANGAIQKAQQPKPAETKSTDQKVEPKSAEKQVDKAKPIEQTKTKESKVEHPKPAQKQLDQNTQAKPTAERSEAKPVVPTPEPQKSAPPAVQTLAQIVALPAEKPANEAVAAPKAEEQKKDSSGPAKVEPAITPSAPQPVTTAEPPKSALKQDSPPKSAPKQGSPPKNVPKQESPPQSAPKQDSPPKGAPKQDSPPKGAPKQDSPPKGAPKQDSAPQQKTPPPVKQEVAPAKQDEPPAKQDAPPAKQDAPVPVPEVIKTLAPEVPNVSQAPAQPQGQAALASEKPADAPKAIEEPKAAPKKESPPPTKPVTATVPVAPATPAEAPSPLAPSTPPSTPTSVPPSAATVTPPSPATVTPPSPAVVTPPQKQSAAPQAGIKKQEAGTKTKQQQPANKPQQPQKQPPGGAGGSAGPGGNKGVQKQPNPNAKPAVAPKPAQATPKPAAASPKASPNQTNPQQQQGKAANKASPPKQTGPTGGQQKSAANASKATASPKSAASPKATSPKAGTPTNPASASGGPN

SEQ ID NO: 32206 - DNA, 6826 bp, DROSOPHILA
gattgggcagaatcacggccccggcgatgcggagaatgtttccagcacacggacgatcagccattttcagagttcgcactgcaaatgaggcgcagtagtggcgaaccttctggtttcactgttttgtttgccggtgatttcattcgaatgcacgagtattgcgagttaacggggcgaatacgcgacggatgattgtgtgggtaagctccagcgatgccaatttggctagatttaaactagctaaagtatgtggaatgcaacttgaaatcaaagacgctagaattaattaatagaatcgcatggttatttagagctgtgaacatttgatttctgccatgaaggaattctcatgtttttctttaacatgctatctgattaatagggatttaatatttatctggaattttggcaaagctgcaaagtcattgctaagccgttaatagctggttgtcacatgtgcaggggaggagcataatgcttatcaatagattccaaaatgatgtaatgaatgagtaatgtcgtcgatctatggaagtaattattataattatatctacccattcgtatttatttaaaattatcttcgctgctgggtgtcggaatcaccctgtgggtaggcagatttaacaaaacccgttaagttttgaaaatagaaatagaactgtattgttgggaagtaccatattaaattccctggaaaagttttgtttagcttgtttgtttgttttaccccatgacaaatcgtgcgatcaagtggtgaatgataacttgagaactcataaaccaaagagttatttgtcggtaaagtgaattaatggtgaaataaaactattgtgcttatttgctctttgcaatatccaataacctggatcaagttggtatctcaattaatcaattgcttaggagcaaccatgacaaccgttgctaggcaaacacattgttactgtgttttggctcctgccaaaacaaattcatccactaaaggtggaaaaccggtgtgatgactctctactttgacacgaaaatcgagttcttggactcggatgcagtgagcaccatcagcagctggcatcccagtgagccgctcttcgcagtggcctcttttagtcccgaaagaggcggttcagtgaccatctttgcagataccgtcagtattaatcgctttggtcgcagaccctgccaaaaatcggaatgtatataatctatataatcaaattgcagggtgagccccagcgagatgtaacttatccggtgcacgccacttcgcaagcgacggcactatgctggcatccggagaaggcgctcctggccagcggttgggagcacggcgacatccatgtgtggttcgctggtcacagggagtttgccagcgtgaacgcaccgcacaaggcggccatcgtcctgctgcagttcagcgagcagggcgggcggatggtcacggcggatgccatgggcttggtcaccggatggcgctgcgatggccagtaccagttcctaaccatgttctcccacgacctgcgggaggtgttgctgctgatctgcttccgccttacggtggagagtgaggtgcgcgaggagatggccaatctagccaaggctgctgtggcaggcgatgagaacgccctggacaccctaaccaattggagaccgcgcacagcagcccggagcatgacccattcgggggtgcgggacaaccactgcttctacgcttgcacccaaggaggagtggtgtactacatcaaccaaggaggcgcctgtgtcgaggtgatgaagtgcggatcactgcctcccattgtccagatgttgtggcacccaagaaagtaaagagctgttgagatcgaaaggttctttacctgaaccctaacattattccattctagggacgccgtcatttgcctgatggaggacttgacagtcaccttgtttttggttgaatccacaggcatccttacggagctggatcgtgttaaaatgagcggacgtggaggcggtcggcagggaggcatcgcgtggtctggaaactctttagccatcataacaggtaggatatattattcgatttttcacttctgtgctaaatttaagactaattttcaggcgattttttcgtccgcatttgggacatcgagagaagcgacaattacctattgaaaatggacctacccagtggcaaccagccaggctcatctatgaccactttaagtaatggcaccatgtcctcgtccaaccaattctttagccatgacagcagcgaaagcagcggcgttctccgcaagacaccaaagtacggccagctgaacggcgaaatgttcacctgcttggcatatagctctacgggacagactctgtgtgcaggaacgtcccaggggaatgtctatacttggaagaggagcggcagcaggctagtcggtgcccccgaagatgcctggcagctgacgaacatatcttccgtgcgaggagccatccgcagctgcgaatggggatacaatgagctagccaagccctgcatgctggtcaactgcctttccaatgttttcatgctgaaggagcaacctctgctcgccgttcatacccgcgaactgtgggcagttcagaggtcagccaaatcagtgcaattgacgcactgcagcggtcgggaggccattgttcagtccgagttcgccgtgactgccatggctttgagtgaactgagcttggtgatgagtaatggcaggagcatatcatcctatagcctgcagaaagtggagaagagcttggatgagttcgaggagatcctgcagacagtggagggcacaacaccgacgacggaatctaccaccactccgttgagtctgaaactcctgcagacctttgctgccgaatgcttagccttgaatctgtgcaaccagaacatattttgcttgggtagcagtgacgtttttgtttactccgtgggaggggtagtgcttcaccgcattcaagcaagcgatattgaaggaaagatcattggaatggatttgagtggctgctatctctcggtatttaccatgaatggatatgtgaaagcttacgacgtttctaggcacgatcccaagctgctctttcccagcaaatcgggtcacgacattttcgatgacttcggggagttcattctggtcaagtgcaatagctccggcagccacttggccatggtgatagccagtagcaatttcacccctatatccactttattctgctgggactttgagcgcagcaatcttcttgaatatggactactggagccagaaaccaacgccaagaaggagtcttcgacaagtttgccggttcggattttctgggatgcagaggaacctcgtctcttggctacagaagtcaagtccatgattcagaagaccctgccccagaagaactccttgcaacccagtcattttgtgcagtcaaaagtcgtccttttgttttattccgagaaaggctgcctgaatgtcctcgaaacacaatccatgagcccaggctgccagctactgaacctttgtgtacccaacgtgatccggctgaagatcaatacgatggaggagcaacctctgcaagacttcgtcgacctacagcagtgcaatccagttacgaggaagcaagtcctgaatttcagtctctacgtcgcagagggaaatatggatatggcttatcgcagcattcgctcgattcaatcgaaagtgatctggacaaatctggctaagatgtgcgtgcacacgaatcgcttggacgtggccaaggtgtgcatgggccacttggaacaggcccgctccgttcgtgccttacgccaagcgattgaagatgacgatctggagacggaagccaaggtggctgtgctggcgatagaactcggaatgattgaggaagccaaggatctttatcgtcgatgcaagcgcttcgatttgctaaacaagctgctccagtccattgggcacttggatgaagcagtagagctggccgaggccgaggatcggattcatctgaagcacacgtactatcaaaaggcacaggagctgcgagagaggggtgacatcaagggagctctggagtactttgaaaagacccagaatccagcgcaaaatattacccaactgcttttggaaaaccctggcgccatgaagcgctacatccagaccaccagcgatcccaagctgcttaaatggtggggccagtatattgagagctccggcgacatggatgctgctctggctgtctaccacaaggcggaggactggttctcgcaggtaaattagcaaggctttaagataccacgaaacactatacactaacatcctgttcctctcaaggtaaagatactctgctacctaggtaagatctccaaggcagacgcgattgccaggcagtcgggggatcgggcggcctgctatcacttggcgaggcattacgagaacgtgggcaagttccaggaggccattatgttctttacgcgtgcccagaccttcagcaatgcgatccgcatctgcaaggagaacgactttcaggaggaactatggacggtggccagctcgtcaaggcagagggacaaggcaattgcggcagcttactttgaagagtgcggaaactttaaacacgccgttgaactctaccatcgggccgggatgctccacaaggccctcgagatggcatttgagtctcagcagccagagatcctggaaattattgcctctgatctagcgcccgattcggatgccgagttgattaaccgctgtgcggatttcttttgcagtatcgagcaatttcagaaggccgtgcatctgctggccaagaccagacatttggaacgggcattgggcatatgttccgagaagggcgtacccgtcacggaggaactatccgagatgcttactccggagaagggggagttcgaggaggcgactcgagtccacatcctcgtacagctgggcgagttcctccagcagcagggcgactatcacagtgccaccaagaagttcacccaggctggcgacaaaattcgcgccatgaagagtcttttgaagtcgggcaacaccgacaaaattattttcttcgctaatatgtcgaggcaacgtgaggtctacatcatggctgcgaactatcttcaagccttggactggcaatcggatccgcaagtgctcaagcacatagtcacgttttatacaaagggccaggcctttgattcgctggccaacttttatgccatctgcgcccagatcgaaatcgaggagttccaggattacggtaaggctctaaccgccatgcaggaagcctccaaatgcctggagaagctcagccacgcccagcacgtctacaacaatctgcagcgcacggtcgcggatgttaaggcaattctggagatccagcaggcgttgcgcgagggggatcaccagctggtcattggctcctgccgcagcatgctgagtaagtcgctggcctagagtgtactcagcttccattaataaccttttgttttcacattaagttaaacccgaactgccgcccatacgccacgcccatatcttggccatgctaatccgagccctggtctacgtcaaggactattctgaggcgggcagagctttgaaggagctgaccgtgaaggacagcacgtggagtgcctcgggactcttggatcgcagcatcgttcacaaaattgcgcaggagtgccacttggagttcgatctcatctggaatgcgggacgccaggtgaccgcctccacaagcggtacggccgccactggaatgagcagcacttctgggatgacgactactgatgatgacgacgccgatgacgaggagatcaccgaggagctgcattagatgattcaattaataggcgatgcagcacctagtcacgtcccagttccgcagagcggataacaagtaaataggcaaaagagttccctttaaattggataagcaatggctacaatggaatgtttcaaccagcagatactaagttatgctaagatattaagtattaatgatcataaacgaaagtatatacaatgacagaaatcgtggaaagcatcttaaagttctcaatcaaaacgaacaagttacgtatttgtataacttgtatttgtatttcacaagactgcttaaatttctgcttatattgtatacaaatcccttgcttgggccatttggaattttatgaatgaacttcacgatgtacgcaagcctagtaaaagctttcggtgctgaaacatacatatgtatatgtatgtaggtatatgacttggatgtgagttcaagtgaccgacgtcacatcaaagcaaatataaacagcgatacggattcggatcggcggatctgccggcgccagtcggaaagcaaaagagagcggccatccgtgaatcacttgcccaaaagcgtccgcgtcctcagctatgtatgaaatcagaggcatttccaggaagccagcgaaactcggaacaatcgaaagagcaatcagttggcgaactgatataaactaaatcgaaaacgtcaccgacgtcaagcaattggatatttagatcccaaatataattaccatatatggatatggaatggtttagttttataaatactgacccttaactggaacttgtcacgaagtaaaatgcgcacaaggatgaactgcggataggaggcttgtagagaaaaccatgtatcactcgattatgacataactatttattatttatatttatatcttctatctatatatatcttatatcattctgggagcgaccttttgccaaatatcggaacagagataaactgatattccaagtaggcatggcatggaccacagacaactaacgactcatgcccg

SEQ ID NO: 32207 - DNA, 4332 bp, DROSOPHILA
atgactctctactttgacacgaaaatcgagttcttggactcggatgcagtgagcaccatcagcagctggcatcccagtgagccgctcttcgcagtggcctcttttagtcccgaaagaggcggttcagtgaccatctttgcagataccggtgagccccagcgagatgtaacttatccggtgcacgccacttcgcaagcgacggcactatgctggcatccggagaaggcgctcctggccagcggttgggagcacggcgacatccatgtgtggttcgctggtcacagggagtttgccagcgtgaacgcaccgcacaaggcggccatcgtcctgctgcagttcagcgagcagggcgggcggatggtcacggcggatgccatgggcttggtcaccggatggcgctgcgatggccagtaccagttcctaaccatgttctcccacgacctgcgggaggtgttgctgctgatctgcttccgccttacggtggagagtgaggtgcgcgaggagatggccaatctagccaaggctgctgtggcaggcgatgagaacgccctggacaccctaaccaattggagaccgcgcacagcagcccggagcatgacccattcgggggtgcgggacaaccactgcttctacgcttgcacccaaggaggagtggtgtactacatcaaccaaggaggcgcctgtgtcgaggtgatgaagtgcggatcactgcctcccattgtccagatgttgtggcacccaagaaaggacgccgtcatttgcctgatggaggacttgacagtcaccttgtttttggttgaatccacaggcatccttacggagctggatcgtgttaaaatgagcggacgtggaggcggtcggcagggaggcatcgcgtgcagcgaaagcagcggcgttctccgcaagacaccaaagtacggccagctgaacggcgaaatgttcacctgcttggcatatagctctacgggacagactctgtgtgcaggaacgtcccaggggaatgtctatacttggaagaggagcggcagcaggctagtcggtgcccccgaagatgcctggcagctgacgaacatatcttccgtgcgaggagccatccgcagctgcgaatggggatacaatgagctagccaagccctgcatgctggtcaactgcctttccaatgttttcatgctgaaggagcaacctctgctcgccgttcatacccgcgaactgtgggcagttcagaggtcagccaaatcagtgcaattgacgcactgcagcggtcgggaggccattgttcagtccgagttcgccgtgactgccatggctttgagtgaactgagcttggtgatgagtaatggcaggagcatatcatcctatagcctgcagaaagtggagaagagcttggatgagttcgaggagatcctgcagacagtggagggcacaacaccgacgacggaatctaccaccactccgttgagtctgaaactcctgcagacctttgctgccgaatgcttagccttgaatctgtgcaaccagaacatattttgcttgggtagcagtgacgtttttgtttactccgtgggaggggtagtgcttcaccgcattcaagcaagcgatattgaaggaaagatcattggaatggatttgagtggctgctatctctcggtatttaccatgaatggatatgtgaaagcttacgacgtttctaggcacgatcccaagctgctctttcccagcaaatcgggtcacgacattttcgatgacttcggggagttcattctggtcaagtgcaatagctccggcagccacttggccatggtgatagccagtagcaatttcacccctatatccactttattctgctgggactttgagcgcagcaatcttcttgaatatggactactggagccagaaaccaacgccaagaaggagtcttcgacaagtttgccggttcggattttctgggatgcagaggaacctcgtctcttggctacagaagtcaagtccatgattcagaagaccctgccccagaagaactccttgcaacccagtcattttgtgcagtcaaaagtcgtccttttgttttattccgagaaaggctgcctgaatgtcctcgaaacacaatccatgagcccaggctgccagctactgaacctttgtgtacccaacgtgatccggctgaagatcaatacgatggaggagcaacctctgcaagacttcgtcgacctacagcagtgcaatccagttacgaggaagcaagtcctgaatttcagtctctacgtcgcagagggaaatatggatatggcttatcgcagcattcgctcgattcaatcgaaagtgatctggacaaatctggctaagatgtgcgtgcacacgaatcgcttggacgtggccaaggtgtgcatgggccacttggaacaggcccgctccgttcgtgccttacgccaagcgattgaagatgacgatctggagacggaagccaaggtggctgtgctggcgatagaactcggaatgattgaggaagccaaggatctttatcgtcgatgcaagcgcttcgatttgctaaacaagctgctccagtccattgggcacttggatgaagcagtagagctggccgaggccgaggatcggattcatctgaagcacacgtactatcaaaaggcacaggagctgcgagagaggggtgacatcaagggagctctggagtactttgaaaagacccagaatccagcgcaaaatattacccaactgcttttggaaaaccctggcgccatgaagcgctacatccagaccaccagcgatcccaagctgcttaaatggtggggccagtatattgagagctccggcgacatggatgctgctctggctgtctaccacaaggcggaggactggttctcgcaggtaaagatactctgctacctaggtaagatctccaaggcagacgcgattgccaggcagtcgggggatcgggcggcctgctatcacttggcgaggcattacgagaacgtgggcaagttccaggaggccattatgttctttacgcgtgcccagaccttcagcaatgcgatccgcatctgcaaggagaacgactttcaggaggaactatggacggtggccagctcgtcaaggcagagggacaaggcaattgcggcagcttactttgaagagtgcggaaactttaaacacgccgttgaactctaccatcgggccgggatgctccacaaggccctcgagatggcatttgagtctcagcagccagagatcctggaaattattgcctctgatctagcgcccgattcggatgccgagttgattaaccgctgtgcggatttcttttgcagtatcgagcaatttcagaaggccgtgcatctgctggccaagaccagacatttggaacgggcattgggcatatgttccgagaagggcgtacccgtcacggaggaactatccgagatgcttactccggagaagggggagttcgaggaggcgactcgagtccacatcctcgtacagctgggcgagttcctccagcagcagggcgactatcacagtgccaccaagaagttcacccaggctggcgacaaaattcgcgccatgaagagtcttttgaagtcgggcaacaccgacaaaattattttcttcgctaatatgtcgaggcaacgtgaggtctacatcatggctgcgaactatcttcaagccttggactggcaatcggatccgcaagtgctcaagcacatagtcacgttttatacaaagggccaggcctttgattcgctggccaacttttatgccatctgcgcccagatcgaaatcgaggagttccaggattacggtaaggctctaaccgccatgcaggaagcctccaaatgcctggagaagctcagccacgcccagcacgtctacaacaatctgcagcgcacggtcgcggatgttaaggcaattctggagatccagcaggcgttgcgcgagggggatcaccagctggtcattggctcctgccgcagcatgctgattaaacccgaactgccgcccatacgccacgcccatatcttggccatgctaatccgagccctggtctacgtcaaggactattctgaggcgggcagagctttgaaggagctgaccgtgaaggacagcacgtggagtgcctcgggactcttggatcgcagcatcgttcacaaaattgcgcaggagtgccacttggagttcgatctcatctggaatgcgggacgccaggtgaccgcctccacaagcggtacggccgccactggaatgagcagcacttctgggatgacgactactgatgatgacgacgccgatgacgaggagatcaccgaggagctgcattag

SEQ ID NO: 32208 - protein, 1443 aa, DROSOPHILA
MTLYFDTKIEFLDSDAVSTISSWHPSEPLFAVASFSPERGGSVTIFADTGEPQRDVTYPVHATSQATALCWHPEKALLASGWEHGDIHVWFAGHREFASVNAPHKAAIVLLQFSEQGGRMVTADAMGLVTGWRCDGQYQFLTMFSHDLREVLLLICFRLTVESEVREEMANLAKAAVAGDENALDTLTNWRPRTAARSMTHSGVRDNHCFYACTQGGVVYYINQGGACVEVMKCGSLPPIVQMLWHPRKDAVICLMEDLTVTLFLVESTGILTELDRVKMSGRGGGRQGGIACSESSGVLRKTPKYGQLNGEMFTCLAYSSTGQTLCAGTSQGNVYTWKRSGSRLVGAPEDAWQLTNISSVRGAIRSCEWGYNELAKPCMLVNCLSNVFMLKEQPLLAVHTRELWAVQRSAKSVQLTHCSGREAIVQSEFAVTAMALSELSLVMSNGRSISSYSLQKVEKSLDEFEEILQTVEGTTPTTESTTTPLSLKLLQTFAAECLALNLCNQNIFCLGSSDVFVYSVGGVVLHRIQASDIEGKIIGMDLSGCYLSVFTMNGYVKAYDVSRHDPKLLFPSKSGHDIFDDFGEFILVKCNSSGSHLAMVIASSNFTPISTLFCWDFERSNLLEYGLLEPETNAKKESSTSLPVRIFWDAEEPRLLATEVKSMIQKTLPQKNSLQPSHFVQSKVVLLFYSEKGCLNVLETQSMSPGCQLLNLCVPNVIRLKINTMEEQPLQDFVDLQQCNPVTRKQVLNFSLYVAEGNMDMAYRSIRSIQSKVIWTNLAKMCVHTNRLDVAKVCMGHLEQARSVRALRQAIEDDDLETEAKVAVLAIELGMIEEAKDLYRRCKRFDLLNKLLQSIGHLDEAVELAEAEDRIHLKHTYYQKAQELRERGDIKGALEYFEKTQNPAQNITQLLLENPGAMKRYIQTTSDPKLLKWWGQYIESSGDMDAALAVYHKAEDWFSQVKILCYLGKISKADAIARQSGDRAACYHLARHYENVGKFQEAIMFFTRAQTFSNAIRICKENDFQEELWTVASSSRQRDKAIAAAYFEECGNFKHAVELYHRAGMLHKALEMAFESQQPEILEIIASDLAPDSDAELINRCADFFCSIEQFQKAVHLLAKTRHLERALGICSEKGVPVTEELSEMLTPEKGEFEEATRVHILVQLGEFLQQQGDYHSATKKFTQAGDKIRAMKSLLKSGNTDKIIFFANMSRQREVYIMAANYLQALDWQSDPQVLKHIVTFYTKGQAFDSLANFYAICAQIEIEEFQDYGKALTAMQEASKCLEKLSHAQHVYNNLQRTVADVKAILEIQQALREGDHQLVIGSCRSMLIKPELPPIRHAHILAMLIRALVYVKDYSEAGRALKELTVKDSTWSASGLLDRSIVHKIAQECHLEFDLIWNAGRQVTASTSGTAATGMSSTSGMTTTDDDDADDEEITEELH

SEQ ID NO: 32209 - DNA, 3764 bp, DROSOPHILA
tgagggaactcggaaattatctggtttctcagctactcgagacgaaggagaggacgaaggagaggactggacttacgagattcagccagcagtgggtggtcagcttgccgttcaactcgtcgatgtctatgtaggtgaccaccatttccagggacacgttcgtgggggttccttggaacaccggctgcacatcgctgtcgtagttcgtgaacaggccggcgtggaggcgatccagggccttgacattggcgttcttggggtccgcggtggctggaggggattcgagatcacacttatcagcggcttatgcaactccggagccgtaaacacttaccagtggcgcctggcacggaagtcagccccataagaagcatccccattagcatttgcagcagtagtggcagtccaggaccggaaactggtgcctttatcttgggagtcgtcgtcattgttcagcgcgcctttgtttcggatgtacggtgctgtgctctcgaaatctgaatgggaactgagctcggtttgcggcttggcacatggccgaggctcctccgatatctcggtgttcctctgccgacgcagcagataaagcagcagccgacatatttgggttttgtgtgggagccgtgctcacatgtactgacttcggggaggttcgagagtcagttctcttaagaacttaatcaattcaaaagcatttacatatatcagcataaaataaacttaaaaatccatttcacttatttttgtttcgcaaaaatgccaaacatatgattaataaattgaggagaactggtgaacaattagctcgataagctagcaggttttcacaaactaagttcgggattcactaatttcaaatcagatttatcagttttgaatctcaaccgttttggtatatttttcgggagtttggtggcggtgcgaccccaccacagagggtggtatatttttggtatactgcggtgcgtccgataggcccagacgatgaccagcggtaccgataacacagattgttgacgtgtgctgctgcgtgtcatttcgcttttcacccccgcaagccggcgattttcaggaacggattggattggacagcacagcatggcggaggaagtcatcggaaccgttaaggaggtgctgaagggcatcatcgagaatgtgaacgcgccgaagaacgagtcggcgccgggcgagaagaagccctcgactccggagggcatggcggtggcctacagcagcctggtggtgatggccatgctgcccatcatcttcggctccatccgctccgtgaagctgcacaagctgaagaaggtatgtgaagcagactcagcccggaagctgcattaacatgtttcccgtaattcccactccctgcagtcaacgggcgagaaggcggacacgatgaccaagaaagacgccatgtacttcccgctgatcgcgtcggcagccctcttcgggctgtacctgttcttcaagatcttccagaaggtgcacatcaactacctgctcaccggctacttcttcgtgctgggagttattgctctggcgcacctgctcagtccggtgatcaactcgctgatgcccgccgccgtgccgaaggtgcccttccacatcctgttcactaagggggagggcaagcacaaggaagacatcgttaactacaagttctccacgcacgacattgtctgcctggtgatctcctcggcgatcggagtgtggtacctgctcaagaagcactggatcgccaacaatctgttcggtctggccttcgccatcaacggcgtggagatgctgcacctgaacaacttcgtcacgggcgtcatcttgctgagcggcctgttcttctacgacatcttctgggtattcggcaccaacgtgatggtcaccgtggccaagagcttcgaggcgcccatcaagctagtgttcccccaggacctgatcgagaacggcctgaacgcctcgaacttcgcaatgctgggactaggcgacatcgttattccgggcatcttcatcgctctgctgctgcgcttcgacgacagcaagaagcgcaagacgcgcatctacttctactccacgctgattgcctacttccttggcctgctggccaccatcttcgtgatgcatgtgttcaagcatgcgcagccggctctgctctacctggtgccagcctgcatgggcacgcccctcctggtggccctcatccgcggcgagctgaaggtgctctttgcgtaagtgtggactgcgctgggcgctcgacttgaaactaaactaactcattctcgcccccactgcagctatgaagatcatcccgaggagaagcccgaaaagaaggagaagaaggagaaggacgagggcgtcagctcgtccggcagcaaaaagaaggagtcgaaaaagggcaagtagagccgggaggacgcaacatccgaacaacatccccactcgttccatcgtaaatgtcttctgcagctagccaagctccctttcgtttcgatatggcttctccatctaccgcagtccatagctcatatggactaacaccgctacaaaagacgattcacttactgagttagttatgtacgttccttggccaggcacaacaatcttatttagttcggttaggttacaattgtagaaaatgttccctcgacttttttaccgcaatcaatttaaatatgtatttcaaatatttctgtggctccgcacaggaggcttatatgtttaagaacagtttagatacaaatatattccaatttttgtaaacagtgcaattttgactacgaattctacattgcatttcttaaaactaatgcagtaatttgtgtaaacagtaatgcgaataaattttaattctaacgtttaattaaactagttttgtattgagtagagggtttttaggaatgtaacggcttaagagaaaaacctaatacattttaagttgagcttaccaaaatccaaagaatttttaaatttaaaacataatacaaaagtgctttgaaaaagtcagtattttaataccactgtttatccacggccacactaaatatcgataaccgcatagtgagaccctttgtgtagaaaaacttatacctttagcgagcacaagcgttcattcctgaaaaattgcggtaaaaattgcgaaaagcgcgagttccccccgcgattgcaaataattaatttgcttggaaccactggagacgcaaggacgaacagagaggtaggtgctcttgcacttagcgcgccaaaaggcgacaaagcccctcgtaggccacttacccacacacacacattcgcagacagacgcgcgtgcaaaaaaggccaagtgggactgctagcggaaatccaggactcgaggacacgttcgggcggcagtagagaagcgagcaagcagcgacgaccatgtccggcattgctattacacgattgggggaggagcgcaaggcctggcgcaaggatcacccattcgggttcgtcgcacgacccgccaagaaccctgacggcaccctcaacctgatgatctgggagtgcgccattcccggcaagaagtccaccccctgggagggcgggctctacaagctgcgcatgatcttcaaggacgactaccccacctcgccgcccaagtgcaagttcgaaccgccgctgttccacccgaacgtctatccctcgggcactgtttgcctgtcgctgctggacgaggagaaggactggcgccccgccatcaccatcaagcaaatcctgctgggcatccaggacctgctcaacgagccgaa

SEQ ID NO: 32210 - DNA, 1632 bp, DROSOPHILA
ataacacagattgttgacgtgtgctgctgcgtgtcatttcgcttttcacccccgcaagccggcgattttcaggaacggattggattggacagcacagcatggcggaggaagtcatcggaaccgttaaggaggtgctgaagggcatcatcgagaatgtgaacgcgccgaagaacgagtcggcgccgggcgagaagaagccctcgactccggagggcatggcggtggcctacagcagcctggtggtgatggccatgctgcccatcatcttcggctccatccgctccgtgaagctgcacaagctgaagaagtcaacgggcgagaaggcggacacgatgaccaagaaagacgccatgtacttcccgctgatcgcgtcggcagccctcttcgggctgtacctgttcttcaagatcttccagaaggtgcacatcaactacctgctcaccggctacttcttcgtgctgggagttattgctctggcgcacctgctcagtccggtgatcaactcgctgatgcccgccgccgtgccgaaggtgcccttccacatcctgttcactaagggggagggcaagcacaaggaagacatcgttaactacaagttctccacgcacgacattgtctgcctggtgatctcctcggcgatcggagtgtggtacctgctcaagaagcactggatcgccaacaatctgttcggtctggccttcgccatcaacggcgtggagatgctgcacctgaacaacttcgtcacgggcgtcatcttgctgagcggcctgttcttctacgacatcttctgggtattcggcaccaacgtgatggtcaccgtggccaagagcttcgaggcgcccatcaagctagtgttcccccaggacctgatcgagaacggcctgaacgcctcgaacttcgcaatgctgggactaggcgacatcgttattccgggcatcttcatcgctctgctgctgcgcttcgacgacagcaagaagcgcaagacgcgcatctacttctactccacgctgattgcctacttccttggcctgctggccaccatcttcgtgatgcatgtgttcaagcatgcgcagccggctctgctctacctggtgccagcctgcatgggcacgcccctcctggtggccctcatccgcggcgagctgaaggtgctctttgcctatgaagatcatcccgaggagaagcccgaaaagaaggagaagaaggagaaggacgagggcgtcagctcgtccggcagcaaaaagaaggagtcgaaaaagggcaagtagagccgggaggacgcaacatccgaacaacatccccactcgttccatcgtaaatgtcttctgcagctagccaagctccctttcgtttcgatatggcttctccatctaccgcagtccatagctcatatggactaacaccgctacaaaagacgattcacttactgagttagttatgtacgttccttggccaggcacaacaatcttatttagttcggttaggttacaattgtagaaaatgttccctcgacttttttaccgcaatcaatttaaatatgtatttcaaatatttctgtggctccgcacaggaggcttatatgtttaagaacagtttagatacaaatatattccaatttttgtaaacagtgca

SEQ ID NO: 32211 - protein, 389 aa, DROSOPHILA
MAEEVIGTVKEVLKGIIENVNAPKNESAPGEKKPSTPEGMAVAYSSLVVMAMLPIIFGSIRSVKLHKLKKSTGEKADTMTKKDAMYFPLIASAALFGLYLFFKIFQKVHINYLLTGYFFVLGVIALAHLLSPVINSLMPAAVPKVPFHILFTKGEGKHKEDIVNYKFSTHDIVCLVISSAIGVWYLLKKHWIANNLFGLAFAINGVEMLHLNNFVTGVILLSGLFFYDIFWVFGTNVMVTVAKSFEAPIKLVFPQDLIENGLNASNFAMLGLGDIVIPGIFIALLLRFDDSKKRKTRIYFYSTLIAYFLGLLATIFVMHVFKHAQPALLYLVPACMGTPLLVALIRGELKVLFAYEDHPEEKPEKKEKKEKDEGVSSSGSKKKESKKGK

SEQ ID NO: 32212 - DNA, 2228 bp, DROSOPHILA
aaatggttttctgaacaccgaagataaatggactgggagaaactcatattttgaagtaatgagaattaaatgtgagcataaaggactatcgagcaatgcgatttcttacagtgcacttgcagttgctgttggcttactgctattgctgccggttgcaggtggccgccatttgggccatgatttatgcagtggccgggcattagaaaggtcgttcgcagttgtcgtcgccagtcgtgatttcagtggagaatgaggagcaggtgggaaacgagctccgtggggcggaggagcttggtcaggagagagaggatgggggatataagtaagccaagaaaatccattgccactcagagtcggacgtcttaattaggttttctgctgaaaagtgccgaaaaatgttggctaatgcccaacttgccacgcccacacgagcagcagacattgtctctgacccacaaatggtcctccatcctaccaaaagcccctctccctttttagtcatgccccaatttgaagctttcttctggttctcccagcgcgattataaatgacatcgcattagtcttggtcgggttaatgtgcgtttcctttggccaaaaaactgccaacttcgcacaacttcattagtggagaaccatgtgagaaaagcagaatatcagacacttgtctcccgcttgaagagttccgggaattaaagtacagttgctttttcgtcctacgcaggtcttgattctagccctttgaggcattcagttagaatggctaagtatgaacattaagttatcaaaacatcttatatacttaatacgttcaagacaaagtgctacatataaaaatatcccctataaaaggtacattttctgcttaccaaaactaaataccaaacctataaacttgagcttaaattataacattttacgtaagatacatttttaagtcattaccagataaaaatgaactgtaagttttcatctgcgtaaaaacctattttaccaaaattctaatctaaagagtcggtggtttgggcagttcttcgatccctgagttcctgctgatgcttaatggtcacctcgaggaacttcagatagccctcgtcaatgggttcgatctcctcatcctcggaagaactctcgtacacgtagtccaggcagtgaaacgttcctgtttccttgggaatatcctcaaggtcctgatccagattcggattaacctcagggcagagactcataacatgattgtggtgccattcaaaaaggctttggtatactacaataacagggaattttaaatggttaacactattaaaaaacttattaatgactattattgttactttgagccacattgctccactgatctcgagatgtatgtggcttcggctttccctcacttttctgccttcgtctgcgctgcttgctcctattcctgtttcttttccttgccatttcctccgatttccaatcctccattggcttttattaggaaaatacaaacattcgtcgccttttgtttacttctcagcataagcaataacaagattgcagtgttgccaaattatccaaaatgtggccagaaactgaaatctagcgaccgcttcacagaattatatattttggttcatatgaagcgctttaataatgattcattataattttgatttggcaattggttgttttctttgtaaataattttaaataatatctttttaaaagcagtttaagattgtgatgtgaataatcgtctatcggactgtaacagctgttaattccagtgtgtgtacagattgtaaacaacgcgaactccagatggcgtcttattactgttaccggaaattaagtacaggggctttcagggaacaacagatggcgccaccatgttacttttagatataataattattgtttctaacttagaatctcatagatacatattaaaaaaaattgtcttaaaaatcaatacaatatattacaaaatttatataattaataattatgaaattatgccgcaaattaatgaaatgaaattttattcatttttgaagaattacttattccaacaaaatctcttcatttcttaaatgataaaacccttatatttccctgccctcgcggccaaccccttgaaggccttttccggtcaaccgactgacttcaaaactctggttcagaccttcccggcaaagggcaagcgcaaagttaaagccagagcagaagccaagccggatcgga

SEQ ID NO: 32213 - DNA, 228 bp, DROSOPHILA
atgagtctctgccctgaggttaatccgaatctggatcaggaccttgaggatattcccaaggaaacaggaacgtttcactgcctggactacgtgtacgagagttcttccgaggatgaggagatcgaacccattgacgagggctatctgaagttcctcgaggtgaccattaagcatcagcaggaactcagggatcgaagaactgcccaaaccaccgactctttagattag

SEQ ID NO: 32214 - protein, 75 aa, DROSOPHILA
MSLCPEVNPNLDQDLEDIPKETGTFHCLDYVYESSSEDEEIEPIDEGYLKFLEVTIKHQQELRDRRTAQTTDSLD

SEQ ID NO: 32215 - DNA, 3798 bp, DROSOPHILA
agcgattcacgatgtgaagcaaatttgtatgtttgtgcattttctgttcgcaggtactactacgacaagaacatcatgaccaaggtgcacggaaagcggtatgcctacaagtttgacttccacggtctgatggccgcatgccaggctcaggcgcagggaggagatccggcctccagtatgctgggttcctacaatcaccacgccggcggtgcgatgcagttgggccgccacccgccgccactgcaccaccatccacagcactcacatccgcaccaccagctggggcagccccactttctgcacccgcaccactcgtcgcccgcctcgaacagctccagcctgggattcccctcgtcctcgacggcctcttcgcaggcctcgcccggccaggcgcccgcctcctcctccgcctccacttcgaattttactgctccattccaaggtgggacagccggcgtagacccggccaggacgtccacatcttctgcgggaaactacgaccagggcccggtcactcccaccacaaatgcattcaactgagcacgccgcaaccccaatttgtcgccggggttgtaagttccgatggggcaggaggatgcgcaggaccacccactgcggcgcagcaaagagcggagagccaccctgcatcccagccacccatccacccatccacccagtcccccagctattgggggtcagagcttcggccgtaaaaaaggtcattttgtgtaattccagctactttgggttaattgaggaattgtgatagcccgtagcatcgcagagcaatactcggaaacgagagccaatttgttacttagcctgttatccttcgcttctagttgtaagcagacattcggcagaggtcctttattccatacgaggtctcatcattaaataattataagttcgcacacacattaaatacatgaaatcgcaaatgcaaaactagttcagagtgcgcactggcttgggatgtggccttgagtctcgagcatccctacacggagcacctgatggccagaatgaggaaggccaggctgaaggaaacgaaggaaatgcggtccacggcggtggccagcagcgcccagtcgaactggttggccttggcgcccggcacctcggtgtggttgatgcccagcggactggactcctgctcgtccgcctcctcgtacgggtgctcgtccatctccttggtcttctccgcctgcgactcgccggtggtgctgaacaccgagagcagcagccacgtgcccaggtgcccgtgcaacagctttctcagcgcctccggcaggcgcctcttgtgcttgcctgtggccaggtacagaactagaacctcgacgatggtggagacgctcagatacagcaggctggtgctgtagaagattactgcaattataggaatgcccggtgagtggtcggtaagttcggtaatattctgcgatgtttagggtacttagcatctagttttcagaactgaactgatgaaatggcaatggggagcactcacccacaagtggagtattgttggacagcactggcaggagctgggcgaagtacatgaggaaggcggcgatcacgatgatgagcaggccgttgatcatgatcttctcgccgcccatgtggggaggcagccagaaggctgagagggccaggatgacgatgcaggacgcgggtgtgtagatgacggccgtgtacatggaggagcgccgctgagccgtcagagtgtactccatgtagccgtagtagtcctgactgacaaagtgggctcgcgagtccacgatttcccactccggtgactgaaccaggtcgtcgtggtcaagggactctcctctcgccgtgccgttctccggcaggacgaccttcaggccccaggagccgatcttcaacttgcagctctgcttgtcgtggggccagttgagcatgttgagttcgcagtaggccgtgtacacggctggaggcatccaccggaagtggccatcgtggctgagggtcacctgggtttcggccatcaggccaccttcgtcgccgttgaagagtgtgatttggggggtccagacctcgctggacttcaaagtgatctgcgtgatgttgtcatattgtgacggttgccacacgcgctcctcgtctctccatcgctagaaaaccacgattgcttctggttagttgattggatattcagatattcataaatgcactacacttattagctttatagtactctctcaaaaaaaaaaaaaaacaaaacaaaacaacacttcagttcagttcagataacacgctttccaaaattgcttatcagagttgtgaacttgagggaactcggaaattatctggtttctcagctactcgagacgaaggagaggacgaaggagaggactggacttacgagattcagccagcagtgggtggtcagcttgccgttcaactcgtcgatgtctatgtaggtgaccaccatttccagggacacgttcgtgggggttccttggaacaccggctgcacatcgctgtcgtagttcgtgaacaggccggcgtggaggcgatccagggccttgacattggcgttcttggggtccgcggtggctggaggggattcgagatcacacttatcagcggcttatgcaactccggagccgtaaacacttaccagtggcgcctggcacggaagtcagccccataagaagcatccccattagcatttgcagcagtagtggcagtccaggaccggaaactggtgcctttatcttgggagtcgtcgtcattgttcagcgcgcctttgtttcggatgtacggtgctgtgctctcgaaatctgaatgggaactgagctcggtttgcggcttggcacatggccgaggctcctccgatatctcggtgttcctctgccgacgcagcagataaagcagcagccgacatatttgggttttgtgtgggagccgtgctcacatgtactgacttcggggaggttcgagagtcagttctcttaagaacttaatcaattcaaaagcatttacatatatcagcataaaataaacttaaaaatccatttcacttatttttgtttcgcaaaaatgccaaacatatgattaataaattgaggagaactggtgaacaattagctcgataagctagcaggttttcacaaactaagttcgggattcactaatttcaaatcagatttatcagttttgaatctcaaccgttttggtatatttttcgggagtttggtggcggtgcgaccccaccacagagggtggtatatttttggtatactgcggtgcgtccgataggcccagacgatgaccagcggtaccgataacacagattgttgacgtgtgctgctgcgtgtcatttcgcttttcacccccgcaagccggcgattttcaggaacggattggattggacagcacagcatggcggaggaagtcatcggaaccgttaaggaggtgctgaagggcatcatcgagaatgtgaacgcgccgaagaacgagtcggcgccgggcgagaagaagccctcgactccggagggcatggcggtggcctacagcagcctggtggtgatggccatgctgcccatcatcttcggctccatccgctccgtgaagctgcacaagctgaagaaggtatgtgaagcagactcagcccggaagctgcattaacatgtttcccgtaattcccactccctgcagtcaacgggcgagaaggcggacacgatgaccaagaaagacgccatgtacttcccgctgatcgcgtcggcagccctcttcgggctgtacctgttcttcaagatcttccagaag

SEQ ID NO: 32216 - DNA, 1362 bp, DROSOPHILA
cagcaccgtacatccgaaacaaaggcgcgctgaacaatgacgacgactcccaagataaaggcaccagtttccggtcctggactgccactactgctgcaaatgctaatggggatgcttcttatggggctgacttccgtgccaggcgccactgccaccgcggaccccaagaacgccaatgtcaaggccctggatcgcctccacgccggcctgttcacgaactacgacagcgatgtgcagccggtgttccaaggaacccccacgaacgtgtccctggaaatggtggtcacctacatagacatcgacgagttgaacggcaagctgaccacccactgctggctgaatctccgatggagagacgaggagcgcgtgtggcaaccgtcacaatatgacaacatcacgcagatcactttgaagtccagcgaggtctggaccccccaaatcacactcttcaacggcgacgaaggtggcctgatggccgaaacccaggtgaccctcagccacgatggccacttccggtggatgcctccagccgtgtacacggcctactgcgaactcaacatgctcaactggccccacgacaagcagagctgcaagttgaagatcggctcctggggcctgaaggtcgtcctgccggagaacggcacggcgagaggagagtcccttgaccacgacgacctggttcagtcaccggagtgggaaatcgtggactcgcgagcccactttgtcagtcaggactactacggctacatggagtacactctgacggctcagcggcgctcctccatgtacacggccgtcatctacacacccgcgtcctgcatcgtcatcctggccctctcagccttctggctgcctccccacatgggcggcgagaagatcatgatcaacggcctgctcatcatcgtgatcgccgccttcctcatgtacttcgcccagctcctgccagtgctgtccaacaatactccacttgtggtaatcttctacagcaccagcctgctgtatctgagcgtctccaccatcgtcgaggttctagttctgtacctggccacaggcaagcacaagaggcgcctgccggaggcgctgagaaagctgttgcacgggcacctgggcacgtggctgctgctctcggtgttcagcaccaccggcgagtcgcaggcggagaagaccaaggagatggacgagcacccgtacgaggaggcggacgagcaggagtccagtccgctgggcatcaaccacaccgaggtgccgggcgccaaggccaaccagttcgactgggcgctgctggccaccgccgtggaccgcatttccttcgtttccttcagcctggccttcctcattctggccatcaggtgctccgtgtag

SEQ ID NO: 32217 - protein, 441 aa, DROSOPHILA
MTTTPKIKAPVSGPGLPLLLQMLMGMLLMGLTSVPGATATADPKNANVKALDRLHAGLFTNYDSDVQPVFQGTPTNVSLEMVVTYIDIDELNGKLTTHCWLNLRWRDEERVWQPSQYDNITQITLKSSEVWTPQITLFNGDEGGLMAETQVTLSHDGHFRWMPPAVYTAYCELNMLNWPHDKQSCKLKIGSWGLKVVLPENGTARGESLDHDDLVQSPEWEIVDSRAHFVSQDYYGYMEYTLTAQRRSSMYTAVIYTPASCIVILALSAFWLPPHMGGEKIMINGLLIIVIAAFLMYFAQLLPVLSNNTPLVVIFYSTSLLYLSVSTIVEVLVLYLATGKHKRRLPEALRKLLHGHLGTWLLLSVFSTTGESQAEKTKEMDEHPYEEADEQESSPLGINHTEVPGAKANQFDWALLATAVDRISFVSFSLAFLILAIRCSV

SEQ ID NO: 32218 - DNA, 2426 bp, DROSOPHILA
ggtcacctgctggcggatctgtttttgcaacttctgcatctgcagcatgagcagagcctcgtttcgcatctggcggtaggagtaatccattttggccagtaccaacaggatcttagtattatgcctgcgacgaatttaactagtgcatgagctttcagttcatttccaccttacttactgcagacgcggctcggtgaggattgaatagaaaagaacgccggcggctgaaatctgacagagattagaggtgtccacgacgtagatcagcttcttgacatcctcgaaatactgcctccacaagggggccatactccctccaatttccaggatctgtatggacttgggcagatttttaccgccatgaggaatgttagctggagcttctgagggaggaggcttatttttatccccatttggcgattttgttgggaaatggattcggtaaatcccagtgccaatggtgggcatggaaaacgtggtctcatcgatggattccggatcctgtaaagctttcaaaaggtgcgttttgcccgctcttttggggcccaagcaaatgcaggtggacatttttgcttttacttggattttatttatggatctaacaaaggtagccttggttaccaaagtttattaattaattaattaaattaaaattgtaaaagttagttcagtaagcacgtacatgttgttatttctggcttattttatatataaaatatttacaaatggttgaacatttaatatcaatcgcgtaatcgaaatcttgtgtcagtagttcaattattttctgcatgatggcgctctcaggaaatcagtgcaaacgtttgaactgcgtgcttcgggagtcacgaaactcggaaccattcggccacacttcatattagcacatcaatgcataatgactatcgataaaacatcgatgtatttttcatcgttttttcatgctgtctcatcgtaaacaatatcaacattgttaaacgcttttaaattctctcaaaaaatgaaccacacagcaaacaaacctcgacaaatcggattcgacaggcagttctcagcggacgtgaacggcgttcccacggagatagtgttccactgctttgccaagaagtggttcttagtcataacgcagctcggcaagattcccggcatctacaacgtgcacttcgatgtcaaaaaggacgaaagagtggttccctatttgcacggacccgtggacaatccggagttccacgtatcggtgccaatcacgatgaactgctgcttgggcttggacaccgacgagactcgcagcgccatacagtttctggtcaacagaaccggactccacaagtgcccgacggagttcgtggtgggcttgggtctcaagaaaatcgacggacccaatcttcgtgccctagctaaggtcctcgaggagacgttattctagtctgcgttcgttatatccaataaatattagctgtgacagtttttgtaaaaaaaaccttgaacattttaatcgtagccttcaacccggctgaccaaattattggccattctactgcaacctctttcatgtgcttaaaaacccaaaatagaatctactcacaaaaaggcagtggaatgaccaataacatagtaaaccataataattctgcaccgttgtgaaaggaatgagtctcgataattttttagcaaacgtcttctatatttcctcacatttgtacattaaaaacgtgtacgcaggtcgggaaacgggtacacgtccacctctcgaggattacagcacaaacacaacggatgtccggttgtcgagaagttctctagaggatttagtcgaacagaccgaagcccatgtcgtcgtcagactggtcggactcctcctccttcttcttctcctccttcttggactcggcggctggagcagcggcggcggcagcaggggcagcaccaccggcgggagcggcaccaactccggatccgatgttggtgatcaggtccttgacgttgatgccctccagggccttggcgaagagaccgggccagtagggctccacctcgacgttggcggccttcaggatggtgttgatcttctcaccctggtgaatccaaaaaataagatcagcacaagttgcagcagtgcgaaagaaaccataggacccgcaaattgtccaatacttccggccgatggccgcggctttggaggatttgcttcgtccccgattgcaatatcgaaaaacttacggtgacggcgacatcgtcatcgacgaggatgagggaggcgtagacgcaggcgagctcggctttggtggacatgtcgaagtgctgtggctaatcactgattgtgcaagttgccaaaaattaattgtttataacaaatggccttagctcgggacgagaacaagcacgctggtcaaaatcctaaaccggaaagagcagttgatatgcag

SEQ ID NO: 32219 - DNA, 426 bp, DROSOPHILA
atgaaccacacagcaaacaaacctcgacaaatcggattcgacaggcagttctcagcggacgtgaacggcgttcccacggagatagtgttccactgctttgccaagaagtggttcttagtcataacgcagctcggcaagattcccggcatctacaacgtgcacttcgatgtcaaaaaggacgaaagagtggttccctatttgcacggacccgtggacaatccggagttccacgtatcggtgccaatcacgatgaactgctgcttgggcttggacaccgacgagactcgcagcgccatacagtttctggtcaacagaaccggactccacaagtgcccgacggagttcgtggtgggcttgggtctcaagaaaatcgacggacccaatcttcgtgccctagctaaggtcctcgaggagacgttattctag

SEQ ID NO: 32220 - protein, 141 aa, DROSOPHILA
MNHTANKPRQIGFDRQFSADVNGVPTEIVFHCFAKKWFLVITQLGKIPGIYNVHFDVKKDERVVPYLHGPVDNPEFHVSVPITMNCCLGLDTDETRSAIQFLVNRTGLHKCPTEFVVGLGLKKIDGPNLRALAKVLEETLF

SEQ ID NO: 32221 - DNA, 3044 bp, DROSOPHILA
aacacaacggatgtccggttgtcgagaagttctctagaggatttagtcgaacagaccgaagcccatgtcgtcgtcagactggtcggactcctcctccttcttcttctcctccttcttggactcggcggctggagcagcggcggcggcagcaggggcagcaccaccggcgggagcggcaccaactccggatccgatgttggtgatcaggtccttgacgttgatgccctccagggccttggcgaagagaccgggccagtagggctccacctcgacgttggcggccttcaggatggtgttgatcttctcaccctggtgaatccaaaaaataagatcagcacaagttgcagcagtgcgaaagaaaccataggacccgcaaattgtccaatacttccggccgatggccgcggctttggaggatttgcttcgtccccgattgcaatatcgaaaaacttacggtgacggcgacatcgtcatcgacgaggatgagggaggcgtagacgcaggcgagctcggctttggtggacatgtcgaagtgctgtggctaatcactgattgtgcaagttgccaaaaattaattgtttataacaaatggccttagctcgggacgagaacaagcacgctggtcaaaatcctaaaccggaaagagcagttgatatgcagtgtgaccgcgccgatgacgaagaaaaataccaaccgtctatgaaaatttgcatattattgtcaggaaatactaggtagaggaaaactcgttcaaactgccgagattatctcttatttaaactagtttatttttaagcatcttggacagaagccttagcataattctctggttatatgtttatctctctattttaataaaagacctttccgtacggttattgagaatattaaaaaaaagatattttggtataatgacgaatgagtcacactgcaactttatgtatacaattagtgtgcccatagcgtcgtttaaacgtaaacaaaaaaaaagcgcgcgaaaatgtcggaccaagaagacgtagttgtaaaaaaagaaaaaaaatgtatagaaaatattgatgagaacgacgaagagcccgatgatgtagattttaaggacagcggaaaaataagctccttgaaggccctgggtccatttatagccggcaaggagaatagccgcaacacggtttacctcagcgatgttccggatatttgcaaggataagccgtgcatgctgggcgtggacgaagcagggcgtggtcccgtcctgggacctatggtatatgggatctcctactgtccactggaaagtaacaaggctttagaggacctgggatgcgccgattccaaacaactaaccgaggggaaacgtgatatcatatttaacgatatcaacaccaaggaatatgcgaccagttgcgttggctgggccgtggagatcatatcgccgaacacgatcagcaccagcatgtaccggcggtcgaagtgctccctgaacgaagtttccatggactcggccatgggccttatccaacaggcgatcgatgcgggcgtcaatatagccgaggtttatgtggatacggtgggtccgccggagaagtaccaggagaagttgctcaaacgtttccccagctttaaaatcaccgtggcgaaaaaagctgactccacctatccaatagtctctgctgctagtatatgcgccaaagttacccgtgatcatgccctcaaggtgtggagcttccccgagggcttggtcattaaggacaacgagttcggcagtggatatccgggagatccggtcacaagaagatttctgaccgagtacatcgatctagtgtttggatttccacgacttgtgcgcttcagttggtccaccgcggaaaacgcactggcggacaaggcctatgacatggagttcgacgagccggattccgagaagcccaagtacgccggcaccaagctcacaaagttctttaagggcacaacaaaatccggcgaaataattcgcgaggagtgccgcttctttaagcaacgccatctggaaagtgtcatggagttttagcaacaaatgaaaataaaattaagttcaggagtatctatatttacaaagaataaagtttaatttaagtactttagtattaaattttaaaatgctaaaatacaaaaaacacccaggcccaaaacgaaaacagattaatttttatctttaatgtatttttgctgatgttcttgtgtttccgccaatctcgtgttcttaataattacgttcgattactgactacgtgggactgcagttacactgttctgaatgtatgcgtgaatcggtctgatctgatctcttggcatcccttttttggaggacaactgtggaattgggtaaaggacttttggtggggagggcggggagttggctggcatctttgatcgatacaataacaaaatgcaaagttatactaaacgattttcgtataaaaagggacgaccttagaaacatggagcttatgattaagattaaaatgaggcgagtcgcatcccgctgatctgaagagaacaacaaccatgttgaagcccccaaaaatcccaggtgcatatcgatattttgtgactcgaaactaagcgtacgaaatagacgtggacaaaagcgggaggatctcatctcaagaggtataccttaaagaactaattagaatttaaagcaattacaaatacgattgcagggcgggatagctaagaaaggagttacctaaggtccggactccagatccaaatcgacttatgttggtagaattgtaactgatcatatttcacttctttaaaaaatatagttaaatgcaatttttgaatcaaaagtaaaaacttctcgttccgtaagaaagtgaaaaactaccgatttcatttttaccaaataatgagctggaaaaggaatcttgactattttaagcgttggctcaatacacgaaatccagttgtggctgctccggcaatcagaactttcgcaggtccaacacgaaaacgctaccgtcggaggcactggcacccaccttagtgcccttggagttcca

SEQ ID NO: 32222 - DNA, 1044 bp, DROSOPHILA
atgtcggaccaagaagacgtagttgtaaaaaaagaaaaaaaatgtatagaaaatattgatgagaacgacgaagagcccgatgatgtagattttaaggacagcggaaaaataagctccttgaaggccctgggtccatttatagccggcaaggagaatagccgcaacacggtttacctcagcgatgttccggatatttgcaaggataagccgtgcatgctgggcgtggacgaagcagggcgtggtcccgtcctgggacctatggtatatgggatctcctactgtccactggaaagtaacaaggctttagaggacctgggatgcgccgattccaaacaactaaccgaggggaaacgtgatatcatatttaacgatatcaacaccaaggaatatgcgaccagttgcgttggctgggccgtggagatcatatcgccgaacacgatcagcaccagcatgtaccggcggtcgaagtgctccctgaacgaagtttccatggactcggccatgggccttatccaacaggcgatcgatgcgggcgtcaatatagccgaggtttatgtggatacggtgggtccgccggagaagtaccaggagaagttgctcaaacgtttccccagctttaaaatcaccgtggcgaaaaaagctgactccacctatccaatagtctctgctgctagtatatgcgccaaagttacccgtgatcatgccctcaaggtgtggagcttccccgagggcttggtcattaaggacaacgagttcggcagtggatatccgggagatccggtcacaagaagatttctgaccgagtacatcgatctagtgtttggatttccacgacttgtgcgcttcagttggtccaccgcggaaaacgcactggcggacaaggcctatgacatggagttcgacgagccggattccgagaagcccaagtacgccggcaccaagctcacaaagttctttaagggcacaacaaaatccggcgaaataattcgcgaggagtgccgcttctttaagcaacgccatctggaaagtgtcatggagttttag

SEQ ID NO: 32223 - protein, 347 aa, DROSOPHILA
MSDQEDVVVKKEKKCIENIDENDEEPDDVDFKDSGKISSLKALGPFIAGKENSRNTVYLSDVPDICKDKPCMLGVDEAGRGPVLGPMVYGISYCPLESNKALEDLGCADSKQLTEGKRDIIFNDINTKEYATSCVGWAVEIISPNTISTSMYRRSKCSLNEVSMDSAMGLIQQAIDAGVNIAEVYVDTVGPPEKYQEKLLKRFPSFKITVAKKADSTYPIVSAASICAKVTRDHALKVWSFPEGLVIKDNEFGSGYPGDPVTRRFLTEYIDLVFGFPRLVRFSWSTAENALADKAYDMEFDEPDSEKPKYAGTKLTKFFKGTTKSGEIIREECRFFKQRHLESVMEF

SEQ ID NO: 32224 - DNA, 3840 bp, DROSOPHILA
aataaaagatacagatacagatacagatagagatacagatacacatagatgtgtagaatcagatagacatgtgcacgacaacaaaatgtggctggactctctttaactttaacgttagaaaacaaacaagcgaaaagcattgtaaatcattcgttgaacagtttttaaatagtctctttcgagtagcatactgggttgggtagtcatagctttatagagattaaatgttttactaaaatttcaaaatcataaaacaacaaaatgtttataaatgaacaaggttcttaagttcctcagttatcagtatgatttgcaccttcagctttgcatccgttttgaagtcgaattcttttcaaaaccacatctataattcatgaaatttatggtttttccgagtgtgtgaaccgtatgtttaccttttttggcacaactggaagctcaagagcgttattcaaatttcgattagcatcttggtccccgaaccgtgggatctgtaatccccaactaagtagaacggccgcttctaggctgataaatatttggcttttgcatgccagcgcgatgagttcaacgtcgtcgttcgttgctagttaattttcaaacatttatcaacaaatatttggcgcttatcatttgttctagtcaaacaaaggggggcgggagtaggggcagactgggtggtgtggaagaacattcccattccccgccagaagcaaccttttcagctccagcatcagcatcagcaggtttgctgacccgaacacctgacaaatggcacaatgatttcacaaactccatttggcgcttctggattttgcacaacatttgtcgaagcttttctgctaagtccgcaaattaaaattgttattttttaggaagcatattaggtgggcgctttagagtatttcaaaaaataaatcactcgattaaattcaattagcattacaaagtgaatggttacaattgttttattttagagcgctataagtgacatttggtcttatagcttgtaatgcacatccatgaattgcagattggtggttacctccgcagcatcgggcatcacatccttggctgcattcaggtaggacttggcccccaaaatgtctccagactgagcagccaacacagccaagttattaagtgcggctccattctgggcatctgatgtgaggcatagttggagacaccttttggctaggttgaagtcaccagaagtctgtcgaaaagtatttcaataatgtatgcatacacatttatgtactttaacctcccttaccaccgccacaaaactgagattataccagatgtctgacttttggccgggttgggtagccgtggccaaagctcgttggaaacacggcagaaccaagtcgatttgcccgccatatagacaacacagcgctatattgcagtagagctcaggagactgggctcccaaggacaaaatcctccggtagtacatcaactaaggtaaagcggtcttttcaatttgtgcatatccttattattagggtcataatattaccgccatttccggattgttgtcgtaaaagtagcccacagcaatgctggccaaagattccacattgattggatgcagtttggcagccagtctgtaaagctgcagtgcgtcctcctgctgttccatggcctggtgaattctcgcctgctccagtcggtaggtgacgtcaaagggtcgcgaatccaccacttcgccgatcacgagcaaagctcgctcgggttgctttattctttggtatactctggagaggagaagataggtgtccggatggggaaagctggtcagggattgctgcagaaaaggctccgctcttcgaggataatgcagggcaagaagacatcggcccatctgctgttgccaccaccaggacagggtgcatccagtggacccactgggcttctggcgctcaacttccagaaccgcttgacaaagggagtgggctttttgcacatccgcttcgtggtagtagagaaactgaaataaggccttcaccagggtttcccgttcggcgtatatggtgggattcaggcgggacgcctggtacagtttcgaagtggcatcacctacattgaaagccgccgccgaggtggctcgaatcctggaggcggttccgcaacgagaacccagtgaggatcccggtcgactgagactcgttccaggtcgagccactgctgccgatcctggccgggaactatttaagcggccatcgctggagtgggccactccggcacccctgctcctcgcttgctgcgccctctgactggtaagggggcgtggctggaaagcggtctttatgctgctacccggtcgagcagcagtggctatacgctcgaactccacttcctcggtggctgccagcaatggcaaattattaaacaattaatgagtgattgtgcgccaaaaaaaatgtcacctgcttaccctcattccctccatcgtcctcgtccaggtcgtccacgtacacgcgctgcgtaagggcgcgcatctttaattgccacacgccctccatcagccaagtgggcatcatgatggacggcccagagtcgactgccccggctccacctccagctgctcctcttggcctagggccaatgcgttgcaaattgctaccgaatctgctgtgctccgcctgctgctgctggtgctgctcctcctcctcctcctccttggtggtgaacagttggacatggccatcgtgaccggcctgcaggagtgcgttgcacagctccgcacaccgctcgtaggagcgtcgacggtagagggacaccgccctgaagtagtccagctccagagtcgccagcatcgctgatgccatcgattcgcgtccttcgtctttagttgtcacactcgaaaaaaaaaaactgtacacagatgttgagaattccacatagaacgagtaaatttgattaggttggacagaaagaaatcatattttggaaatcatattcatattcatataataaataaatatttcgattctcaaaaaacttcttcttttcgttcagtatattgtgtatctgtgtccgattcaagtgtttgaattcctcggctgagttccttttttcgggctcttctgctgcgcttcgatcactggaattttaaaaccggatgcgtgtcattcctctgcccctccaagcccgaaaatccaggggcatcaggaatgcggctgctgcttcctgcggttcatctccctcctccgctcctctggactcctctgggttcgaatctggtcttagttcttggctcgtctccatgccatctaatttttctatgcccataatttgtacttcccgcctacctcttttgcacgggacctaatttgtagattcctccgctgctgcggttgctggtatcgactgactggcctctagcaggtataggtgtatactcgccatatggaaagggtcttccggtatagtttgaattggttaggttcggggtacgaggcgattaccatggatacctggtcggccaaaacattaattactttgcagtgcgcctgttccggtccctggggagtcaccctgttgggacaccctgactatacctctctgtaaatctacctaaatttttaatgttaatttgagcttaatataaccaacttgtttcttggtttgtcttccgggatgcatctgcatctcctctgctttctgctttttgggaagtttaggtcttaatctagatattaacttctatctgatagattaggcagtgttcacgtttaattttattaactaaagccacataaaaatgcatcggaatagagtttaatattttcactggtgtatcattaatgtgagtgacacactaatttc

SEQ ID NO: 32225 - DNA, 1650 bp, DROSOPHILA
atggcatcagcgatgctggcgactctggagctggactacttcagggcggtgtccctctaccgtcgacgctcctacgagcggtgtgcggagctgtgcaacgcactcctgcaggccggtcacgatggccatgtccaactgttcaccaccaaggaggaggaggaggaggagcagcaccagcagcagcaggcggagcacagcagattcggtagcaatttgcaacgcattggccctaggccaagaggagcagctggaggtggagccggggcagtcgactctgggccgtccatcatgatgcccacttggctgatggagggcgtgtggcaattaaagatgcgcgcccttacgcagcgcgtgtacgtggacgacctggacgaggacgatggagggaatgaggccaccgaggaagtggagttcgagcgtatagccactgctgctcgaccgggtagcagcataaagaccgctttccagccacgcccccttaccagtcagagggcgcagcaagcgaggagcaggggtgccggagtggcccactccagcgatggccgcttaaatagttcccggccaggatcggcagcagtggctcgacctggaacgagtctcagtcgaccgggatcctcactgggttctcgttgcggaaccgcctccaggattcgagccacctcggcggcggctttcaatgtaggtgatgccacttcgaaactgtaccaggcgtcccgcctgaatcccaccatatacgccgaacgggaaaccctggtgaaggccttatttcagtttctctactaccacgaagcggatgtgcaaaaagcccactccctttgtcaagcggttctggaagttgagcgccagaagcccagtgggtccactggatgcaccctgtcctggtggtggcaacagcagatgggccgatgtcttcttgccctgcattatcctcgaagagcggagccttttctgcagcaatccctgaccagctttccccatccggacacctatcttctcctctccagagtataccaaagaataaagcaacccgagcgagctttgctcgtgatcggcgaagtggtggattcgcgaccctttgacgtcacctaccgactggagcaggcgagaattcaccaggccatggaacagcaggaggacgcactgcagctttacagactggctgccaaactgcatccaatcaatgtggaatctttggccagcattgctgtgggctacttttacgacaacaatccggaaatggcgttgatgtactaccggaggattttgtccttgggagcccagtctcctgagctctactgcaatatagcgctgtgttgtctatatggcgggcaaatcgacttggttctgccgtgtttccaacgagctttggccacggctacccaacccggccaaaagtcagacatctggtataatctcagttttgtggcggtgacttctggtgacttcaacctagccaaaaggtgtctccaactatgcctcacatcagatgcccagaatggagccgcacttaataacttggctgtgttggctgctcagtctggagacattttgggggccaagtcctacctgaatgcagccaaggatgtgatgcccgatgctgcggaggtaaccaccaatctgcaattcatggatgtgcattacaagctataa

SEQ ID NO: 32226 - protein, 549 aa, DROSOPHILA
MASAMLATLELDYFRAVSLYRRRSYERCAELCNALLQAGHDGHVQLFTTKEEEEEEQHQQQQAEHSRFGSNLQRIGPRPRGAAGGGAGAVDSGPSIMMPTWLMEGVWQLKMRALTQRVYVDDLDEDDGGNEATEEVEFERIATAARPGSSIKTAFQPRPLTSQRAQQARSRGAGVAHSSDGRLNSSRPGSAAVARPGTSLSRPGSSLGSRCGTASRIRATSAAAFNVGDATSKLYQASRLNPTIYAERETLVKALFQFLYYHEADVQKAHSLCQAVLEVERQKPSGSTGCTLSWWWQQQMGRCLLALHYPRRAEPFLQQSLTSFPHPDTYLLLSRVYQRIKQPERALLVIGEVVDSRPFDVTYRLEQARIHQAMEQQEDALQLYRLAAKLHPINVESLASIAVGYFYDNNPEMALMYYRRILSLGAQSPELYCNIALCCLYGGQIDLVLPCFQRALATATQPGQKSDIWYNLSFVAVTSGDFNLAKRCLQLCLTSDAQNGAALNNLAVLAAQSGDILGAKSYLNAAKDVMPDAAEVTTNLQFMDVHYKL

SEQ ID NO: 32227 - DNA, 2636 bp, DROSOPHILA
tctttagttgtcacactcgaaaaaaaaaaactgtacacagatgttgagaattccacatagaacgagtaaatttgattaggttggacagaaagaaatcatattttggaaatcatattcatattcatataataaataaatatttcgattctcaaaaaacttcttcttttcgttcagtatattgtgtatctgtgtccgattcaagtgtttgaattcctcggctgagttccttttttcgggctcttctgctgcgcttcgatcactggaattttaaaaccggatgcgtgtcattcctctgcccctccaagcccgaaaatccaggggcatcaggaatgcggctgctgcttcctgcggttcatctccctcctccgctcctctggactcctctgggttcgaatctggtcttagttcttggctcgtctccatgccatctaatttttctatgcccataatttgtacttcccgcctacctcttttgcacgggacctaatttgtagattcctccgctgctgcggttgctggtatcgactgactggcctctagcaggtataggtgtatactcgccatatggaaagggtcttccggtatagtttgaattggttaggttcggggtacgaggcgattaccatggatacctggtcggccaaaacattaattactttgcagtgcgcctgttccggtccctggggagtcaccctgttgggacaccctgactatacctctctgtaaatctacctaaatttttaatgttaatttgagcttaatataaccaacttgtttcttggtttgtcttccgggatgcatctgcatctcctctgctttctgctttttgggaagtttaggtcttaatctagatattaacttctatctgatagattaggcagtgttcacgtttaattttattaactaaagccacataaaaatgcatcggaatagagtttaatattttcactggtgtatcattaatgtgagtgacacactaatttctatgatattttattatttagggtctctgcagccaatcgtagatggggtctaagcccactttggtgacggcgctggcctccacgatggtcacctgctggcggatctgtttttgcaacttctgcatctgcagcatgagcagagcctcgtttcgcatctggcggtaggagtaatccattttggccagtaccaacaggatcttagtattatgcctgcgacgaatttaactagtgcatgagctttcagttcatttccaccttacttactgcagacgcggctcggtgaggattgaatagaaaagaacgccggcggctgaaatctgacagagattagaggtgtccacgacgtagatcagcttcttgacatcctcgaaatactgcctccacaagggggccatactccctccaatttccaggatctgtatggacttgggcagatttttaccgccatgaggaatgttagctggagcttctgagggaggaggcttatttttatccccatttggcgattttgttgggaaatggattcggtaaatcccagtgccaatggtgggcatggaaaacgtggtctcatcgatggattccggatcctgtaaagctttcaaaaggtgcgttttgcccgctcttttggggcccaagcaaatgcaggtggacatttttgcttttacttggattttatttatggatctaacaaaggtagccttggttaccaaagtttattaattaattaattaaattaaaattgtaaaagttagttcagtaagcacgtacatgttgttatttctggcttattttatatataaaatatttacaaatggttgaacatttaatatcaatcgcgtaatcgaaatcttgtgtcagtagttcaattattttctgcatgatggcgctctcaggaaatcagtgcaaacgtttgaactgcgtgcttcgggagtcacgaaactcggaaccattcggccacacttcatattagcacatcaatgcataatgactatcgataaaacatcgatgtatttttcatcgttttttcatgctgtctcatcgtaaacaatatcaacattgttaaacgcttttaaattctctcaaaaaatgaaccacacagcaaacaaacctcgacaaatcggattcgacaggcagttctcagcggacgtgaacggcgttcccacggagatagtgttccactgctttgccaagaagtggttcttagtcataacgcagctcggcaagattcccggcatctacaacgtgcacttcgatgtcaaaaaggacgaaagagtggttccctatttgcacggacccgtggacaatccggagttccacgtatcggtgccaatcacgatgaactgctgcttgggcttggacaccgacgagactcgcagcgccatacagtttctggtcaacagaaccggactccacaagtgcccgacggagttcgtggtgggcttgggtctcaagaaaatcgacggacccaatcttcgtgccctagctaaggtcctcgaggagacgttattctagtctgcgttcgttatatccaataaatattagctgtgacagtttttgtaaaaaaaaccttgaacattttaatcgtagccttcaacccggctgaccaaattattggccattctactgcaacctctttcatgtgcttaaaaaccc

SEQ ID NO: 32228 - DNA, 582 bp, DROSOPHILA
atgtccacctgcatttgcttgggccccaaaagagcgggcaaaacgcaccttttgaaagctttacaggatccggaatccatcgatgagaccacgttttccatgcccaccattggcactgggatttaccgaatccatttcccaacaaaatcgccaaatggggataaaaataagcctcctccctcagaagctccagctaacattcctcatggcggtaaaaatctgcccaagtccatacagatcctggaaattggagggagtatggcccccttgtggaggcagtatttcgaggatgtcaagaagctgatctacgtcgtggacacctctaatctctgtcagatttcagccgccggcgttcttttctattcaatcctcaccgagccgcgtctgcagcataatactaagatcctgttggtactggccaaaatggattactcctaccgccagatgcgaaacgaggctctgctcatgctgcagatgcagaagttgcaaaaacagatccgccagcaggtgaccatcgtggaggccagcgccgtcaccaaagtgggcttagaccccatctacgattggctgcagagaccctaa

SEQ ID NO: 32229 - protein, 193 aa, DROSOPHILA
MSTCICLGPKRAGKTHLLKALQDPESIDETTFSMPTIGTGIYRIHFPTKSPNGDKNKPPPSEAPANIPHGGKNLPKSIQILEIGGSMAPLWRQYFEDVKKLIYVVDTSNLCQISAAGVLFYSILTEPRLQHNTKILLVLAKMDYSYRQMRNEALLMLQMQKLQKQIRQQVTIVEASAVTKVGLDPIYDWLQRP

SEQ ID NO: 32230 - DNA, 3950 bp, DROSOPHILA
acatccccatccacttccactctctgaatgaatttaatttgagatgatttgttgatggtttcgttgtggtgatttcttgctgactaatttaatgtgatttttaaattgccagaccgaggcagagtgtgtggcctgcgcaggggaatcagaatctcatcgggagattgattgggctcatgggagtgggggcagcgtttttacggaattaatgagatgacacgcctctcgctgggatgcgaaaccccctcgtgatcattatgaactaatctaatttgcaagcccgcgatgacaatcgaagacggaagagaagtcccctcgatccttgcccacctgggcaacagcgctaacgaggacgcttctcctcgaaggccccctccagtttaattcgcaaatcaaacaaccgcagggcagagatcggaaattcgcgcataagtaaattaaaaataaatttatgtcccgaccagtgagggggtcaggaaacgcatgtccagagggaaggagcgtgtgttaaccggtttcgggacgaacgcgaatgcaaatccaattaaaatttcgcaagcgatcaatgggcgaggggtggagggcggatcgcatcctgcgaatggcgctaagccgtaaaacgaagctgtgcgctgatttaaaacactgcggggcgtgcttattgattaaatacaaattgcgttcattcatcatcagctctagggtctgcttgatattggtgtttttattgttgctgctctggctggcaattaaattacgatttgaggtggatgctacgctcgttttgcaaataaaatccaatttcacagtcctctaaaatataggactaagatgcaaaactaagatgcagtttgaatcccatcacatttcgcgccaagggctgccaacctgggtgaacggttttgtggtgttagtgcgatatcttagatattttcatttaatcgattcctctcgataagccatcgatattttttgtataatgtcttgctttgttgtttacaaattcgtttttatgttacgcagttcgtccgtgctaaatgatacacatgaaagtaaattgcatcagattaagttacatcgaatacttctccacaattacagatgtgaataatccgccagaggtgttgtaaatttatgaataccaagggctgcgtacaaaacagtagtgcaattcagtggcaatgccaggcaccagtgacacacgacgactggtggacgccctggacgaggatgacgagattctgggcacggagggcagcttcgttcccgcttttcgtccgcaggaccaccatgcggatgagcaatgtctcatggaacgccagcaggacgaggtagttttggtgtccaacgaacccgagagtggacgactcttcacctacctcgtgttctacctgttgggcattggtaccatgaccccgtggaatttctttgtgactgcggaagatgtaagtttaacgagtggaaatttccgcacccgcatcctagtcaatttaactgaacttcggacatatcaattccaaacagctgaacaactgggccaagcgcaattctaaggcgcggtgcttatcagctttgtcgtcgtttctttacgacccacacccagacgaaaactctcttttttgattttctttgttttccgctgacttacgctttaaccctgttcgcttctctttcagtactggaagtacaagttccggaatgcatcgattaataacacagacctggaggaagagctcaccccgttgcagaagagttttacctgcgacttggctctcacggccactatttctgggactacatttctgctgctaaacgccattttcggacaccatgtgtccctgcgcaccaagatgttaggaacgctgtggatgatcctcatccttttcggggttacaactggcttcgtggagatcaacacagacacgtggcaggaacagtttttcctaatcactctcatcattgtagtgctgctaaatagtgggtaccatgaagtactccttgagtgtttacttaatatttattatatatagtatctgcggctacaatgtcgggagccctctacggagtcgctggtctatttccctccgagtttatcaccgctgtggttagcggacaggctcttggtggtatcctcacagccctggccttcattcttgtgcttgcattcgacacgggtcccaataccactgcattcatcttcttcattgtgggaggagtgctcatcctgctttgcattgtgtgctacgtaatcctggctcgaaagcctttctttaggtattatctcgaaggtggcgacaagtacaaggtcatccgggcagtgccctcgcacaaccggaatggaagcgctgagggcttgccgcttgagcctattttgcgtcaggtcatgtcgaagatctatctgcatgccatttccctagcgctcctctataccacgaccctgtctgtctatccggcagttacagtgcttatgcagtcagagtacggccacagcgtgtggacaggtaaacagaaaacctattctttttgttcgtgcctcatatgcggtgttcttacagatgtttattttctgcccgtcgtgaactacctgatatttaactgcggtgactattttggtcgtctgtttgctggctggatggagcgaccattaaaccagaacacttcgctactatttattgtagtgcgcatggcgtttgttccgttatttctatgttcaaactccagcgaacacagctttctgccagttttggtaaaacacgactatactttcatagcgatgatggtaatgtttgccttgtccaacggatattttacgaacatactacttataatggcgcctaaacgcgtaaagcagcatgaaaaggagctggcttcgtcgataatggcagctgctttgagctgtggcatggctgtgggatcactgctcagccttgtatttgttcaaatgctttgaattagccaacaaaataagtctgcccatagtgccttcgggagtttcagaatcttaagcattatagtgatagttaacttgatattggttgctcttccaactacttagggggtgttaatgtttttacttttgttacaagtctactgactgaaattatttacacagcgaaattttatttaaattttttccaaaacgaagtgttatttaatattttgagttattttgatgctgtgtgttgttttccaaattttactcattttttattttaacaagtttactatatcgggatgcctagatttaaggtttaaagttttcattatatactaggaataagacgatattaaaaaaattagaacaattaatttttcttgtttaacgtttatttcgggttttctgtggatcacaacaacaatgtggatagattttattggattgcttttgtcattaatcattgaattaattaatgaactccatcgtagcgcggtctgtgaagagttgtgtttaaaatatacttagactagaaatctagtggcgaattgtagtatgtgcatatatcgagggtatactgtacctataagtacacagcaacacttagttgcattgcataaataaatgtctcaagtgagcgtgatataagatcacccatttatgctttaagctaagtcagcatccccacgctggccgctggccatatatgcgcataagctctctctctctctctctctctctctctctctcttatacatatatatatacgctgctcttctgccgctgtcgacggcggcgcagtcgcagtatttaggtaagattagacactctgtagaggttaagcgggcagaaccgtttctgctactcgaagagataagaagaaataaaaaggtggcctgacggctgcacccaactgcaaggaaaacacgtgttctcaattggtggcatatattggtttattacatggcgaccgtgaggcaggagcctgcgatctgaggactactgaggaaatgct

SEQ ID NO: 32231 - DNA, 1396 bp, DROSOPHILA
aaattcgtttttatgttacgcagttcgtccgtgctaaatgatacacatgaaagtaaattgcatcagattaagttacatcgaatacttctccacaattacagatgtgaataatccgccagaggtgttgtaaatttatgaataccaagggctgcgtacaaaacagtagtgcaattcagtggcaatgccaggcaccagtgacacacgacgactggtggacgccctggacgaggatgacgagattctgggcacggagggcagcttcgttcccgcttttcgtccgcaggaccaccatgcggatgagcaatgtctcatggaacgccagcaggacgaggtagttttggtgtccaacgaacccgagagtggacgactcttcacctacctcgtgttctacctgttgggcattggtaccatgaccccgtggaatttctttgtgactgcggaagattactggaagtacaagttccggaatgcatcgattaataacacagacctggaggaagagctcaccccgttgcagaagagttttacctgcgacttggctctcacggccactatttctgggactacatttctgctgctaaacgccattttcggacaccatgtgtccctgcgcaccaagatgttaggaacgctgtggatgatcctcatccttttcggggttacaactggcttcgtggagatcaacacagacacgtggcaggaacagtttttcctaatcactctcatcattgtagtgctgctaaatatatctgcggctacaatgtcgggagccctctacggagtcgctggtctatttccctccgagtttatcaccgctgtggttagcggacaggctcttggtggtatcctcacagccctggccttcattcttgtgcttgcattcgacacgggtcccaataccactgcattcatcttcttcattgtgggaggagtgctcatcctgctttgcattgtgtgctacgtaatcctggctcgaaagcctttctttaggtattatctcgaaggtggcgacaagtacaaggtcatccgggcagtgccctcgcacaaccggaatggaagcgctgagggcttgccgcttgagcctattttgcgtcaggtcatgtcgaagatctatctgcatgccatttccctagcgctcctctataccacgaccctgtctgtctatccggcagttacagtgcttatgcagtcagagtacggccacagcgtgtggacagcgatgatggtaatgtttgccttgtccaacggatattttacgaacatactacttataatggcgcctaaacgcgtaaagcagcatgaaaaggagctggcttcgtcgataatggcagctgctttgagctgtggcatggctgtgggatcactgctcagccttgtatttgttcaaatgctttga

SEQ ID NO: 32232 - protein, 404 aa, DROSOPHILA
MPGTSDTRRLVDALDEDDEILGTEGSFVPAFRPQDHHADEQCLMERQQDEVVLVSNEPESGRLFTYLVFYLLGIGTMTPWNFFVTAEDYWKYKFRNASINNTDLEEELTPLQKSFTCDLALTATISGTTFLLLNAIFGHHVSLRTKMLGTLWMILILFGVTTGFVEINTDTWQEQFFLITLIIVVLLNISAATMSGALYGVAGLFPSEFITAVVSGQALGGILTALAFILVLAFDTGPNTTAFIFFIVGGVLILLCIVCYVILARKPFFRYYLEGGDKYKVIRAVPSHNRNGSAEGLPLEPILRQVMSKIYLHAISLALLYTTTLSVYPAVTVLMQSEYGHSVWTAMMVMFALSNGYFTNILLIMAPKRVKQHEKELASSIMAAALSCGMAVGSLLSLVFVQML

SEQ ID NO: 32233 - DNA, 3668 bp, DROSOPHILA
cttctgatgttatctccatacatttttctcaacttgacaatatttctgctcaatctctttaagatatgacccagaaatgaagatatttttgcattaattgcatttattcaagagaaggaattgtgctcttttttgatacgatgcttttacatatgtacatatttccacaccacggctttccatttccgtgcgtctttccaggaacatcttagtttgttattgcatgaccttgctcgcccttgattaacgccgtctgtcccgcaaaaagtactttgatctggtcagcataaagtgctttatatctacagatctttttcttttatgtagtcccttgaaacgatcacgagaacttttcggtgccactaccatccggttcattattttcgttgtcgaatttttacctttcttctggtcttctgggcatcttaaaaatctggtgtgctgaaattgtttatatcggcgcaatcaaaatacaaataaactaactatgttctgacaaacaattgcattgttgaagcaaacgtgaaattatctgtgtacgctttttgccaaattctcttcgattcgaaacaatttattagtaaaatatatttaaagaaaagatttaggtttcgatccactaataggattagctgtgtttagaataaaaaaaaaatatatatatataagcaaaatctttgtggagaatataaagcatgaattccatgcttttccaaatgtcatttacaaacacaatatacatatacaaactccatttatatttttataaacattgaaaagtaactataagtaacataagaacatgttcccaaaaatgatagggtatgagttgtccccatcagcctgatttcccttacatctgctgtccatcacccctgtgtttatttgctctcgttggttccaattctgattgttatccgcccccaaataagaggcaacatcatcgaatggaattctccgaacgtttcagatttagtttagagttcactgagtttccacgatgggtttgcattggcaatggctgatctgggcattggtggggctccatgtggcactggccaccaagtggtatggcggtggaatggacttcaatgatcccaccgcctggctagatgaccacttgccttgtgcacaggatttggtcgtttttccagagtactacccagctctgctgcccttgcccgaggacatatccattgatggcttggttttccccagagaaggggcgatccttttggcagaggaatccaccattacctttggatctgataagcagccctcctgtgagagcgatgagaataaggcctatttgaagccaccgaagtcgagtaaatggttcgatcctggcacctggacggacaaatctaaggaattttccacattcacaccagagctggagaggattccctgtgatgacgagcaggtcataatcaaggggcacggaccattggcctttgacctagaaaacgtgcagtatctgaggctgggacagcttattctggctggttcttccatttccaaaacgtacttggagcaacttatcagcagagatctgggccagtttctcttttacaatgccgagtacgtccaggtggagtactacagaggagagctgtgtggctgccacaaggacttcgagcgactgctggaacccgtttgccataatgtccaggagcagtgcgagacgccccactgcttgtctccagttcgacccttgggatcgtgctgcctaatctgcggggccattctatccacgcccacgacccactgcaccgagggcagtagaaaggagttggtggcccagataagtaacctcatcagccaggagagcctgaaggatcagatcggcctacacgtggagtttgtgggctcccagaagtttggaaactgcctgcaggcggtggtaactgatcgccataaatatagtgaacggagcttggagtttctacagcaaaacgaacacaattggaacaagacaggaacaacgttaaaagtttctggtcgaccctataatccgaatgttagcttctcctcgattgttctcatccttttctgcatggcactggtgggtctggtttctgtggtcattttggcgcactttatgcctgagaacccctacctaaaccgcataccacagtggatccacgacccccgtctttggaggtggcgtcacttgggattgagactgcgccggaatctgctgtttaaccgcttcgacaatggtggcgcagagggtggatccagtgaaggaggagcttctggtgtggatcgtctgggaattatggcttacgatccggaaagtggcgaggtgagggagcgagcctttgacaatccgatgtttgagcagggaggagctttggaggaggctgccaaggagtcgcaggagcaggatgaaatcctgagtgtccccaaaatggagactggtgatctggacgccagaagtgtggtggatgaacaggagcttacggaaatcaatttggaaacctgcgaggcggacaccgacgaggagaccatctaattaagattctcaaaaataagacatagaaacctgattcgaaagcaccaatggagcatcacgtataatctgatgtacaattttaagattgtgtgttctatatatgtatattaatagatctgcttattaaagtatttgttatgattacattataaatgttcctgggcgcagatggtccagtaattaactctatttacaagttgtaggcggatctgcgtgaatattttcggatattattgttcagtgaatcaattactaacgcacaatcgatgcatcgcgtgtaacgaaagggcaaagaaccaagagagcacctgataattttaccaggtaattcagttagcggtgccttttgtcgcgatggccttgttccttgaccttcacagggggtggattggtggtgatgggaccgggaaacgatagttgccattagctgcgaagatatttccagaagcctttgtcccccggctcataaatgtggctcatgtgtatccgtatctattcatagacacgcttgggaaggcacgtgcctcccccagttgccataggatatgaatccgtagatatgcacggatctagggacgtgggacggaggcgtaccgatgcggattaagcgaccgctttcggatttcattttagcttctgccaattcattctgaagtggaaatactttgtactacggcgattgagagtgcgggtgataagcgcaccttatcagtttcaaagcgaaagcgaaaatacatacagtgaacagtcgagcatgttgtagcaatactttgaagagtttcacgattgtttggaggtgtgcttagtgagtgactactgtatgcaatcgtatattccttgctgctagtgactggactctggctactccacaatcagtacatatctggcaccaggagattcaacatggccaagcccaagtcaaaatcgactagcaaaggttccacttcgccgggttttaacaaggcggtgcagttgctcctccattttacagccgtgctgcagttcaactatggcgtgtacatcttccacacactcgacatgcccaacacggtgcccttcggcggaaaatttaagttcctaacttttatttgtgcggtaagccgatgcgttcatatcgaaaatctctacaccggttaaacgaaggcgatgc

SEQ ID NO: 32234 - DNA, 1668 bp, DROSOPHILA
atgggtttgcattggcaatggctgatctgggcattggtggggctccatgtggcactggccaccaagtggtatggcggtggaatggacttcaatgatcccaccgcctggctagatgaccacttgccttgtgcacaggatttggtcgtttttccagagtactacccagctctgctgcccttgcccgaggacatatccattgatggcttggttttccccagagaaggggcgatccttttggcagaggaatccaccattacctttggatctgataagcagccctcctgtgagagcgatgagaataaggcctatttgaagccaccgaagtcgagtaaatggttcgatcctggcacctggacggacaaatctaaggaattttccacattcacaccagagctggagaggattccctgtgatgacgagcaggtcataatcaaggggcacggaccattggcctttgacctagaaaacgtgcagtatctgaggctgggacagcttattctggctggttcttccatttccaaaacgtacttggagcaacttatcagcagagatctgggccagtttctcttttacaatgccgagtacgtccaggtggagtactacagaggagagctgtgtggctgccacaaggacttcgagcgactgctggaacccgtttgccataatgtccaggagcagtgcgagacgccccactgcttgtctccagttcgacccttgggatcgtgctgcctaatctgcggggccattctatccacgcccacgacccactgcaccgagggcagtagaaaggagttggtggcccagataagtaacctcatcagccaggagagcctgaaggatcagatcggcctacacgtggagtttgtgggctcccagaagtttggaaactgcctgcaggcggtggtaactgatcgccataaatatagtgaacggagcttggagtttctacagcaaaacgaacacaattggaacaagacaggaacaacgttaaaagtttctggtcgaccctataatccgaatgttagcttctcctcgattgttctcatccttttctgcatggcactggtgggtctggtttctgtggtcattttggcgcactttatgcctgagaacccctacctaaaccgcataccacagtggatccacgacccccgtctttggaggtggcgtcacttgggattgagactgcgccggaatctgctgtttaaccgcttcgacaatggtggcgcagagggtggatccagtgaaggaggagcttctggtgtggatcgtctgggaattatggcttacgatccggaaagtggcgaggtgagggagcgagcctttgacaatccgatgtttgagcagggaggagctttggaggaggctgccaaggagtcgcaggagcaggatgaaatcctgagtgtccccaaaatggagactggtgatctggacgccagaagtgtggtggatgaacaggagcttacggaaatcaatttggaaacctgcgaggcggacaccgacgaggagaccatctaattaagattctcaaaaataagacatagaaacctgattcgaaagcaccaatggagcatcacgtataatctgatgtacaattttaagattgtgtgttctatatatgtatattaatagatctgcttattaaagtatttgttatgattacattat

SEQ ID NO: 32235 - protein, 505 aa, DROSOPHILA
MGLHWQWLIWALVGLHVALATKWYGGGMDFNDPTAWLDDHLPCAQDLVVFPEYYPALLPLPEDISIDGLVFPREGAILLAEESTITFGSDKQPSCESDENKAYLKPPKSSKWFDPGTWTDKSKEFSTFTPELERIPCDDEQVIIKGHGPLAFDLENVQYLRLGQLILAGSSISKTYLEQLISRDLGQFLFYNAEYVQVEYYRGELCGCHKDFERLLEPVCHNVQEQCETPHCLSPVRPLGSCCLICGAILSTPTTHCTEGSRKELVAQISNLISQESLKDQIGLHVEFVGSQKFGNCLQAVVTDRHKYSERSLEFLQQNEHNWNKTGTTLKVSGRPYNPNVSFSSIVLILFCMALVGLVSVVILAHFMPENPYLNRIPQWIHDPRLWRWRHLGLRLRRNLLFNRFDNGGAEGGSSEGGASGVDRLGIMAYDPESGEVRERAFDNPMFEQGGALEEAAKESQEQDEILSVPKMETGDLDARSVVDEQELTEINLETCEADTDEETI

SEQ ID NO: 32236 - DNA, 4196 bp, DROSOPHILA
cactggatgtgcctgctgtctaggccatcaaaccagggtttgtcgtccctgcccttcttggcgtacagtcggtaattgagagtcccattgatgggctccagttccacatccgactgctgcgcacttgcgggcgttgtgctgccgaacttggccgaactggccgatgcgtctgcgaccacccacaggcataagatcgcaacctccaggaacatcctgcggtttgtaaataaccaagttattttaattgcccacaccatttgccagaggcgagtcactcacataatgtttggcatgcgcggaaagtttaagtactgcatccgcttataaaaatcattaaatagctgccttgtgtgaattttaatgggctgaatgcccgtttcttgctcagcggttcgtcagtgcatcgtgaaggcgctttcgttggactcgggatatcctggtttaattgttccctttgaaggattgcagtgtttttaaaaaagagaaaaaaaaaacaagaaccaaggaggaaaacaaaaataaacgcgactcaacgtgaagctgaagcaacaaatgtgcgaccattcagggccagtttaaatatacccatgttatcggtcagcgagatttgcatgttatcggtcggcatcggttattatcggtcatagctgcaacaagtcgaatgatatgcaaacaaatcggatttattttgttcgatcgtaacataagataacatcaacataaaataagaaatatgatcatatgtagaaatgcatcagcaaacgaaaaaggtgttccccgcaacattttgactatatggcaatgctggccgctggcttatttatttatgccatgcgctcgacggtcacactgggtgcggagtatcgataacaccgcgatagtagcgcaccaagcatcgatgtagtttttacatccctattctgcaatattatttcacggcacggtccaaaaacacggataacagggcttggttggagtcgcgcaaacgcaaatagaagccatggacgttgcccccgcaccgcccgccagttccggcggcgatcatagcacccagcaggcgccgatcagtccgaatcaaaatgcaaaccaagcgccggtcgcactcgcaaaggcaacaacaatcgaaaatggtgtacaaacaggaggagcgaaaaagccagagagctgcggtgagaaagcccccggttagcaaacttgctcgaagctagtctagtttcctggttaacgtttaccttttagccgtagagccgacacattccactgatgctagccagaaggacgacgacgagggcaagccgaagaccgagctggctgacaaagtattgattaccatatgcagcgccgatcgcaagatcaagaagaccttcatgtcgttgcccactcgaaaggatgtaatcgacaaaggtaaggaacgtccgacgaattgggtatctattcatccagtattccgaatgaacgttgcccagttggaagttattaaccagtagacagtctttaataagaatctattgggtttaagcttagagcatttctgcatttaaaaatataaatttgatcaatgggtgatatatttatctaggatagaaattaaataattgtacatattttatttaatttatatcaataatatatttgtattcggtagctcacaaatacggcctgtgcggcaacacaattgtcctggagagcaacggctgcgagatctgcgaggacgacgtgctcttgttcgctgccaaggagaagattctgttgatgctcctcgccgagtcggaggagtatgtggtgcttcctccgccatcgcccctcaaccgatccgaacgcgccggcagctcggtggatcccagcttctatgccaacaacagtattgtgtcgaacccgaacgattcgacggtctctaatgacgaaaccatgtcactgtccagcgtaacgccatcaagtgcaaagagttctgctctattcaaggagttctcgataccctggagcaaggtgcctggggacataatgaaactactaaagggaaaggggagtttgggcaagcggttgaatacacttgcgaatgttttggtggaggctctccgtgaaatatccgcccacattcccatacggattttccggcaggtcgcccaacaggcggctgaaaagtaccccgactccttactcgaaaaagaccgcgagggacagtttatagccaccactccgcaatcgctcatatccaagatgatcaaccgtaacaatgccctaaacaaaccccagaaacgcggcagctcgggaacctttgagatccacatccctaataaaaaacgaaaattcggaggtggtgcttccaatggtgatgcaaaatcgctggctcttaacagggatctggagcacaaaaaggagttactaatctccagctaccgaggcagttccccactggaacagtccgtcataatcgaatatatgaaagagtgctttccgttgcagcgctccttttttaataacagcgaaaagatcccagatataacggccattaaggacaattggccatatatttttgacaaggctgtgctgtaccagcactttgagctgcttatgtccatcgatccccgggctctagagaagcgcttggctaccgaaaaggatcgctttttcaggttctttaagagttcaaagaacaagaagatcagctctttggacgagaccaacgctaatttcctgcgtggcatagcgtactattttaatgaggatcccgactacattttcaagcacctcgagaacagttcccttagcaaggaatcactgcaaagcacgaatcccacaaacgccccctgggtggctctagtcagtaagtacacaaaaattaatatcactaaaagtgtttaaatacttttaaaatatttatcttcccacagattcacccataacaacggccgacggcgtggaatcgcaaatggaggcgaaggtctacattgaaggccagataatggccacattcgccgccaaagacgaagacctgccggacattctggcccagttaatctgctactactatacctttaacatgatgtaccctaaggaagccaatcaaacactcgaatttatcgtcgtttactttctgcagcactcgccggaacaagtgcgatcggccaaaaagtctgtgaccaccaacggcaagtttaaccacctcatcgccaagcttgccaatgtacatggctgagatttcatttggacgatttttggctggaaccatggcgcagcgagcgccacttcaatctcctcttgctcctcccaacggaggaggagccgaactctgtttagtttatttattttcgccgacctattccacatgtatttgtaccactatttttaagatttgcataaagtgtgtagtaatgttgtgtatacatttctgatttgtcacccgacaaagaatcttttatttattttttaattgaaacttcatgttttgccagttggggttgtgaagtcacctaagggaaaataagctaaacttattcattatgtggccctttctgaaacggatttctcctatttggtcccttctttcgataaggatgtgcattatctcgcattttctgaaagggatggctaccctttgcttctttcgcatttgatgatttcacatttcgacgtgtatgattcgaacgttctaattcgaacttgtcctttgtcagctgtctatatttcaagtcctttagggcagatttaagtgttgcattctttttcgttaaattgaaacccaaagtgagttgctttcggaaaaagttccgctccttaaaagtgaagttctcaacgtccgtggagagctgttgttttctttccgtggagggcttctcatcgttgaagggctcccatgtagtatcctgcgaccggttggcttctatgacatttcgacggtggttcttctgacgctgctgcatgaactgccttgcgtcctcgctgtccacatcctggtgtccccggtccgaagaatccgtaattatgtcgttcttcacatgctgccagggcgtcgcagtagcttgtggaacgagcgctggtttcggttggacatacttctttggcttgaacttggttttgccccagtccttggtgcggctctgcaattgacgttcatggcgatcattatcttctgttttcttcggattggtagaattcatagcgttgttatttgtggttaaactgaatatcgtccatct

SEQ ID NO: 32237 - DNA, 1818 bp, DROSOPHILA
atggacgttgcccccgcaccgcccgccagttccggcggcgatcatagcacccagcaggcgccgatcagtccgaatcaaaatgcaaaccaagcgccggtcgcactcgcaaaggcaacaacaatcgaaaatggtgtacaaacaggaggagcgaaaaagccagagagctgcgccgtagagccgacacattccactgatgctagccagaaggacgacgacgagggcaagccgaagaccgagctggctgacaaagtattgattaccatatgcagcgccgatcgcaagatcaagaagaccttcatgtcgttgcccactcgaaaggatgtaatcgacaaagctcacaaatacggcctgtgcggcaacacaattgtcctggagagcaacggctgcgagatctgcgaggacgacgtgctcttgttcgctgccaaggagaagattctgttgatgctcctcgccgagtcggaggagtatgtggtgcttcctccgccatcgcccctcaaccgatccgaacgcgccggcagctcggtggatcccagcttctatgccaacaacagtattgtgtcgaacccgaacgattcgacggtctctaatgacgaaaccatgtcactgtccagcgtaacgccatcaagtgcaaagagttctgctctattcaaggagttctcgataccctggagcaaggtgcctggggacataatgaaactactaaagggaaaggggagtttgggcaagcggttgaatacacttgcgaatgttttggtggaggctctccgtgaaatatccgcccacattcccatacggattttccggcaggtcgcccaacaggcggctgaaaagtaccccgactccttactcgaaaaagaccgcgagggacagtttatagccaccactccgcaatcgctcatatccaagatgatcaaccgtaacaatgccctaaacaaaccccagaaacgcggcagctcgggaacctttgagatccacatccctaataaaaaacgaaaattcggaggtggtgcttccaatggtgatgcaaaatcgctggctcttaacagggatctggagcacaaaaaggagttactaatctccagctaccgaggcagttccccactggaacagtccgtcataatcgaatatatgaaagagtgctttccgttgcagcgctccttttttaataacagcgaaaagatcccagatataacggccattaaggacaattggccatatatttttgacaaggctgtgctgtaccagcactttgagctgcttatgtccatcgatccccgggctctagagaagcgcttggctaccgaaaaggatcgctttttcaggttctttaagagttcaaagaacaagaagatcagctctttggacgagaccaacgctaatttcctgcgtggcatagcgtactattttaatgaggatcccgactacattttcaagcacctcgagaacagttcccttagcaaggaatcactgcaaagcacgaatcccacaaacgccccctgggtggctctagtcaattcacccataacaacggccgacggcgtggaatcgcaaatggaggcgaaggtctacattgaaggccagataatggccacattcgccgccaaagacgaagacctgccggacattctggcccagttaatctgctactactatacctttaacatgatgtaccctaaggaagccaatcaaacactcgaatttatcgtcgtttactttctgcagcactcgccggaacaagtgcgatcggccaaaaagtctgtgaccaccaacggcaagtttaaccacctcatcgccaagcttgccaatgtacatggctga

SEQ ID NO: 32238 - protein, 605 aa, DROSOPHILA
MDVAPAPPASSGGDHSTQQAPISPNQNANQAPVALAKATTIENGVQTGGAKKPESCAVEPTHSTDASQKDDDEGKPKTELADKVLITICSADRKIKKTFMSLPTRKDVIDKAHKYGLCGNTIVLESNGCEICEDDVLLFAAKEKILLMLLAESEEYVVLPPPSPLNRSERAGSSVDPSFYANNSIVSNPNDSTVSNDETMSLSSVTPSSAKSSALFKEFSIPWSKVPGDIMKLLKGKGSLGKRLNTLANVLVEALREISAHIPIRIFRQVAQQAAEKYPDSLLEKDREGQFIATTPQSLISKMINRNNALNKPQKRGSSGTFEIHIPNKKRKFGGGASNGDAKSLALNRDLEHKKELLISSYRGSSPLEQSVIIEYMKECFPLQRSFFNNSEKIPDITAIKDNWPYIFDKAVLYQHFELLMSIDPRALEKRLATEKDRFFRFFKSSKNKKISSLDETNANFLRGIAYYFNEDPDYIFKHLENSSLSKESLQSTNPTNAPWVALVNSPITTADGVESQMEAKVYIEGQIMATFAAKDEDLPDILAQLICYYYTFNMMYPKEANQTLEFIVVYFLQHSPEQVRSAKKSVTTNGKFNHLIAKLANVHG

SEQ ID NO: 32239 - DNA, 3787 bp, DROSOPHILA
gggttgtgaagtcacctaagggaaaataagctaaacttattcattatgtggccctttctgaaacggatttctcctatttggtcccttctttcgataaggatgtgcattatctcgcattttctgaaagggatggctaccctttgcttctttcgcatttgatgatttcacatttcgacgtgtatgattcgaacgttctaattcgaacttgtcctttgtcagctgtctatatttcaagtcctttagggcagatttaagtgttgcattctttttcgttaaattgaaacccaaagtgagttgctttcggaaaaagttccgctccttaaaagtgaagttctcaacgtccgtggagagctgttgttttctttccgtggagggcttctcatcgttgaagggctcccatgtagtatcctgcgaccggttggcttctatgacatttcgacggtggttcttctgacgctgctgcatgaactgccttgcgtcctcgctgtccacatcctggtgtccccggtccgaagaatccgtaattatgtcgttcttcacatgctgccagggcgtcgcagtagcttgtggaacgagcgctggtttcggttggacatacttctttggcttgaacttggttttgccccagtccttggtgcggctctgcaattgacgttcatggcgatcattatcttctgttttcttcggattggtagaattcatagcgttgttatttgtggttaaactgaatatcgtccatctgaccatctgaggtgccagtttgagaaactatcgaatctagctatatatgttaaatcttataaaaaccttccattggtcacttcacattttagtccattacatgtattatgtcacatattgtcacagtattatatatatatattatattatatataaggtattcaaacttaatatacatataatgaatagcagttttggcttgaaagaagccacttcggcagtcccaccaacaatcggatcttatcgataaccccaatcggctcaacacgtgcgccgcaactaggcggttttataaatattaacaattccataatgcacaacagtggaggacaatccggctggaacctttcaggagaggaaagaaaaccgttttcgaattacggccgcaacaatcagcagaggcgcagcagtggaggcgggggaagaggcagccacagccaaaatcgcgccgccaatggaaactggccagacgctggatcggaaggtgggcagaatggaaacgcgtttaacaagttcagagatccccaacaggagctggataatcatcagccaaacaagagagggggccgaagaaatagaggcggtggcggaggaggtggtggttggggtggcaggcgagggaaccgcggcagagattccaataggcgtggtggccgtaacaactcgtggcaacctaaggatcagcatgttagtcctggccaaagtaacatgctgtacttcgataatgtgggggactttaccgaagacccacctctgcctcgatcctcgcctgctccctcctctctcagacaggagagcctgccacctgttactttcgctgcggacttgacgccaccaccacctgtatctgttgcaccacctgatgtggctgttacgccagaagaacctactgtgccgctaatcaatatcaagaaggagaaagaaatggagcacaagtcaaaaataaagcaatttgtcaaagcggagcccaaatctcctaaaaagaagaaggttaactcctctaggtcgtcatctacttcgggagaggagtctgaacccgaaccaggggaaatggtagtcaacactaaggcagtggtggtgccgtccccaaaagcgaaggccatcaaaacacctgtagcatcaactccgaaaccaaaggctgtaaaaccagtttcgtcctccgactcctcaacttcggacagcgacaccgatgatgaacagagtcatccgccggcaaagagtaaaaagatggaaaagaacaccgaggaggatgttgtctgcatgggctctcaggagcgccagtttaccattaccgatgaggaggaaagcaccgaacctgaagacgacaagaaggccagaaagcaaaaaaacaagggtaaaaccgtggatgtgtgtggcatatgcgacaagaaggtaaatattttaaaagaatgttacccaatttaaaaaaatctcttccagggccacacctccttccagtgtcagatgatatgtcgtaattgctccggtagttatcatggtctcaaaaactgtccaaacccgcccaatctaaatattgccatccagtcgtttgtggagtttgccatgcagcaaatgactgcctttcattgcgagcaaggatttggatttcctgctggcacagtcacagctccagtttcagcaaaacccaaaaaggacaaaaaggcgtcaataaaaaagataaagaagtcttcacagaaaaggatgaaggtggagccgaaagatcatgacgaagaagatgacgaggaagatgacgacgaagatgaagatgacagcagcgagagcgatgactcggagtccagcgaagagcctcacccagctcctgtgtccaaacagaagcggaaacgaggcaccaaagcctccgtatcggccgcagccagtctacctcctcaagtgtttccatttccccttctaggcgccccgggcgccccttttaactccatgatgtattcttatagagctccgtttaatttttctaaatagttatagcgtgagttagttgtaaaggaacgtgaaagataaatacattttcaataccaatggatttagttctttcattttaatatttacggaatttaggaattacgcctctgttgtttaaaacgagaatgaagttgaattaatttttgtacaatacataccggggaataatatcgataaccagggcagacctatttatcgaaatgtatcagccgacgcagccctggttttgtgttttgccagctgttgcttccacgcttttgaataaaaaatcaaattaatagtgtttactaggaaaaacgtatgaaactcagtgaaaaaactttgcaaaaaacttttgggtaagtgtatttacctaaatttattggttttctacgattaaatctcaagagctttgagtttttaactaaaggatccaggtgtctgatttttaaagttatactcaacttatttataaggaagcattttaaacgataaaagaaaacatagtacataaatttaggacatcatattgaaaatgaatattcctggactctgaagtatgtaagtgcctcggaaacgaaatatacaagtaatttttagggctacttcccgccagagctaaggcatcctgctttaagatcaattttccttgccctgtctgcttgacaggatcctagggtatgcagagagccagggtctcgcgttcctgctcggtgccgcaggacactgggtgattctggccccggggatcgatgcctggcttgagcatcgtctgctgcagctcccagatgatttcacacgactggacgctcacggccagcttaagcaccgactgatagttgagcggattaaccgcatagctgaggatacccctggcaatctgctcgaacaaatagttcctgtcaagcagaaggagctcctctcgtacctccatcatacggttttcaaagtggcactgaatcgctgcaaataccagcttgtccagacccaccaatagatcccgcttaaacttcaccaggtagtgctctatgaacacgatctggttgcgatttagatgcggcaggcgcaccttgtcctgtattacctg

SEQ ID NO: 32240 - DNA, 1739 bp, DROSOPHILA
gctcaacacgtgcgccgcaactaggcggttttataaatattaacaattccataatgcacaacagtggaggacaatccggctggaacctttcaggagaggaaagaaaaccgttttcgaattacggccgcaacaatcagcagaggcgcagcagtggaggcgggggaagaggcagccacagccaaaatcgcgccgccaatggaaactggccagacgctggatcggaaggtgggcagaatggaaacgcgtttaacaagttcagagatccccaacaggagctggataatcatcagccaaacaagagagggggccgaagaaatagaggcggtggcggaggaggtggtggttggggtggcaggcgagggaaccgcggcagagattccaataggcgtggtggccgtaacaactcgtggcaacctaaggatcagcatgttagtcctggccaaagtaacatgctgtacttcgataatgtgggggactttaccgaagacccacctctgcctcgatcctcgcctgctccctcctctctcagacaggagagcctgccacctgttactttcgctgcggacttgacgccaccaccacctgtatctgttgcaccacctgatgtggctgttacgccagaagaacctactgtgccgctaatcaatatcaagaaggagaaagaaatggagcacaagtcaaaaataaagcaatttgtcaaagcggagcccaaatctcctaaaaagaagaaggttaactcctctaggtcgtcatctacttcgggagaggagtctgaacccgaaccaggggaaatggtagtcaacactaaggcagtggtggtgccgtccccaaaagcgaaggccatcaaaacacctgtagcatcaactccgaaaccaaaggctgtaaaaccagtttcgtcctccgactcctcaacttcggacagcgacaccgatgatgaacagagtcatccgccggcaaagagtaaaaagatggaaaagaacaccgaggaggatgttgtctgcatgggctctcaggagcgccagtttaccattaccgatgaggaggaaagcaccgaacctgaagacgacaagaaggccagaaagcaaaaaaacaagggtaaaaccgtggatgtgtgtggcatatgcgacaagaagggccacacctccttccagtgtcagatgatatgtcgtaattgctccggtagttatcatggtctcaaaaactgtccaaacccgcccaatctaaatattgccatccagtcgtttgtggagtttgccatgcagcaaatgactgcctttcattgcgagcaaggatttggatttcctgctggcacagtcacagctccagtttcagcaaaacccaaaaaggacaaaaaggcgtcaataaaaaagataaagaagtcttcacagaaaaggatgaaggtggagccgaaagatcatgacgaagaagatgacgaggaagatgacgacgaagatgaagatgacagcagcgagagcgatgactcggagtccagcgaagagcctcacccagctcctgtgtccaaacagaagcggaaacgaggcaccaaagcctccgtatcggccgcagccagtctacctcctcaagtgtttccatttccccttctaggcgccccgggcgccccttttaactccatgatgtattcttatagagctccgtttaatttttctaaatagttatagcgtgagttagttgtaaaggaacgtgaaagataaatacattttcaataccaatggatttag

SEQ ID NO: 32241 - protein, 539 aa, DROSOPHILA
MHNSGGQSGWNLSGEERKPFSNYGRNNQQRRSSGGGGRGSHSQNRAANGNWPDAGSEGGQNGNAFNKFRDPQQELDNHQPNKRGGRRNRGGGGGGGGWGGRRGNRGRDSNRRGGRNNSWQPKDQHVSPGQSNMLYFDNVGDFTEDPPLPRSSPAPSSLRQESLPPVTFAADLTPPPPVSVAPPDVAVTPEEPTVPLINIKKEKEMEHKSKIKQFVKAEPKSPKKKKVNSSRSSSTSGEESEPEPGEMVVNTKAVVVPSPKAKAIKTPVASTPKPKAVKPVSSSDSSTSDSDTDDEQSHPPAKSKKMEKNTEEDVVCMGSQERQFTITDEEESTEPEDDKKARKQKNKGKTVDVCGICDKKGHTSFQCQMICRNCSGSYHGLKNCPNPPNLNIAIQSFVEFAMQQMTAFHCEQGFGFPAGTVTAPVSAKPKKDKKASIKKIKKSSQKRMKVEPKDHDEEDDEEDDDEDEDDSSESDDSESSEEPHPAPVSKQKRKRGTKASVSAAASLPPQVFPFPLLGAPGAPFNSMMYSYRAPFNFSK

SEQ ID NO: 32242 - DNA, 4907 bp, DROSOPHILA
atattatataaaacttatacgaatttatggaattcagcattatatataaagaagtacgtttcactacagtttccactatcagttttgcacttaatgtcgttatttttctgagtgctgcagcaccgttcgttttaaatcaacgatacgagcttccaagttggttactctgtgcggagttgtttcgtttggtcgcgtcggtcgaaggagtcggttgttcgttttcgtgcgctcaagtaacggtaagcgcgaatgccttcgccagttctactgttattttacctcgggacggctatgcgtccctgcgtccctgcgctttcctgtctctgtgtatgtgtgggagacaaacaaatagcaaaacgagaaggaaaaccatagagaggaattccgcaaaaaggggggtggcgaacatcctgtttttctgcgcccgctgccagagtaaccaccccctctcagggacgacaacaacaaagtggacttaagcgaaaaacgaaaataaatatacgtacgaacctataactgcgccatttgtacttcgcaacaacaaatgaaaatatataactataaaattgtgtgtatgtgtgtgacggacggagagaacaaaatcaacataaaaaactgttgtggagaagattatttataaaaagcttcgtccgtaaaaataagccaatcgaaggatgcaatattaaatggcaggcaaagtgaagtagtgcaaatttaaaagaagacaataaaaaggcaacaacatttaattggactctaaagctacaacttcaaaactgtttaaggatgcctaatacacttttgtaatccgcaatcaaaccattaaaacatgctgcaaaatcggttgggaattatatgaattcttcccatttctggattgcatcattcgtcgagggcgtggtctagcattaaatgtaatgtacagctgtcaagcaggtcctttcatcattcacacatcatcatcatcatcagagccattatctccaggcccaataacacaatgtccacaacagcagctggactaaagtcgggacccaaaggagcctacggcgtcaggtcggagacggatcacatcataaccataagcactgccggcttgacggagtcgcacagcgaaagtcccgcaaagggagtagtgactccagtacggaagccccattccctgggaagtgaagattccccagaaaatataattccgggtgaacaggctgagacaaataaaaaacccctgcacttgtgccggctctcgcagctggtgagctaccagagtaacatcgctgatgtccagcaccggaagggtagacgactacacggattacagctgccactgcatcccctccaaatttttggttggctcgtcctcctcctgtttggagtggctagctactgggtgctcattccggcctttcatgcccgcatacaaggaccgctctacggactaatcaccgggctctatctggtgcacatcgcctctcatttgacggctttactgacagatcctgcggacaaggagttgcggcgagtgcatcgcaacgatcggattgtcccagaatttgaccggtcgaagcacagtcacgtaatagaaaacgggaggtgccatctgtgcaacatccggacctcttcgaaccgcaccaagcactgttccgtgtgcaacaagtgcgtgggcaagtttgatcaccactgcaagtggctgaaccactgcatcggatcgcgtaactatgtggccttcctgatgtgcgtggtcagcgctgtggtggccaccctggtcatcgtggccgcggtggtggcccagatcgttttttactatatccaaccagactggttaagcttctactggtgccccacggagtcgagccacacaattgaaagcggcgacttcataaacatcaccctaagcctgagcaacggcaccatgatgctgatagagcagcacacttcggaggaggacgttcatcaggaaatgtgggacgaggagcaggcaaatatgaccatctcgacactgcccacccttctggagaattttacagctattatagaagcaagcgcaacgcggcctggaattagccccacgaatcacaccgaaacgcagccagtagtgaccggaattggattaaatgaaaccattttcatgtttctgctgggagttctgggactgctcgccgcagtgagtgcgggtttgttgctccacctatgcttctttcacatctacatctcgttcctgggactgaccacctatgaatacattagaaaccaccgtcaggctcaggatgccaagaccaagcagcttctggagggagctcccggcgtgcgggcgcccaaaaatggcaacgtgcacttctcggcttcattgcccgagccacataatccgtccaagtccttgccaggaggtcagcagctctactgctgttccagtgccccacatccaagccagcactcacaggaatcggttggtcaaacagagcaatccctgcggttgcattgctgtgccagctccagggagttccaccagagcgggcaggccatctatgtttgctcgcttctggaggaggcagttccgcaaatccaagttgaaccggatactctgagtagcttccattgttgctctagctttgcagctagttccctgcagcgcagggtgagtttggctaaaggatcgttgatctcagccgagccacgtcatctgagaccagcgacttatctgcagtacaccgagcaatgtactctctgcacattccgcctaagaagaggatcaggaccagggacaggatcttcaggagctgtaagcagcgccggtggaagcagtagcactcgcacattaaccagtcaaactggcggctcctccgcttcggccacagcagccgggaatatttccaagcatcagcggtggcgaaggaaatggaattgctgtgccgcggttccagatagccccgacttgcctaatgaccttcttgctgccctaacgtttcgcgaaagcgaggaagcagcagcggcagccaagttaaacgcccaggaactgcctatccaattcatacgcacgctaaacggcggcttggaccaggagctgcctctgaaggcaacaacagccactcctacgccacctagaagttcccgtctccgctacatgctgcgcctactgggacgctatcgaagaccacgctgtcgccatggggcccatcatggtatcgctgccaaagagcaccagaatatcggtggctctgcaataaaacaaaatcaaatacgtccgctgcaattgcaggcagctggacgtggctatgctaattcgactgccactccaaccccgcccgcaagttcgccaagcagaagttccttggagagcagcgacctgagcaccagcacgagcccttcgtgcggcaaaaaggagctgatgctgctgcccacatccgtgataagggatgacagcgtgaccacctatacgctgaccttgccgcctgctctgccaccgcctacgaggagaaaaatgaaccagaccacccaagagctggcggagttggctgaaaccttggggttcgccagcaatttgcagcacagtcagcataacagccagaccaacagccgaacgttgcccagtttcgggaatgtctatcgccgacagaggcggaagcacttcttgcggacacgatctcccacactatcgcccatccacgagtccggcctgtcaaatccaacctcgccccagcccctgaggcaccaccaccagaatctagccaactcgaactccaatccggccaaagccatgtcctcgcctatgcttaatcgcaactcaggatctgcgaactcctcggcacttctagtccagaatctgtgcagcttggcaggggaaacgctgaggaattccgcatccaacagttccctgcagagtctcagctccaattcgagcagcacctagatgagtgtctgtttctctttagtccttaggttagctttaaccttagccatagtccccgcgacccgcaaccgaagcagttctgttgaagtttcggaaatcaattaattcgcacataagcgtggaaagtcataactaaaatcaattacgcacgaggaggagtgggagtggattgggaggttaactgtcggggcctggaaaggaaattgcctttgatgcgatgcggtttcattgccaaacttaattaccgcttttggtcgaagttccattgtctgagtttttggattgcatatttggtttatgaagagtctgatgtggatttattgcagagacggaattttgtgtcctctttcacgtttgctacgttattagttttactgctaattttaataggtggcaatcaacggctttatttatattgtttaattgtaatctcttatttaaagatagtattttaagaaagtcaatcacaattgctcccaactcaaattattttatagcatataagaaagtataaaaaaaacccgcgttgctgacgaccagcggaatttcgaaatagaatcttatatttctcttttctaacttaatcatcaaaagatgaaattttgagtccccaaatgcatcgagctgctttcttccaaactaaacatgtatttaccaacctttgaatgacttcgcagttgagttgataaaatatgcaacagaatgtactcaagagttcgagctgggtgactactcatttttccgcacccacccctttgctagtattgattttcattttggaaagcgtgcaagcaaaggcgtcggtttattacgtattgtatctgcagctgaagcttcggttgtatctgaatccgtttcatcatcccacaaccaaagagaaggaaattcagcatgttgccaaattgttacgcaaatgttttgattcgatctcaattcccataaaaaacatgacgatggcaattgtcttgggttctaaacttgattttgacgactgtccctc

SEQ ID NO: 32243 - DNA, 2907 bp, DROSOPHILA
atgtccacaacagcagctggactaaagtcgggacccaaaggagcctacggcgtcaggtcggagacggatcacatcataaccataagcactgccggcttgacggagtcgcacagcgaaagtcccgcaaagggagtagtgactccagtacggaagccccattccctgggaagtgaagattccccagaaaatataattccgggtgaacaggctgagacaaataaaaaacccctgcacttgtgccggctctcgcagctggtgagctaccagagtaacatcgctgatgtccagcaccggaagggtagacgactacacggattacagctgccactgcatcccctccaaatttttggttggctcgtcctcctcctgtttggagtggctagctactgggtgctcattccggcctttcatgcccgcatacaaggaccgctctacggactaatcaccgggctctatctggtgcacatcgcctctcatttgacggctttactgacagatcctgcggacaaggagttgcggcgagtgcatcgcaacgatcggattgtcccagaatttgaccggtcgaagcacagtcacgtaatagaaaacgggaggtgccatctgtgcaacatccggacctcttcgaaccgcaccaagcactgttccgtgtgcaacaagtgcgtgggcaagtttgatcaccactgcaagtggctgaaccactgcatcggatcgcgtaactatgtggccttcctgatgtgcgtggtcagcgctgtggtggccaccctggtcatcgtggccgcggtggtggcccagatcgttttttactatatccaaccagactggttaagcttctactggtgccccacggagtcgagccacacaattgaaagcggcgacttcataaacatcaccctaagcctgagcaacggcaccatgatgctgatagagcagcacacttcggaggaggacgttcatcaggaaatgtgggacgaggagcaggcaaatatgaccatctcgacactgcccacccttctggagaattttacagctattatagaagcaagcgcaacgcggcctggaattagccccacgaatcacaccgaaacgcagccagtagtgaccggaattggattaaatgaaaccattttcatgtttctgctgggagttctgggactgctcgccgcagtgagtgcgggtttgttgctccacctatgcttctttcacatctacatctcgttcctgggactgaccacctatgaatacattagaaaccaccgtcaggctcaggatgccaagaccaagcagcttctggagggagctcccggcgtgcgggcgcccaaaaatggcaacgtgcacttctcggcttcattgcccgagccacataatccgtccaagtccttgccaggaggtcagcagctctactgctgttccagtgccccacatccaagccagcactcacaggaatcggttggtcaaacagagcaatccctgcggttgcattgctgtgccagctccagggagttccaccagagcgggcaggccatctatgtttgctcgcttctggaggaggcagttccgcaaatccaagttgaaccggatactctgagtagcttccattgttgctctagctttgcagctagttccctgcagcgcagggtgagtttggctaaaggatcgttgatctcagccgagccacgtcatctgagaccagcgacttatctgcagtacaccgagcaatgtactctctgcacattccgcctaagaagaggatcaggaccagggacaggatcttcaggagctgtaagcagcgccggtggaagcagtagcactcgcacattaaccagtcaaactggcggctcctccgcttcggccacagcagccgggaatatttccaagcatcagcggtggcgaaggaaatggaattgctgtgccgcggttccagatagccccgacttgcctaatgaccttcttgctgccctaacgtttcgcgaaagcgaggaagcagcagcggcagccaagttaaacgcccaggaactgcctatccaattcatacgcacgctaaacggcggcttggaccaggagctgcctctgaaggcaacaacagccactcctacgccacctagaagttcccgtctccgctacatgctgcgcctactgggacgctatcgaagaccacgctgtcgccatggggcccatcatggtatcgctgccaaagagcaccagaatatcggtggctctgcaataaaacaaaatcaaatacgtccgctgcaattgcaggcagctggacgtggctatgctaattcgactgccactccaaccccgcccgcaagttcgccaagcagaagttccttggagagcagcgacctgagcaccagcacgagcccttcgtgcggcaaaaaggagctgatgctgctgcccacatccgtgataagggatgacagcgtgaccacctatacgctgaccttgccgcctgctctgccaccgcctacgaggagaaaaatgaaccagaccacccaagagctggcggagttggctgaaaccttggggttcgccagcaatttgcagcacagtcagcataacagccagaccaacagccgaacgttgcccagtttcgggaatgtctatcgccgacagaggcggaagcacttcttgcggacacgatctcccacactatcgcccatccacgagtccggcctgtcaaatccaacctcgccccagcccctgaggcaccaccaccagaatctagccaactcgaactccaatccggccaaagccatgtcctcgcctatgcttaatcgcaactcaggatctgcgaactcctcggcacttctagtccagaatctgtgcagcttggcaggggaaacgctgaggaattccgcatccaacagttccctgcagagtctcagctccaattcgagcagcacctag

SEQ ID NO: 32244 - protein, 968 aa, DROSOPHILA
MSTTAAGLKSGPKGAYGVRSETDHIITISTAGLTESHSESPAKGVVTPVRKPHSLGSEDSPENIIPGEQAETNKKPLHLCRLSQLVSYQSNIADVQHRKGRRLHGLQLPLHPLQIFGWLVLLLFGVASYWVLIPAFHARIQGPLYGLITGLYLVHIASHLTALLTDPADKELRRVHRNDRIVPEFDRSKHSHVIENGRCHLCNIRTSSNRTKHCSVCNKCVGKFDHHCKWLNHCIGSRNYVAFLMCVVSAVVATLVIVAAVVAQIVFYYIQPDWLSFYWCPTESSHTIESGDFINITLSLSNGTMMLIEQHTSEEDVHQEMWDEEQANMTISTLPTLLENFTAIIEASATRPGISPTNHTETQPVVTGIGLNETIFMFLLGVLGLLAAVSAGLLLHLCFFHIYISFLGLTTYEYIRNHRQAQDAKTKQLLEGAPGVRAPKNGNVHFSASLPEPHNPSKSLPGGQQLYCCSSAPHPSQHSQESVGQTEQSLRLHCCASSREFHQSGQAIYVCSLLEEAVPQIQVEPDTLSSFHCCSSFAASSLQRRVSLAKGSLISAEPRHLRPATYLQYTEQCTLCTFRLRRGSGPGTGSSGAVSSAGGSSSTRTLTSQTGGSSASATAAGNISKHQRWRRKWNCCAAVPDSPDLPNDLLAALTFRESEEAAAAAKLNAQELPIQFIRTLNGGLDQELPLKATTATPTPPRSSRLRYMLRLLGRYRRPRCRHGAHHGIAAKEHQNIGGSAIKQNQIRPLQLQAAGRGYANSTATPTPPASSPSRSSLESSDLSTSTSPSCGKKELMLLPTSVIRDDSVTTYTLTLPPALPPPTRRKMNQTTQELAELAETLGFASNLQHSQHNSQTNSRTLPSFGNVYRRQRRKHFLRTRSPTLSPIHESGLSNPTSPQPLRHHHQNLANSNSNPAKAMSSPMLNRNSGSANSSALLVQNLCSLAGETLRNSASNSSLQSLSSNSSST

SEQ ID NO: 32245 - DNA, 3155 bp, DROSOPHILA
aagccgtcgtgcaacaagtacgggcaaaatacgagccgttccacaagggcgaggtgccatacgagcccgaacaaatggctgctggatcagaggaagatgtaagttgctcgaacggatctttgtaatagagtggatctgaaataacacgaatattttatattccccaataaagctgccactttctccctggctgtgtcaaccatatatacgcgcctcacccgaatcccatcgccagaagattgccgaaaaggtgcgcgaggctgaggatcccaaccgaaccaagcggcagtacttcgacaaggacggcaaggagatctcccgcaaacggatgaagaaacttcgaagacgccagcgaagacccaacaaaacggaggcccagatccagcatcggcacgagaggcgcctggaatactgctcggaatgcgccaatccccagggatccaagtgcgagttccagctgtgccgcgtgtgctgcaaggacaggtgctacaacaacgatcgcgattgtcctggtcacgggatcttcatcaaatcccgccgagccagggccaagctttttgaggagcacatcgccccgcaggaccaccagaaggtgacgagaacttcagacgatgacctgacgatagccccaacggatgcgcaggagccgctttgaccttaaacctgtactttaggaaacacccttcttgtttttgtttctatgactgcgaataaaaaaaagcttgttttaaaaaccgcattgattgttttcattcaaacttttgattccatggcgggtttctttcataagcaaaccccaaaccggttgaattggccaatttatgcgaacccattctatttgtgcatttatacttttaaagtttcctatgtaaaaaaaaaaaactgttagtgtgaccgtgttatttgtgccctaaaatgtgtttcaattatctggcgaaagctggccactctaaacaccggttgcacgctgtgggcaacgaaaatcaaaacaaagcctaaaatggagcaaacaaggccattttacgatttcagcataccatacaacaaggacgactccgtgttgcgggccctgcttaacgagctggtggaaagtgagtgagaacaaatgaccatacagaagattcccacgacatccgacatactcgttgcagcgggctacaaaacagtggccatcgaccagagtttcgaccacagcaaaaaggatccgggcaaacgtgggtccgagatgtttcccgagcctcataagatcgagcatctgcgcaaggagttccaggacaagctgagaatcctgcagagaatcaccattctctacgtagacgtcaatgtggcccacgcgatggtaggaacacttgatgatggataatagcaagttaatttgtatttgttgctgtagagtgtctcccataatctgcggaagttcaatctcatcgctggccaaccgaaaacagatgccgccctgacggtaagtcactataagtaccaccttcaaatcatcatttaacacggaccatctaagcactgctgcactgccttcaatggggacttgataacttttgatcctgtggctgggtcccgactcttggtaaaccgaaaagcataccaggtggcagtccgtcggggcatgttcttcgaaattaaatacgctccatctatctgcgattcgaataacaggaaggacatgataaagatcgcccagaactattgcaccaaagggaagtccaagaacgttatcttcagcagtggtgcggcgcacgaattccagctgagaggaccttacgacgttgctaatttgtaagatatagctaactagattacctttaagatgaagtctaattggtactaacattttaaagggcctttatcttcggcctatcagaggaccaagggaaaaatgctgtggacgggcactgccgggaacttttcctgaaggctgaggcgcgtcgtctgggaaaaaccatcatgtttctcaaaggaaacggtcccataatatactcggatagctctgaggacgagaaaagcaccgaagacgaaatgaagggtctaaaaccgcaaattggaaaagcggatgcatttgaagtcaaagacggaactgagcacgctattaaacgacttaaagtggcgtagcctttaactaaaatacatcagcttttttaataagttggctagttttgattttacgacgaaagccggctaacgtaacgtaatggttttgggtctaggctgcacgtggtttgggtccaggaaaaggtcgacagttttacttcagcagctacatgtctaactatacccgattgactatgctaattatcgttaaattttaagttgtttgttaaataatatttccgtttgttgtcatttgtacattagtgatgtcagtagcgatatttaaaataatatatcgatggcataaaaagaagaaccatcgattggcgggtatccgggacttctggcaacattgattttcgtcccagctctagcgtacaacaacaaaacaaaatggaggtctttgatgtgtgtgtcgcgttgtcttgaaatttgctgctagaattttgcgttaaacggtaatttaaagtgcaaagtaattaagaaaaattgctttaaaacgcttgccagggtgccggcatctggaaaagcaccaaatctgatcggagttgagcgtattttaagcaaaattagcatttgaaaagtggtcgaaaccgagtcacttgaaaagaaaaaatgtgcaaagaggagagtggagagtaagacagagaaagcaaaaagagcaagaagacaagcgacgagacgaaaagaaaaacggcaaagcaaaagaaatatatttcgcgagactacgaagaaaagctgaaaagtagcagccgtcgaatttcaattgttttttcccccgcagttccaagtgcatttctctatgcgcctgtgttcgtgtatgtgtgtgtgcgaataattaatggcaaaattgccgaagaacatcgaaaatcaaatccgaaaatgtgagcggcgaccgtctaatacaattaaaaatggtcatcatcgggaagtttgtgtatgtgtgcgatgctcgcttgcgttttcgtcttcatcatgtttgagtgtaattatcacgttgattattgcctgctcatttgatttctttctccaacttctattcgccatattct

SEQ ID NO: 32246 - DNA, 925 bp, DROSOPHILA
atggagcaaacaaggccattttacgatttcagcataccatacaacaaggacgactccgtgttgcgggccctgcttaacgagctggtggaaacgggctacaaaacagtggccatcgaccagagtttcgaccacagcaaaaaggatccgggcaaacgtgggtccgagatgtttcccgagcctcataagatcgagcatctgcgcaaggagttccaggacaagctgagaatcctgcagagaatcaccattctctacgtagacgtcaatgtggcccacgcgatgagtgtctcccataatctgcggaagttcaatctcatcgctggccaaccgaaaacagatgccgccctgacgcactgctgcactgccttcaatggggacttgataacttttgatcctgtggctgggtcccgactcttggtaaaccgaaaagcataccaggtggcagtccgtcggggcatgttcttcgaaattaaatacgctccatctatctgcgattcgaataacaggaaggacatgataaagatcgcccagaactattgcaccaaagggaagtccaagaacgttatcttcagcagtggtgcggcgcacgaattccagctgagaggaccttacgacgttgctaatttggcctttatcttcggcctatcagaggaccaagggaaaaatgctgtggacgggcactgccgggaacttttcctgaaggctgaggcgcgtcgtctgggaaaaaccatcatgtttctcaaaggaaacggtcccataatatactcggatagctctgaggacgagaaaagcaccgaagacgaaatgaagggtctaaaaccgcaaattggaaaagcggatgcatttgaagtcaaagacggaactgagcacgctattaaacgacttaaagtggcgtagcctttaactaaaatacatcagcttttttaat

SEQ ID NO: 32247 - protein, 297 aa, DROSOPHILA
MEQTRPFYDFSIPYNKDDSVLRALLNELVETGYKTVAIDQSFDHSKKDPGKRGSEMFPEPHKIEHLRKEFQDKLRILQRITILYVDVNVAHAMSVSHNLRKFNLIAGQPKTDAALTHCCTAFNGDLITFDPVAGSRLLVNRKAYQVAVRRGMFFEIKYAPSICDSNNRKDMIKIAQNYCTKGKSKNVIFSSGAAHEFQLRGPYDVANLAFIFGLSEDQGKNAVDGHCRELFLKAEARRLGKTIMFLKGNGPIIYSDSSEDEKSTEDEMKGLKPQIGKADAFEVKDGTEHAIKRLKVA

SEQ ID NO: 32248 - DNA, 3001 bp, DROSOPHILA
ttttatcctgtccgcctaccccgcataatcacttcataacatttccaatcgagagtcaagtaattcgcagagcaacagagcacgatcaatttagtttctctcgactctcgtcgatttcaccgagaacagagatcattttaaaataagcaaacatatctagttgtattttgtaaataggttaaatgaatccgtcttatttgataatgatcttcgttgcctcttctgggtgttttgaaaactcagagtttagttcgcccgagaacgtcggacaaagcacaagcactcgacaattttaaaattataaaatataatgacacattatcaaaaaatataagccaaatataggtgggtgaagaacattttagagctaagctagaataaaatagcttaaattttccaatacatatacgtatattccaattttaattcggtgcgaaaaaacaagtctataacgttaagttcgagttatataattaatgttagcaaaatggcctaagaatgtcaacaaatgcgatgcatctcctacgtaattggacttttcccaaagtttccagacgttaataatgtagtaactttacattttaacttgtgtgagttttggcactatttgtcattggcattatttttttgcggattttatcaacgaatgaacaacatgaacaacaaccttattgcgagcagttgtggacgaaaaaaaatcccttaacagatttctacttctgttacgaaaagtaaaaaactctcatgatggttgtgatatcaccatctggctctcgagctctcctgctctgagattgggcaaacaaaaatatttatttcgttattttgagagcaagaaatatccacagagcaaaaaacatgaaaatcggtgcgccagaaatagcgccacccactgaaagttcaaaaactaaattgacttacacggtatttttaacagagatagcgatgtgtgcgattctgtgtcagttctttaaattactttccttgttttcagaacctcatggacaagtcaacgcggcctaaacgaaatcgtcgacacagcaggtaagatttgaaaaattgtttttgggatgtagttattctttttgcgtgcttttccagacgagcctggccaccagaggaggagttgcatccagcatcccgagctacaaagagattatttactcccgacattaagaggatgctaaaggactggttaattcgtcgccgggagaatccctatcctagcagggaggagaaaaaacagcttgctgcagagactggacttacttacactcagatttgcaattggtttgcaaactggcgaagaaagcttaaaaactcggagcgagagaaagccaagaaatcctggggccatctgatcaaaaattacaatcacaatgcaaggggtaatgtggaacaatttagcatctcgtcggaggatagcatttgggaggaggagatgcactcatgtcctgcggaggatgacgaaggcgacgataatgaagagttttccagccacagtactggtagcgatggcaatgccaataatgaaccttcatccccatacaagccgatattgtttgtaggatctgcaggtctgaccgagcggatatcagcacaaacagggggtaagaccaagtacaagcatcagatgatggaaaagtatatgcgagatagttccacggcaaaaacgaccagtcaacagggtacgcaactcaacaagtggctggaaagtgcagcaaaattcacaccggacaggaacaattatcacatcgagtggaatatgaccaggtaaggcaattcggggctggtatggtgaattttgataaataaaaatcgattcactttaggcagaaagctagcagtaatagcagttgtggacaagcgatctttaccacagatgtgtctggggctggtcgtggtggacgctggatgcttcatcataaggacgaactggaagcagcagaggccttagccaacctcgccttcaactgcaggcagcgctggcaccatatctaaagactgaagactccggaactgacgccatcattccagcagaagtttcaggccccgctaaaacgtgcaatctagtcaagtgggcttcttctggttttcattttcgaactttacagtacaatactcactcgttacatgattttcttcaagtttaaaaccttttagctacactcatttaaattatgtgataaactacgacgatcatattcatgtaaacgtgaaaaccaggttgcgccgagagttaagaattactacagctagtttagagtgaaaaacaattatataatttttgatttcttgttatataacaaacttgacttttttgacttctacgtagactttggcgtttcctcattcatctggtttttagcatggacatcaagaacttgcacaaaactgttctgatgggcctgcagttgctgaataaggtggccaggtgcttgactaagggtctggacaagttgtgcctggaccgcgtgcaggccgggcatctgagcgtaggccacaagctggttcctactcagcatggtctcctccacgatgcctcccagcaggaccatttgcggcaccctgcgaacgattcgtagcagtgcggcagtcttttccgggtccggtgagaagacgatgcaatgattggagtggaacaggggcacaatcgcttcgtatcgagtattcttcaccgcctgttcgatgatcttgctgccgtaggacttgaggtgcaggttctgcttgtgaagctgaacgcgcacgcggaagatgtcatcggcggttatagaacttaagtgaaagaaggcaaccagtcgggaatgatccagccaattccgcacctctcgtgcgatgatttcgttgtatggattctcctgctgctgttgcgtgcgctccgcacgcgttttgaagcagctcttagcttttgggagttccggatatttcggctgcgtgactgcgactacccgggcccgctcgtagtgcggtgctttcggccgctgtatattgatcttacccc

SEQ ID NO: 32249 - DNA, 885 bp, DROSOPHILA
atggacaagtcaacgcggcctaaacgaaatcgtcgacacagcagacgagcctggccaccagaggaggagttgcatccagcatcccgagctacaaagagattatttactcccgacattaagaggatgctaaaggactggttaattcgtcgccgggagaatccctatcctagcagggaggagaaaaaacagcttgctgcagagactggacttacttacactcagatttgcaattggtttgcaaactggcgaagaaagcttaaaaactcggagcgagagaaagccaagaaatcctggggccatctgatcaaaaattacaatcacaatgcaaggggtaatgtggaacaatttagcatctcgtcggaggatagcatttgggaggaggagatgcactcatgtcctgcggaggatgacgaaggcgacgataatgaagagttttccagccacagtactggtagcgatggcaatgccaataatgaaccttcatccccatacaagccgatattgtttgtaggatctgcaggtctgaccgagcggatatcagcacaaacagggggtaagaccaagtacaagcatcagatgatggaaaagtatatgcgagatagttccacggcaaaaacgaccagtcaacagggtacgcaactcaacaagtggctggaaagtgcagcaaaattcacaccggacaggaacaattatcacatcgagtggaatatgaccaggcagaaagctagcagtaatagcagttgtggacaagcgatctttaccacagatgtgtctggggctggtcgtggtggacgctggatgcttcatcataaggacgaactggaagcagcagaggccttagccaacctcgccttcaactgcaggcagcgctggcaccatatctaa

SEQ ID NO: 32250 - protein, 294 aa, DROSOPHILA
MDKSTRPKRNRRHSRRAWPPEEELHPASRATKRLFTPDIKRMLKDWLIRRRENPYPSREEKKQLAAETGLTYTQICNWFANWRRKLKNSEREKAKKSWGHLIKNYNHNARGNVEQFSISSEDSIWEEEMHSCPAEDDEGDDNEEFSSHSTGSDGNANNEPSSPYKPILFVGSAGLTERISAQTGGKTKYKHQMMEKYMRDSSTAKTTSQQGTQLNKWLESAAKFTPDRNNYHIEWNMTRQKASSNSSCGQAIFTTDVSGAGRGGRWMLHHKDELEAAEALANLAFNCRQRWHHI

SEQ ID NO: 32251 - DNA, 4004 bp, DROSOPHILA
cgtgcccagagaagaattaacccacataaagacgggagaagagcagaaaaagaaattctatcgcgctctttgtgccctgcaagaaccagtatcagtaaagattctggaacaactgcaaatatcagcaagctttaacatacaacaaaagacccccatacgagttcttcatcgtcgtccattgcacacgcgtcccagaacaatttacagtgtcaccgccaaggtgcatcgtggaaatccaaaagccttgatcatcgatattgtcactcaagcggggacttacataaaagagttagttcatggcgaatttggtaggaccacgccatcattgtcctctattataggcaaacccatggatattcaagctctagatgtggtgggaatcgatttagattggccacatgaagtagataactcgaaacacaaggaatagcgatattattgttaggtacaaatccatttaaatgttaaatgcttaacacttaaattgcaaaaatgcagagaataaacaacaacatatgtggatgaattttgattactaagttcattatatgtttagttcaaaatcatcaaaacccagattacggggtataaccctagcctttttttcggtctattcaaacttgtccagtattattccgtgactttgaatctcgatccccaaaatattggtaacagagttagacagcgagccagaggacaaagcggacatgcgcagttaatgtaatttggagtcaagttgcgtgctctcaccataggcaggttccaatattggctacaaaagtataaagtaagcggacaaattcggcattcgttgctagcgagttgctctggtttgttatggtcaagtcaagtggagtggataaaatttgaaagtgaccgagcatagtagccaggccatttgcaaccggatgcaagcgtgcgtgacaattaaaacatgagcccgtgtgcgcaatcgggagtcagttggttagataattgaatttaaaaagagcggcccagtatgtttttccggcgcgttttggatagtgccagaaatcatttgccccctaagtcgaccacggaaagtccggcagtgcattattacagcgaggacagtgagagtgtcacatatgtgagtggtgccgtcgactgtgaagtcaaggacagtaataacaaccagtcagcagtcggcgcgggtgctccactaccagctataatgaaaattcagcgccgagcggaagctcctatcggtgcagtgcagctaacgccgctgtgggaacacatactgcgcacccgccgccttccggaaacaattttccctagcgccatgtacgcggagttccatgagcgcctgcaggacccagagtggcaggtgaggcagcacgctctgcgagtcctcgttgacgtcctggtggtgatgcaagacgaggccgatggccatatggagcgggagcagcttattggtctgctggtcgagaaccttggtcaccaagcccccaccgtgcgcaaaggagctctcgattgcttgcgagtctatctcgccgaaactgcaattccggagacggttatgctgggaattttagacgcaggcctgacgaagcaggtgccagcggattcggagcacatgggtcgccttagctgcggcgttttgctgtccgtgcctgcccttctgcaatcaataatgcatacggcgcagagacaccgcattgtgcatagcaccgtggagcgagtggtcgcacacatggatcaagtggtgcagcaagaaatcaccgtaaaagtcttaagcaagatcagggagcttttgggcgttcacgagttcgaagaaattatgggcaacgtgggtcgtggagatacgctgtctaggtactaccaactgtctcaggtttacggggtgtctggaaaatcgaaaacagggggcgaagtaaaagctggcgcctggcgcgccttaccacgtgagcaaggatggagaaacggcaatgctgtacagaacctggacaccacgctccaaatacagtcaaactgcttggacatgggaaagatcattatggaaacagaaatcaagatcaacgatgatacagtgactatgcggattctggaggcggataccgagaccgaagagtctgatagcccaacaaggattttctctaatgaagaagatgggacggatttaatttgccaccccctttcgtccagtggcagcacccaccaagagcctaatataggggcggggattgtgaaagttataagtgattcagaattggatgagccgcacatcaaggcgggtagtgtttccgagccgggtactccctctcggggattaaagcgagtaaccttcggaggtgagatcgttaagatgcgaactcctgatagcgacgcagcctcctctacaaacaattctcgaagccctacccagaccaatcagagtattactgtttcgtcttcggaagatgcagcgatctccgacctggtctcatcagacgagaagtctaccctttctagacccgtcaatgacaagaggaccacggcactcgtgctggagatccctttcgacaataccaagccattgcctcaagaccgatcattatgctcgcagcctcaccggcatcagagcaatgcgcagagtgagccgtcatcgaacagtccccgcaatcggcaggaaaacaaagcacggctgtcgccatcacctagctctcccgggtttcgcagccgcagcactagtccgacgggaagcaacaacatcagcccaaaagtgccgcacaagcaaatcgaggttctgcacaatctgcagcgcgatccgtctccgcgttctcagcgacgctcagaagacatggatgggaatggggatggaaaagcccttcatgcaacagggaatccctcttcctcaccaacacagccgcttattagtcgaacaagatccgcctctacgatgtctcctgtgtcaccggccacgccgaaatcgtgggaggatctggacattgtgaacttaaagacgctcttggagttgcgatctggggtatgttcctaaagcgttatgactaagtccaaataattgcattaaaattagtggccgacatttagcaatcctcgtgtaattgcacccctctaatcaagtctccagcatggtctactttgtgcgaccaaaaataaagcaatgaaatcacttcacacgctacgccaacgcgggttccgggtcgcaggcgctttgggctctaactgggtcagtaggatatgtacaatttcatatgcgttcataattctgccttcataatggcagccgccctgctttattgcggacgagacacgcatcactcccccagtaggtattgctataacgggtgctattatatcgctccttactaatgaaaatttcagcgataagcgagcactctcccctagccggcactcatattggtgactatagagtagggaccggcttctctcgggctactgtaccaatgacctattaatttttctacgctcacgtacttagaacataaagggaaggagttaactacgagtattacacgtagttacacgtcgaagaacttgcacaaatcccttcaaaagttattcaaagtgtacatgaatatgcttttgtttttgtcatttccttgacggataatcaaaccagttgtgctttttacatactattcttgtaactgattgtaaattttaacgtctacaaaagtgggcacactacagttaggatcagtggaccatttgcgtcagttcttagatactagttgaagttcgcatgcacactgccaaacatttttttcttggcaagattcaactgaaaattttaatagtcattgtgtaatataatataaattatatattataaacatgacatctacattctcggttttgccgagttcccagtttcccatgtttagttaaaggaaataattcacagtaacggcaaaaaagaatggacgatttaaaaaaaaaacttataaacggaaaaattgctaaaaaaaaaaagtgcgtcagaaaaataattcgttattttgctatactcaggg

SEQ ID NO: 32252 - DNA, 2004 bp, DROSOPHILA
atgtttttccggcgcgttttggatagtgccagaaatcatttgccccctaagtcgaccacggaaagtccggcagtgcattattacagcgaggacagtgagagtgtcacatatgtgagtggtgccgtcgactgtgaagtcaaggacagtaataacaaccagtcagcagtcggcgcgggtgctccactaccagctataatgaaaattcagcgccgagcggaagctcctatcggtgcagtgcagctaacgccgctgtgggaacacatactgcgcacccgccgccttccggaaacaattttccctagcgccatgtacgcggagttccatgagcgcctgcaggacccagagtggcaggtgaggcagcacgctctgcgagtcctcgttgacgtcctggtggtgatgcaagacgaggccgatggccatatggagcgggagcagcttattggtctgctggtcgagaaccttggtcaccaagcccccaccgtgcgcaaaggagctctcgattgcttgcgagtctatctcgccgaaactgcaattccggagacggttatgctgggaattttagacgcaggcctgacgaagcaggtgccagcggattcggagcacatgggtcgccttagctgcggcgttttgctgtccgtgcctgcccttctgcaatcaataatgcatacggcgcagagacaccgcattgtgcatagcaccgtggagcgagtggtcgcacacatggatcaagtggtgcagcaagaaatcaccgtaaaagtcttaagcaagatcagggagcttttgggcgttcacgagttcgaagaaattatgggcaacgtgggtcgtggagatacgctgtctaggtactaccaactgtctcaggtttacggggtgtctggaaaatcgaaaacagggggcgaagtaaaagctggcgcctggcgcgccttaccacgtgagcaaggatggagaaacggcaatgctgtacagaacctggacaccacgctccaaatacagtcaaactgcttggacatgggaaagatcattatggaaacagaaatcaagatcaacgatgatacagtgactatgcggattctggaggcggataccgagaccgaagagtctgatagcccaacaaggattttctctaatgaagaagatgggacggatttaatttgccaccccctttcgtccagtggcagcacccaccaagagcctaatataggggcggggattgtgaaagttataagtgattcagaattggatgagccgcacatcaaggcgggtagtgtttccgagccgggtactccctctcggggattaaagcgagtaaccttcggaggtgagatcgttaagatgcgaactcctgatagcgacgcagcctcctctacaaacaattctcgaagccctacccagaccaatcagagtattactgtttcgtcttcggaagatgcagcgatctccgacctggtctcatcagacgagaagtctaccctttctagacccgtcaatgacaagaggaccacggcactcgtgctggagatccctttcgacaataccaagccattgcctcaagaccgatcattatgctcgcagcctcaccggcatcagagcaatgcgcagagtgagccgtcatcgaacagtccccgcaatcggcaggaaaacaaagcacggctgtcgccatcacctagctctcccgggtttcgcagccgcagcactagtccgacgggaagcaacaacatcagcccaaaagtgccgcacaagcaaatcgaggttctgcacaatctgcagcgcgatccgtctccgcgttctcagcgacgctcagaagacatggatgggaatggggatggaaaagcccttcatgcaacagggaatccctcttcctcaccaacacagccgcttattagtcgaacaagatccgcctctacgatgtctcctgtgtcaccggccacgccgaaatcgtgggaggatctggacattgtgaacttaaagacgctcttggagttgcgatctggggtatgttcctaa

SEQ ID NO: 32253 - protein, 667 aa, DROSOPHILA
MFFRRVLDSARNHLPPKSTTESPAVHYYSEDSESVTYVSGAVDCEVKDSNNNQSAVGAGAPLPAIMKIQRRAEAPIGAVQLTPLWEHILRTRRLPETIFPSAMYAEFHERLQDPEWQVRQHALRVLVDVLVVMQDEADGHMEREQLIGLLVENLGHQAPTVRKGALDCLRVYLAETAIPETVMLGILDAGLTKQVPADSEHMGRLSCGVLLSVPALLQSIMHTAQRHRIVHSTVERVVAHMDQVVQQEITVKVLSKIRELLGVHEFEEIMGNVGRGDTLSRYYQLSQVYGVSGKSKTGGEVKAGAWRALPREQGWRNGNAVQNLDTTLQIQSNCLDMGKIIMETEIKINDDTVTMRILEADTETEESDSPTRIFSNEEDGTDLICHPLSSSGSTHQEPNIGAGIVKVISDSELDEPHIKAGSVSEPGTPSRGLKRVTFGGEIVKMRTPDSDAASSTNNSRSPTQTNQSITVSSSEDAAISDLVSSDEKSTLSRPVNDKRTTALVLEIPFDNTKPLPQDRSLCSQPHRHQSNAQSEPSSNSPRNRQENKARLSPSPSSPGFRSRSTSPTGSNNISPKVPHKQIEVLHNLQRDPSPRSQRRSEDMDGNGDGKALHATGNPSSSPTQPLISRTRSASTMSPVSPATPKSWEDLDIVNLKTLLELRSGVCS

SEQ ID NO: 32254 - DNA, 2438 bp, DROSOPHILA
aatataatgtttcgttacggttagtatcactagcacaaatgatcgccctagcacgtaataacattcaataatacgattttacataaaaagagcggaaaactaattatttctttggaattgttagcataacaaaatttctaaaatataagaaacaagtactattctttgaaatctttagggcccactggaacacccgtcgagctgaaaattatcgactttcagacggcacagtacgattcagtggtgcatgacataatctcgtttttgctatcaagcgttgatacggctatcttggaggtagagttcgaacacatgttagaggcctactatgaggcttttgagcgttgtctgcgacgtgtgggagctaaattggaggttcacacttttaaagagtaagataaatgatcaatatataactgagtacgaataggtcggattttcgcaggttccggctggaagtgaagagggtggcgtacatacaagttccccacgcaatctttatgacgcgctttatattggctgacagcgcgctcatcggcgattcagaggctgaggaacgccccaagcttacggacgtgctgaagaatacgggatcggagcgtattagccgcaaattaagccaaattctgaacttggccgaaaagtttgacatattgtactagggcaataaattgatacgaaaacgagatttgtaattgactaatggcaatttgatggggaaccctaattattttattattatctcagctggtttagaaaataaacgtgaatacagtagtagtcagttttgggaatcatgagcgctacctgggtaacgattctcagcatctcgacttgtgtggttctgctgaagctcagtgagatcaggagcaaggaggtctgtattcaagaaaggtctccggatgtctcaaactaatattgaataaccgaatagagctgttattatgtgaccttcacgtatgccaattggacggatgaccgacctcggtttgttgtgaacatgaccttctcgaatcagactggcatcggctcagtaaccaccattaacgaggagattgcctcaccggtgtctcgcatcctcatacttcagcactccggtcggggtaagcctcgcaccatatacaacgcctccaccaaactgtgcgacctgcagaatgtcttcaattccgtaccgctttttaagccagccaaggacaacatgctcaagcaaagtaactacacgctgagctgtcctctggtcaaaggcacatacgtcatgatcaacatgcgcgtaagccccaaaaacccacttctgagccttctctaccaaccgaaacaaacgttctccgtgagtggcggcttgtttgaagaactttcacgtggccgcagactaagggcgctgtccacctacttcatgactggaaaggttgtgaaaaagtactgtggatccaatgaataaagatcgaccgaaataaatcagcacaagtaaatcgaacaagaaaaaattcaacgttttgcagtaataatacaaatttattatttttcctactatttctatggcagctatatatcagataaagtagtctgatacggcttgtgttcaacctgcaatagagagaagacatttggaatatcttctggaagatagcactatgagaatattttatgcagaaacgtacagacggacatcgactcagctgttgatcaataatatatatactttacactttatacctctgaatataatttccacaaactgttaaagtgatcaaaaaaatacgagaattctacatatcagtgtagtatactttaccaacaggtgtttgttttgtggcatactaacgggcatttatatttacccttgcagaaggtatattaacttcaggcacaagttttttttacagatggaaaagtaaaaggcgcagcctttgcactgttcaccgaagtcatcagctataacataatgtacgttacaaacaagagatgcatatatatatatatatatatttatatatctatatagctttttccttttgcattttgtaattttttggagtctaagaatacgtgcaataatagttaaatctctttgggttaattattggaattcaattaaatatctgcttcataagtttaataaacttacaaagtaggaactacacctgttgtaataaatgtaacataaataataatgtaacacatatattacaactaaaatgtgtgcttatgatattattaaaatattaaattattgcattgcactttacatccctttcaaaattgttatgcaattgttaaagggaaattacttgtaataactttttccttaaattaagttttccaaattaattattgttaattatctgttaaaacaggcccggcctaaatggggaatttgtgttgacaaggttttactaggtcttcccaaatatgtaatttcggactcgctaatgaccaat

SEQ ID NO: 32255 - DNA, 438 bp, DROSOPHILA
atgaccttctcgaatcagactggcatcggctcagtaaccaccattaacgaggagattgcctcaccggtgtctcgcatcctcatacttcagcactccggtcggggtaagcctcgcaccatatacaacgcctccaccaaactgtgcgacctgcagaatgtcttcaattccgtaccgctttttaagccagccaaggacaacatgctcaagcaaagtaactacacgctgagctgtcctctggtcaaaggcacatacgtcatgatcaacatgcgcgtaagccccaaaaacccacttctgagccttctctaccaaccgaaacaaacgttctccgtgagtggcggcttgtttgaagaactttcacgtggccgcagactaagggcgctgtccacctacttcatgactggaaaggttgtgaaaaagtactgtggatccaatgaataa

SEQ ID NO: 32256 - protein, 145 aa, DROSOPHILA
MTFSNQTGIGSVTTINEEIASPVSRILILQHSGRGKPRTIYNASTKLCDLQNVFNSVPLFKPAKDNMLKQSNYTLSCPLVKGTYVMINMRVSPKNPLLSLLYQPKQTFSVSGGLFEELSRGRRLRALSTYFMTGKVVKKYCGSNE

SEQ ID NO: 32257 - DNA, 2679 bp, DROSOPHILA
cgtgttcgtagagtgcgaggacaagtacggggaaatcgaggagatgaacgtgtgcgacaacctaggcgaccatctggtcggcaatgtgtacatcaaattccgtaacgaggctgatgcggaaaaggcggcaaacgatttgaacaaccggtggttcggtggtcgaccggtgtactcggaactatcgccggtgaccgacttccgcgaggcttgctgtcggcagtacgagatgggcgaatgtacccgctccggcttctgcaacttcatgcacttgaagcccatctcgcgtgagctgcgaaggtacctctactcccgccgccgtcgtgcccgctcccgttcccgatcccctggacgccgtcgcggctcccgcagcaggtcccgatccccgggtcgaagaggaggcggcagaggcgacggtgtcggcggaggaaactacttgaacaacgagcgggacaacatgcgtggcaatgatcgcggaaacgatcgcgatcgccgcaaaggtggtggcggaggaggcggtggtggtggtggacggtattaaatattctggacattttttctgtacggtggcaattgagagagaaagcaacggacaagcagtaacgcaaagcatcgtgtattttagtctctgcgttggttttccacgtttttatatcacttttgagtaaacgagatggaaggaggaggaggaaaatgacgatggggagttccaccacctatgtacaaaccccccgcgaaatattttaccgagcgcccattagaattgtaatttactatacatacattcataataataaaattgagtaatattatactggaagccatagtaagaaatgggtctaattgtcaaaaagtccaggcactcaaaataaaagactcctcacaggtatggataacatccagaagacaccaccccttgttaggcctgcagtcttatttcgctttgtaagattgaatcttaccacgttgttttaattatatttccatgcgcagatggcttcaccaactgaaaacgatcaacagcgtaaatgatgctgtcaactgtcttaagacgaaatcttaaaatcttcaaaaatgcgtacatttgaacaacgaaattcttgttttccccgacttagtcttagattttaataggtgcatatttaggggcatatttgtgatcaagctatgtcagttggcgggcttccatcgtgattagtcgttccaccctgaggaacacctctgaaagcctcgccttcattttgcactgctggcttctccgcttgaagattactctgtgcgcgatgcgtcgatggaggtacgggcgtgtcagaggagttgctagacgcctccctggctttcagttgcttggtcatgtctatttgctgctgcagcgtgtaggtattctcgtgtttgcgccgttgttgctgctcaacgtccctcaggacaccatcgtgcagtctcaggctggaagttagagatcggaggctataactttattccggagtatttggcttacttaccggtctgccgattgtttatagtgcacataacctatgatcgctgtggaaatggagaccgccagtcccaaagtcactcgcgaagcggtcgacatgactgggcaccggtctgccgctggagatttccgcctaaaatgcctgcactaggaatttggctgtcgggttgtgttgttttgaagtcggttcgggttacgacatgactttaaatttgaaagaaaaacaacagcaccacacagctgacaagagagtggccagtttacggaagcaaagttttccctatccagagttagtgcgcgggaaaatcaaattaattcccttcaaatcagcgcaacacttttgggggtcctaaagccaattgcagttagaaaatctcagactattgaaaacttgaagctttagacgaaaatacaatttcgaagtgatgtatataatagcgatttccgtatctagtatctacatacatatgtactacagaacttctagcctttatcaatgactttttatttaggttttttatacttttatctacagctatgacgcagtgcctaaaaataaaagcagatgcttatctctccgcaaagatatctttttagttatgcctgcattgtttcgactcatctggttactcactaagcaacatacatcttaatgggtgggggcgattcattcaggtgattggccatcattaacccataatggagcccacactcccgaatccggaatgcgaagcccggagtccgtcttccgtggtcggtggtccggacatgcgcagcacgcacctgatgcgagcgactggaggaacgacaccacaaaaccgaggcagagacagaagcaacagccaagtacaatggaaacgagtacaaaaggcaggaggcaacacggcgtatgggcaacagtgcgactccagttttccatacgctcagttgtgcccgcggtcaagggaaaatcgcagccgagcacttcctccgagcgaagccaaaaagaaatcaagaaaatacttagcgtgcgtgtgccggggacctggtgatttgttcagagtgtggaaatcaaacgaaaggcaatcaacaattgtttttaagggccataaaaaccattaagttattaacataaccgatttataaacaagagccacggggatcttcttccagggcggtcaagattttcaagattttttcaagatatt

SEQ ID NO: 32258 - DNA, 623 bp, DROSOPHILA
ccgacttcaaaacaacacaacccgacagccaaattcctagtgcaggcattttaggcggaaatctccagcggcagaccggtgcccagtcatgtcgaccgcttcgcgagtgactttgggactggcggtctccatttccacagcgatcataggttatgtgcactataaacaatcggcagaccgcctgagactgcacgatggtgtcctgagggacgttgagcagcaacaacggcgcaaacacgagaatacctacacgctgcagcagcaaatagacatgaccaagcaactgaaagccagggaggcgtctagcaactcctctgacacgcccgtacctccatcgacgcatcgcgcacagagtaatcttcaagcggagaagccagcagtgcaaaatgaaggcgaggctttcagaggtgttcctcagggtggaacgactaatcacgatggaagcccgccaactgacatagcttgatcacaaatatgcccctaaatatgcacctattaaaatctaagactaagtcggggaaaacaagaatttcgttgttcaaatgtacgcatttttgaagattttaagatttcgtcttaagacagttgacagcatcatttacgctgttgatcgttttcagttg

SEQ ID NO: 32259 - protein, 125 aa, DROSOPHILA
MSTASRVTLGLAVSISTAIIGYVHYKQSADRLRLHDGVLRDVEQQQRRKHENTYTLQQQIDMTKQLKAREASSNSSDTPVPPSTHRAQSNLQAEKPAVQNEGEAFRGVPQGGTTNHDGSPPTDIA

SEQ ID NO: 32260 - DNA, 2972 bp, DROSOPHILA
tcccagatataacggccattaaggacaattggccatatatttttgacaaggctgtgctgtaccagcactttgagctgcttatgtccatcgatccccgggctctagagaagcgcttggctaccgaaaaggatcgctttttcaggttctttaagagttcaaagaacaagaagatcagctctttggacgagaccaacgctaatttcctgcgtggcatagcgtactattttaatgaggatcccgactacattttcaagcacctcgagaacagttcccttagcaaggaatcactgcaaagcacgaatcccacaaacgccccctgggtggctctagtcagtaagtacacaaaaattaatatcactaaaagtgtttaaatacttttaaaatatttatcttcccacagattcacccataacaacggccgacggcgtggaatcgcaaatggaggcgaaggtctacattgaaggccagataatggccacattcgccgccaaagacgaagacctgccggacattctggcccagttaatctgctactactatacctttaacatgatgtaccctaaggaagccaatcaaacactcgaatttatcgtcgtttactttctgcagcactcgccggaacaagtgcgatcggccaaaaagtctgtgaccaccaacggcaagtttaaccacctcatcgccaagcttgccaatgtacatggctgagatttcatttggacgatttttggctggaaccatggcgcagcgagcgccacttcaatctcctcttgctcctcccaacggaggaggagccgaactctgtttagtttatttattttcgccgacctattccacatgtatttgtaccactatttttaagatttgcataaagtgtgtagtaatgttgtgtatacatttctgatttgtcacccgacaaagaatcttttatttattttttaattgaaacttcatgttttgccagttggggttgtgaagtcacctaagggaaaataagctaaacttattcattatgtggccctttctgaaacggatttctcctatttggtcccttctttcgataaggatgtgcattatctcgcattttctgaaagggatggctaccctttgcttctttcgcatttgatgatttcacatttcgacgtgtatgattcgaacgttctaattcgaacttgtcctttgtcagctgtctatatttcaagtcctttagggcagatttaagtgttgcattctttttcgttaaattgaaacccaaagtgagttgctttcggaaaaagttccgctccttaaaagtgaagttctcaacgtccgtggagagctgttgttttctttccgtggagggcttctcatcgttgaagggctcccatgtagtatcctgcgaccggttggcttctatgacatttcgacggtggttcttctgacgctgctgcatgaactgccttgcgtcctcgctgtccacatcctggtgtccccggtccgaagaatccgtaattatgtcgttcttcacatgctgccagggcgtcgcagtagcttgtggaacgagcgctggtttcggttggacatacttctttggcttgaacttggttttgccccagtccttggtgcggctctgcaattgacgttcatggcgatcattatcttctgttttcttcggattggtagaattcatagcgttgttatttgtggttaaactgaatatcgtccatctgaccatctgaggtgccagtttgagaaactatcgaatctagctatatatgttaaatcttataaaaaccttccattggtcacttcacattttagtccattacatgtattatgtcacatattgtcacagtattatatatatatattatattatatataaggtattcaaacttaatatacatataatgaatagcagttttggcttgaaagaagccacttcggcagtcccaccaacaatcggatcttatcgataaccccaatcggctcaacacgtgcgccgcaactaggcggttttataaatattaacaattccataatgcacaacagtggaggacaatccggctggaacctttcaggagaggaaagaaaaccgttttcgaattacggccgcaacaatcagcagaggcgcagcagtggaggcgggggaagaggcagccacagccaaaatcgcgccgccaatggaaactggccagacgctggatcggaaggtgggcagaatggaaacgcgtttaacaagttcagagatccccaacaggagctggataatcatcagccaaacaagagagggggccgaagaaatagaggcggtggcggaggaggtggtggttggggtggcaggcgagggaaccgcggcagagattccaataggcgtggtggccgtaacaactcgtggcaacctaaggatcagcatgttagtcctggccaaagtaacatgctgtacttcgataatgtgggggactttaccgaagacccacctctgcctcgatcctcgcctgctccctcctctctcagacaggagagcctgccacctgttactttcgctgcggacttgacgccaccaccacctgtatctgttgcaccacctgatgtggctgttacgccagaagaacctactgtgccgctaatcaatatcaagaaggagaaagaaatggagcacaagtcaaaaataaagcaatttgtcaaagcggagcccaaatctcctaaaaagaagaaggttaactcctctaggtcgtcatctacttcgggagaggagtctgaacccgaaccaggggaaatggtagtcaacactaaggcagtggtggtgccgtccccaaaagcgaaggccatcaaaacacctgtagcatcaactccgaaaccaaaggctgtaaaaccagtttcgtcctccgactcctcaacttcggacagcgacaccgatgatgaacagagtcatccgccggcaaagagtaaaaagatggaaaagaacaccgaggaggatgttgtctgcatgggct

SEQ ID NO: 32261 - DNA, 972 bp, DROSOPHILA
tgttgagccgattggggttatcgataagatccgattgttggtgggactgccgaagtggcttctttcaagccaaaactgctattcattatatgtatattaagtttgaataccttatatataatataatatatatatataatactgtgacaatatgtgacataatacatgtaatggactaaaatgtgaagtgaccaatggaaggtttttataagatttaacatatatagctagattcgatagtttctcaaactggcacctcagatggtcagatggacgatattcagtttaaccacaaataacaacgctatgaattctaccaatccgaagaaaacagaagataatgatcgccatgaacgtcaattgcagagccgcaccaaggactggggcaaaaccaagttcaagccaaagaagtatgtccaaccgaaaccagcgctcgttccacaagctactgcgacgccctggcagcatgtgaagaacgacataattacggattcttcggaccggggacaccaggatgtggacagcgaggacgcaaggcagttcatgcagcagcgtcagaagaaccaccgtcgaaatgtcatagaagccaaccggtcgcaggatactacatgggagcccttcaacgatgagaagccctccacggaaagaaaacaacagctctccacggacgttgagaacttcacttttaaggagcggaactttttccgaaagcaactcactttgggtttcaatttaacgaaaaagaatgcaacacttaaatctgccctaaaggacttgaaatatagacagctgacaaaggacaagttcgaattagaacgttcgaatcatacacgtcgaaatgtgaaatcatcaaatgcgaaagaagcaaagggtagccatccctttcagaaaatgcgagataatgcacatccttatcgaaagaagggaccaaataggagaaatccgtttcagaaagggccacataatgaataa

SEQ ID NO: 32262 - protein, 236 aa, DROSOPHILA
MVRWTIFSLTTNNNAMNSTNPKKTEDNDRHERQLQSRTKDWGKTKFKPKKYVQPKPALVPQATATPWQHVKNDIITDSSDRGHQDVDSEDARQFMQQRQKNHRRNVIEANRSQDTTWEPFNDEKPSTERKQQLSTDVENFTFKERNFFRKQLTLGFNLTKKNATLKSALKDLKYRQLTKDKFELERSNHTRRNVKSSNAKEAKGSHPFQKMRDNAHPYRKKGPNRRNPFQKGPHNE

SEQ ID NO: 32263 - DNA, 3394 bp, DROSOPHILA
ccatcgatcgttactccaagccaggttccgatcgctttgtatttctcctttgcaccaaagctggtggattaggtattaatttaacagctgctgatactgttattatttacgattcggattggaatccacaaaacgatttacaggctcaggcccgatgccatcgtattggccagagaaagatggtaaagatttatagattgctttgcaggaatacctatgagcgtgaaatgttcgacaaagcttcaatgaaacttggattggacaaggctgtattgcagtcgatgaacacccaagggtctaaagatggcaataacaagcagctgtccaaaaaagaaattgaagatcttttaaaaaagggtgcttacggggccgtcatggatgacgacaatgctggtgacaaattttgcgaagaggacatcgattcaatccttaagcgacgcactcaagtcatcacaatggaatcggagaagggttcaaccttctcaaaggcttcatttgctgcatccggtaaccggtcggatattacgatagatgatcctgatttttggaccaagtgggccaaaaaggttgacattgatcccgatgcttgcgaaagggatgaaacggaggacttggttttgtccgaacccagaagacgcacccaaatcaaacgctacggccacgaggacgtaatggagctcaattccgaggaatcttccaatgagaatagcgacgaggagggaggaataggtaaggctgaaaaaaagggaaaattcttatgtaaagcattttaatcatttaaatccaattagggctccgttcccgtcgccgcaaggagaagcgagatcgtgctcgtgaaaagaagggcaacgatgaatacattccacgagaacgggatgcattagctgctttgggcttggaggaaattcaatatggtaactgggccaagtctgagtgctttaaagtggaaaagggactgctttcctttgggtaagtttataacgagctaaaatgccacaatttaattttcttcgagccgatttcgccgacgtatggcattgttgagcttcatattgaggatgtagatctttctctgcagcattttttcttccttttcaaggacgtgggcctcttcctttcgctcgatatactcgctgacactgggggcctcatagtcctggagctgtgctctcagctcatccagagtcacgtagtctttggtattgtgcatttgaactgcagccacctccttttccagtttctgaatggctcgcgtgacttcatccgttctattcagaacggtacgcatttctgtttccaagttcatcatggcctgtttttcctcagtcatggccaaggaagtttttcctgtgactcctttaagtcccgccatgtgtatgtttttttcttccagttgattcaccagctcggttctctttataataagtttttcaaaatctacagccgtcaggataccactcaggtctgatttggttatcaaatccgcccgatgctgctgacatgtttcttgaagcgatactatggttaacttcatagttcccagtaaagcgcgtgcatttttaaaccaatttgaagtgaacttgcgcaatttccgttcaatctgtcgctcagttgcagactccaaaaaggccacatcgttctcatcccgtaaaaagtggagcataaagttgttctccgtctcaatggtttcctcacttcgaaagcggagctcttctatcttggctcttaactgtttcacttcggtcatggctaaaaagtgcattgtgaatgaatgagttttgaaaacgagatctaaaatgcaattaacccaccatttctttcaatatccgcgacccgcttctccacctcagctgctcttttctctgccatttcggctttggccttaaaatttagtttgtagtccattccacgtcgcttttctggagcagatatgccacttatggatactagctgattcactgacatgggtatggagcgtttggagctggagtgccggctattcacgccatgacttccctgtgccgatcctcgctttgtttgcaactttctaagaatggaagtacggcgctgtctcaatcccaataacaactttggatcgtttttctcaaggaattcgaccattatgtggttctccagccttaaagtagccacatcattatgcacttgctctatggtgtggagcatgtcgatggcgtccaaactggacaatcgcagttgccgctcttcttccgtaaagttgcgaaagtcctccagatagaacttgtagataatagccacgacgtccaagtcctgcggagcagcatattcgaatacgtgaagcttgcttggatgagatttcaccgagcgtctgctctgcgtgtcggttttaaggctgtgtcctgacgtgctcatcatgagaccagtaacgttaaggaataatttatggaatttgtttgaaatatatgtattttgaccggtttgttggtgataaagggaaagtatacaatgactagattggtaacatacaacaaagtctatctagtctatccctttgcccaggcatattacaaacaaacgtgatctcattggtaaatacttttttttcagttggggccggtggtcggaacttttggagttaggacaattcaaacgaggttggcgtgatgtagacgtcgaggattgtgctcgcatcatagtaagttaaatgaaactcaaaccaaaaataaacgtgtgcaaaaaaatgatgaccaaccatgctaatattgagaaaactcaaggttttcgctgagtaaaactatcttctcaacccgctgatatgaatgtcagaaagtttatagaatgcactttacaaaagctttaacattaatattgttctattctcgcagcttctttactgcctgcaggtgtacaagggtgatgagaaaatcaagacgttcatctgggacttgataacaccgacggaggacggggaagtgcagaagattagcagggatcatagtggcctacacaacttggtgccacgaggtaggaatgccaaaggtatggtaaaagatacatttacgcacactccaactgctgcacggacgtagagagttttaaaaaaccaatacaaaagtaatataaacgaaacggtctaccagaaaaaaatagcaaacacgttttgtaaaaaaatttctttatgctatctgtactgggctctggactttctacatcattttaattgcgttcttctacttatttgtatccgtaaatgtcagatacttaaagcaagaatataatttaatttgtgtgtctaatggcctctcctccgtaaaaacttccttcaatattaaatcgaatcacccaataaagactgaaccagaacagagacataaattattgactcatatacgcgacgcgacgaaaagaagtgtgt

SEQ ID NO: 32264 - DNA, 1332 bp, DROSOPHILA
atgatgagcacgtcaggacacagccttaaaaccgacacgcagagcagacgctcggtgaaatctcatccaagcaagcttcacgtattcgaatatgctgctccgcaggacttggacgtcgtggctattatctacaagttctatctggaggactttcgcaactttacggaagaagagcggcaactgcgattgtccagtttggacgccatcgacatgctccacaccatagagcaagtgcataatgatgtggctactttaaggctggagaaccacataatggtcgaattccttgagaaaaacgatccaaagttgttattgggattgagacagcgccgtacttccattcttagaaagttgcaaacaaagcgaggatcggcacagggaagtcatggcgtgaatagccggcactccagctccaaacgctccatacccatgtcagtgaatcagctagtatccataagtggcatatctgctccagaaaagcgacgtggaatggactacaaactaaattttaaggccaaagccgaaatggcagagaaaagagcagctgaggtggagaagcgggtcgcggatattgaaagaaatgccatgaccgaagtgaaacagttaagagccaagatagaagagctccgctttcgaagtgaggaaaccattgagacggagaacaactttatgctccactttttacgggatgagaacgatgtggcctttttggagtctgcaactgagcgacagattgaacggaaattgcgcaagttcacttcaaattggtttaaaaatgcacgcgctttactgggaactatgaagttaaccatagtatcgcttcaagaaacatgtcagcagcatcgggcggatttgataaccaaatcagacctgagtggtatcctgacggctgtagattttgaaaaacttattataaagagaaccgagctggtgaatcaactggaagaaaaaaacatacacatggcgggacttaaaggagtcacaggaaaaacttccttggccatgactgaggaaaaacaggccatgatgaacttggaaacagaaatgcgtaccgttctgaatagaacggatgaagtcacgcgagccattcagaaactggaaaaggaggtggctgcagttcaaatgcacaataccaaagactacgtgactctggatgagctgagagcacagctccaggactatgaggcccccagtgtcagcgagtatatcgagcgaaaggaagaggcccacgtccttgaaaaggaagaaaaaatgctgcagagaaagatctacatcctcaatatgaagctcaacaatgccatacgtcggcgaaatcggctcgaagaaaattaa

SEQ ID NO: 32265 - protein, 443 aa, DROSOPHILA
MMSTSGHSLKTDTQSRRSVKSHPSKLHVFEYAAPQDLDVVAIIYKFYLEDFRNFTEEERQLRLSSLDAIDMLHTIEQVHNDVATLRLENHIMVEFLEKNDPKLLLGLRQRRTSILRKLQTKRGSAQGSHGVNSRHSSSKRSIPMSVNQLVSISGISAPEKRRGMDYKLNFKAKAEMAEKRAAEVEKRVADIERNAMTEVKQLRAKIEELRFRSEETIETENNFMLHFLRDENDVAFLESATERQIERKLRKFTSNWFKNARALLGTMKLTIVSLQETCQQHRADLITKSDLSGILTAVDFEKLIIKRTELVNQLEEKNIHMAGLKGVTGKTSLAMTEEKQAMMNLETEMRTVLNRTDEVTRAIQKLEKEVAAVQMHNTKDYVTLDELRAQLQDYEAPSVSEYIERKEEAHVLEKEEKMLQRKIYILNMKLNNAIRRRNRLEEN

SEQ ID NO: 32266 - DNA, 4516 bp, DROSOPHILA
caaccacatatattgcatacttaatttgtaagtattactcgtaattaaaattattatataactgcagaacaacaaacaaaagcaacatcaaccagaagaagcaacaacagcaagaaacacccaagcatcaactattgatattgatgataaataaatatataaaaaataaattttaaaaattacattaacatacgatttattactgagctcctcgatttttagacgtgttaaggtagcctggtcaagtctgcgattcgtatgcccttaacgaaacttttccgcaaggcatttgccttgatcacgccgtaccgttccaggatatggccacccgaatacaaatggcagtcaagttcttgatggattaattccgaaatgtatccttaaaacagcatataaaaagcaatgttctttatgtgtgaattttggagttgtattttagatctttttgctatgcatttgtaatgtacttgtatacggatgtatattcacagtaattgactaaacttaaaaaaaaagacaggcgtgttgaagtccgataaagcaaagtgatacctaaaatgttttgagttcacaggcacgagaactaatttctttatataattagaggtgatcgaatataggatgagggtgttttggttttgaggtgaggaagagaacttacaataattacaaaaaagtacaaatgtataatatacaatatataaatcagtgtatccgcttggcccgcctcgcttagcttcgatgcgagagtaaactttaagtcttatagtctaagctaacactgctccaatgttttgtttaccaaaatatgattttttttgcggacgcttacgggcgactcgtgttaaacacggagaaacagtcagattctcgattgatcttttttgtaacagtgaatttatatgagccacagtattaatagatacgacccacagtttgcaaccgcaaatataatctagttaggcaaccatcttgaagggcagcgtaatttgcgcatacttttctgtgggctattggctttgttttttccaggtgtccatcgtttttattccactttaattagtggaactgaaggaagagggagcgttcgcaggcctcctcaagcaaagcttgctgcctaaccttctcttcgggagtgagctctttcaccaattcgtcgaagccatcgtccgagtaagtaggttcctcatctaccatgcccccatcaatctcttcaccagcggctgctggcaagagtggttcgccaatgatgctacgtatgtcattgggcaacgtttcagagcccttgagctgcagatagataccctcagctacctgcaaggttttttgaacatctatgtttccagacagttcgtttacatgcttcaggatttctgtgaactcgtactggctgtcgatgatcactctagtctcttgatcgaggatggccaccgaaaacagtaggtggaagttggggcagggtagccgagtccacagacattcccataatttcaaaacgtcctcgctgtttagctcccgcttataccaaaccaagagccatctgaagcagaagtacatgttgtccgagtcgtgggatctcatgtagttaaatagcggggcattggcaaattcaataaggcgacgaatctgggcgaactgcgttttcatgcccgcctggtctatgtcaaagttggtaaacaccagctccatgaagcccacaaagcaccagaaggtgtccacttcgtttacctggatctccaaaatgggcgcaagcagatcggacataccctgaacataaccaaggtcaaagttatacatcacgtatgtcataaggataccctggagaagggttagattgggattatcctctccggcaaagaattgcaaagagcgatctgtgcgtttcacatccttttcaatctggcacttgcgctcccggtagccacagaaattcgcctcctgggtcgtagtcatagcaagccactgggccttcatgttgtagtactcaatagacttttgcttacgacgctcgatccgctccacatgagtatccgaccaaaggtagtaattgagaaggaacttccaaacctctggccgcaggctctgcacgacgccgccgcggaagatgagctccttgattcgggcgctatcggaaattcggccgtcgggcgtctgaaactctagccactgcgtctcggttaggggatgacctgtccattaaaaatatattaataaactcatgttcggaaccctaagaattatttctattagtaaattcttaagctttttaagtgtcaagaactctcttttaagaattaatatcaacccacctctctccacccgctggcgatcgggcaagttgttaactattttttcgtcctgggcattaagagtttccagctcgctgtcggcgggagacttctctgcactgcccccacgagactgtccgtttgaggaacaggcactattggtgctgccacttagcccaattatttgataattgtccggtgaagtctgccgatcgccagagatcaagactcccggcctagatttgggcgaacgctggaacggaggctgtacgtaatcgggaatgttgcccaggattccggccagcttgttgggcagccagctctcacgtggcaattggcttgccttaatctggccaatgtcaagttcagcaaacgtctttttcaatttttggttctcggtggtcaatatggcatacacctcgccgccactgcgactagtctcggcgttctcgattaggtgctgatcgcgcatggagcgcacaaataggtctgcgtttccatgctggaaaaagaactcgctgtggacgccattagcccctttccgcataaaacggatcgtctgtccgcgatggcgcacctctacagaagacaaatcttccagttgggcacgcatgactcgcgaacgggtggtcgctccaccgctcggttcaatgggtctagtgttgaaggcacggcactcggatgtggtgcgtgttcgcccggaaatcctgtctaccagcgcccagtctccctgatcctggctgtcgtccgcaatcatgatactgtcattgggctgccactcgagcaacagtctcctacggggcatttccgcgatggatcgcgaatattccaccaaggaaagggagccgctggtgttcagatccgcgatgtgctccgcactggctttcttcagaagcacgccgtcgtgggtgaagaggatctttggatcgtgtaacggaataacataatggcagtaaggaaggaacatccatgagtcaggtgaaaaacgagacacttacgtttcccgttccctgctgaggcagattctgcacgtcctcctccacagaagacaactgcgactcgttgaaaacgcccagctgcacctggtgacagcggtcatatcgcaccgattcgtccatggctgccggcaattatgtcttcttgtattatagttcaaattagcctgtgctattacgtttcagatataaacaattgtcccacgaaggtgctaaattttacatgtcagcgttttgtatgggggtattttatcaccgaggtaaaaatggccacattccgtgacatttttccatcggtgtggcagccttagtttacaagaagtctggcagcgaaattagtcaattgctattagaactgcaaactgctattagccaatacttcatcgtgtttccgttctcgcagggtctggaatctctttcttttttatgtcttttgcaatttgcggaccatatgataatttacttggataaggggccaggcgaaccaaaaaatatcgtatctctagaattcctcgaaacggcgtacgctttgctctgctctctagtctgcagttcaattcataattagtttgtataaaaacttgtaatgattttatcctgtccgcctaccccgcataatcacttcataacatttccaatcgagagtcaagtaattcgcagagcaacagagcacgatcaatttagtttctctcgactctcgtcgatttcaccgagaacagagatcattttaaaataagcaaacatatctagttgtattttgtaaataggttaaatgaatccgtcttatttgataatgatcttcgttgcctcttctgggtgttttgaaaactcagagtttagttcgcccgagaacgtcggacaaagcacaagcactcgacaattttaaaattataaaatataatgacacattatcaaaaaatataagccaaatataggtgggtgaagaacattttagagctaagctagaataaaatagcttaaattttccaatacatatacgtatattccaattttaattcggtgcgaaaaaacaagtctataacgttaagttcgagttatataattaatgttagcaaaatggcctaagaatgtcaacaaatgcgatgcatctcctacgtaattggacttttcccaaagtttccagacgttaataatgtagtaactttacattttaacttgtgtgagttttggcactatttgtcattggcattatttttttgcggattttatcaa

SEQ ID NO: 32267 - DNA, 2317 bp, DROSOPHILA
acgctgacatgtaaaatttagcaccttcgtgggacaattgtttatatctgaaacgtaatagcacaggctaatttgaactataatacaagaagacataattgccggcagccatggacgaatcggtgcgatatgaccgctgtcaccaggtgcagctgggcgttttcaacgagtcgcagttgtcttctgtggaggaggacgtgcagaatctgcctcagcagggaacgggaaacatcctcttcacccacgacggcgtgcttctgaagaaagccagtgcggagcacatcgcggatctgaacaccagcggctccctttccttggtggaatattcgcgatccatcgcggaaatgccccgtaggagactgttgctcgagtggcagcccaatgacagtatcatgattgcggacgacagccaggatcagggagactgggcgctggtagacaggatttccgggcgaacacgcaccacatccgagtgccgtgccttcaacactagacccattgaaccgagcggtggagcgaccacccgttcgcgagtcatgcgtgcccaactggaagatttgtcttctgtagaggtgcgccatcgcggacagacgatccgttttatgcggaaaggggctaatggcgtccacagcgagttctttttccagcatggaaacgcagacctatttgtgcgctccatgcgcgatcagcacctaatcgagaacgccgagactagtcgcagtggcggcgaggtgtatgccatattgaccaccgagaaccaaaaattgaaaaagacgtttgctgaacttgacattggccagattaaggcaagccaattgccacgtgagagctggctgcccaacaagctggccggaatcctgggcaacattcccgattacgtacagcctccgttccagcgttcgcccaaatctaggccgggagtcttgatctctggcgatcggcagacttcaccggacaattatcaaataattgggctaagtggcagcaccaatagtgcctgttcctcaaacggacagtctcgtgggggcagtgcagagaagtctcccgccgacagcgagctggaaactcttaatgcccaggacgaaaaaatagttaacaacttgcccgatcgccagcgggtggagagaggtcatcccctaaccgagacgcagtggctagagtttcagacgcccgacggccgaatttccgatagcgcccgaatcaaggagctcatcttccgcggcggcgtcgtgcagagcctgcggccagaggtttggaagttccttctcaattactacctttggtcggatactcatgtggagcggatcgagcgtcgtaagcaaaagtctattgagtactacaacatgaaggcccagtggcttgctatgactacgacccaggaggcgaatttctgtggctaccgggagcgcaagtgccagattgaaaaggatgtgaaacgcacagatcgctctttgcaattctttgccggagaggataatcccaatctaacccttctccagggtatccttatgacatacgtgatgtataactttgaccttggttatgttcagggtatgtccgatctgcttgcgcccattttggagatccaggtaaacgaagtggacaccttctggtgctttgtgggcttcatggagctggtgtttaccaactttgacatagaccaggcgggcatgaaaacgcagttcgcccagattcgtcgccttattgaatttgccaatgccccgctatttaactacatgagatcccacgactcggacaacatgtacttctgcttcagatggctcttggtttggtataagcgggagctaaacagcgaggacgttttgaaattatgggaatgtctgtggactcggctaccctgccccaacttccacctactgttttcggtggccatcctcgatcaagagactagagtgatcatcgacagccagtacgagttcacagaaatcctgaagcatgtaaacgaactgtctggaaacatagatgttcaaaaaaccttgcaggtagctgagggtatctatctgcagctcaagggctctgaaacgttgcccaatgacatacgtagcatcattggcgaaccactcttgccagcagccgctggtgaagagattgatgggggcatggtagatgaggaacctacttactcggacgatggcttcgacgaattggtgaaagagctcactcccgaagagaaggttaggcagcaagctttgcttgaggaggcctgcgaacgctccctcttccttcagttccactaattaaagtggaataaaaacgatggacacctggaaaaaacaaagccaatagcccacagaaa

SEQ ID NO: 32268 - protein, 715 aa, DROSOPHILA
MDESVRYDRCHQVQLGVFNESQLSSVEEDVQNLPQQGTGNILFTHDGVLLKKASAEHIADLNTSGSLSLVEYSRSIAEMPRRRLLLEWQPNDSIMIADDSQDQGDWALVDRISGRTRTTSECRAFNTRPIEPSGGATTRSRVMRAQLEDLSSVEVRHRGQTIRFMRKGANGVHSEFFFQHGNADLFVRSMRDQHLIENAETSRSGGEVYAILTTENQKLKKTFAELDIGQIKASQLPRESWLPNKLAGILGNIPDYVQPPFQRSPKSRPGVLISGDRQTSPDNYQIIGLSGSTNSACSSNGQSRGGSAEKSPADSELETLNAQDEKIVNNLPDRQRVERGHPLTETQWLEFQTPDGRISDSARIKELIFRGGVVQSLRPEVWKFLLNYYLWSDTHVERIERRKQKSIEYYNMKAQWLAMTTTQEANFCGYRERKCQIEKDVKRTDRSLQFFAGEDNPNLTLLQGILMTYVMYNFDLGYVQGMSDLLAPILEIQVNEVDTFWCFVGFMELVFTNFDIDQAGMKTQFAQIRRLIEFANAPLFNYMRSHDSDNMYFCFRWLLVWYKRELNSEDVLKLWECLWTRLPCPNFHLLFSVAILDQETRVIIDSQYEFTEILKHVNELSGNIDVQKTLQVAEGIYLQLKGSETLPNDIRSIIGEPLLPAAAGEEIDGGMVDEEPTYSDDGFDELVKELTPEEKVRQQALLEEACERSLFLQFH

SEQ ID NO: 32269 - DNA, 2900 bp, DROSOPHILA
cgagagaaagccaagaaatcctggggccatctgatcaaaaattacaatcacaatgcaaggggtaatgtggaacaatttagcatctcgtcggaggatagcatttgggaggaggagatgcactcatgtcctgcggaggatgacgaaggcgacgataatgaagagttttccagccacagtactggtagcgatggcaatgccaataatgaaccttcatccccatacaagccgatattgtttgtaggatctgcaggtctgaccgagcggatatcagcacaaacagggggtaagaccaagtacaagcatcagatgatggaaaagtatatgcgagatagttccacggcaaaaacgaccagtcaacagggtacgcaactcaacaagtggctggaaagtgcagcaaaattcacaccggacaggaacaattatcacatcgagtggaatatgaccaggtaaggcaattcggggctggtatggtgaattttgataaataaaaatcgattcactttaggcagaaagctagcagtaatagcagttgtggacaagcgatctttaccacagatgtgtctggggctggtcgtggtggacgctggatgcttcatcataaggacgaactggaagcagcagaggccttagccaacctcgccttcaactgcaggcagcgctggcaccatatctaaagactgaagactccggaactgacgccatcattccagcagaagtttcaggccccgctaaaacgtgcaatctagtcaagtgggcttcttctggttttcattttcgaactttacagtacaatactcactcgttacatgattttcttcaagtttaaaaccttttagctacactcatttaaattatgtgataaactacgacgatcatattcatgtaaacgtgaaaaccaggttgcgccgagagttaagaattactacagctagtttagagtgaaaaacaattatataatttttgatttcttgttatataacaaacttgacttttttgacttctacgtagactttggcgtttcctcattcatctggtttttagcatggacatcaagaacttgcacaaaactgttctgatgggcctgcagttgctgaataaggtggccaggtgcttgactaagggtctggacaagttgtgcctggaccgcgtgcaggccgggcatctgagcgtaggccacaagctggttcctactcagcatggtctcctccacgatgcctcccagcaggaccatttgcggcaccctgcgaacgattcgtagcagtgcggcagtcttttccgggtccggtgagaagacgatgcaatgattggagtggaacaggggcacaatcgcttcgtatcgagtattcttcaccgcctgttcgatgatcttgctgccgtaggacttgaggtgcaggttctgcttgtgaagctgaacgcgcacgcggaagatgtcatcggcggttatagaacttaagtgaaagaaggcaaccagtcgggaatgatccagccaattccgcacctctcgtgcgatgatttcgttgtatggattctcctgctgctgttgcgtgcgctccgcacgcgttttgaagcagctcttagcttttgggagttccggatatttcggctgcgtgactgcgactacccgggcccgctcgtagtgcggtgctttcggccgctgtatattgatcttacccctaaagcgaagaaattgtagcgcaggagtactgctcttagccagggaaaggcctaaaatcatttacacatcagtaaaagcttgtacatagatgttacatgttacacaacaggccaagctcaaaatggcaaccgctatgaaccgtccaacttacttctttgtatcagggtggccatgctgtagaactgtattaaggtatctaatctctaaaactagaacttctccttatttaactttatttttactaaaacgatgtttattcattcttatcgatagccagatatttggtttcatcgatatttcgccggctagcgttgccacctcgtcgagcccttcttcggttacaattaagtttattttagtttaaagataagattaaaaaaaataaatagtcagtagtttgtttgattaaatattacaattttaatcatgtgtgagaactatttactttaaacctataaggttctcacacgatataggaaatgtgccgagaggagaataagaagacgaggtaattttttttgctaatcctgatttggacatgtgctcccgattttaatcgattccacactgcatatagcttggtaaaaataatccccaaaaaacccacaacgattgcataggtatagaatttatttaattacagttataacattaacatctatatatatatatgtatatatataatgtatatatgtatgtataagttgtatttcgctatggggttcgatttggatttacggcccgagaaacctatagaatctgggagcgaagaaaataaaaaacaaaccaagtgtatgaaataagtgtaatttaatctttttcttcaatgtaacttaggaaataactaaaaagtctcttaaatcatacaacttatacattaacatttgtttaacagcgcttcctatgctttttcttgaaaacgtgttctttttattttctgaattattcacttttaaacttcttttgtttatctgtttctgggtgaccttttatagatctgatctctcgtgttcttgtatcgttaattatgttatataatgtacagatttcttttaggtttagttttaaaacatacaactaaatacacgctaaacactaattaaactgtatttacattttttacttgttagagcctaaataatttaaatatgttacagatgtatttttttattttttgtttttttttttcactcgtgtgttttgctttctatattattccggttac

SEQ ID NO: 32270 - DNA, 799 bp, DROSOPHILA
taaggagaagttctagttttagagattagataccttaatacagttctacagcatggccaccctgatacaaagaagcctttccctggctaagagcagtactcctgcgctacaatttcttcgctttaggggtaagatcaatatacagcggccgaaagcaccgcactacgagcgggcccgggtagtcgcagtcacgcagccgaaatatccggaactcccaaaagctaagagctgcttcaaaacgcgtgcggagcgcacgcaacagcagcaggagaatccatacaacgaaatcatcgcacgagaggtgcggaattggctggatcattcccgactggttgccttctttcacttaagttctataaccgccgatgacatcttccgcgtgcgcgttcagcttcacaagcagaacctgcacctcaagtcctacggcagcaagatcatcgaacaggcggtgaagaatactcgatacgaagcgattgtgcccctgttccactccaatcattgcatcgtcttctcaccggacccggaaaagactgccgcactgctacgaatcgttcgcagggtgccgcaaatggtcctgctgggaggcatcgtggaggagaccatgctgagtaggaaccagcttgtggcctacgctcagatgcccggcctgcacgcggtccaggcacaacttgtccagacccttagtcaagcacctggccaccttattcagcaactgcaggcccatcagaacagttttgtgcaagttcttgatgtccatgctaaaaaccagatgaatgaggaaacgccaaagtctacgtag

SEQ ID NO: 32271 - protein, 248 aa, DROSOPHILA
MATLIQRSLSLAKSSTPALQFLRFRGKINIQRPKAPHYERARVVAVTQPKYPELPKAKSCFKTRAERTQQQQENPYNEIIAREVRNWLDHSRLVAFFHLSSITADDIFRVRVQLHKQNLHLKSYGSKIIEQAVKNTRYEAIVPLFHSNHCIVFSPDPEKTAALLRIVRRVPQMVLLGGIVEETMLSRNQLVAYAQMPGLHAVQAQLVQTLSQAPGHLIQQLQAHQNSFVQVLDVHAKNQMNEETPKST

SEQ ID NO: 32272 - DNA, 2405 bp, DROSOPHILA
aaggcagaagaaacactacgaataaattattaagtacgcataaaattgttttcaccaaatatgtaaaaaatattagtgggtttacttttttatgcgatggcgtaagtttatatgtatatcatggaaatattaaatataaacaagagagaatactatagtcgagttccccgaatatcagataccccttactcagctagtgtaaatgcggacgcgaaatttcataatttttctgggtgtggctgttttgggcggttttagggagttgcaaaaagttttttagaaaatcgatctatcgatttttacaagactaatcaaaaatgaaaaaatttcaacacattttttaaaattgtgtaaaatttttgagtgggcgtggtaacaaaggtcaacaaatatctgtctctagaatctgtgtgctgaatctcaacgttctagcttttatagttcctcgacgttcaaacggacatgtctagatcgactcggttattgatcctgatcaagaatatgtatactttatacagtcggaaacgtttccttctgcctcttacatacttttcaacgaatgtagcacacccttttactctacgagtcacgggtataaaaatatatagatgtagatatgcttcaaattgcataagagttagaatcaagtcttgcccaagattagaatttaggattgagttaaagatctgcgccgttcgttaccaaactctatctgcctttagactaattttaagtcagaacggcaaagtatgacttcgcctgttcccttgattcactttaaagtattcaaattatttggtagctctatcaattgtgatatgagccgtcacaataaaaaccgacaaagttaattatggaaattatttgaacaactgccgtcgctgtggattggcgcacagttgtctatttaagaggcaaggaaactggactgccgtgaatacagttgatcgataggagccaaagcagtatgttttacgcattcatagcacttgttttggccatgctccacctgtcattcgcagtacaggtgcaaacggagcacaccattgtggaggaatggagctggcaagaccatcacagcaacagagacttgggaagctataactactacacagctctagattatgatcaaaatttcgacggtgatgagaattcaaacgataatgaatatgaagaggatgatggcagggctactgccgccggcttggaccgggatgaggatccgtgcgagcgcagctgtccccggtactaccggcctgtctgcattctccgcaatggccgcaatatgacatttgccacgctctgcgagttccacaatcaagtacgttgtgccaacgatctaagaagacaaggtcatggctatgtggtccccatctttcaataccaacatgatggtggctgctaaacaaaatgattcatttagagtggttttgctcaatcaaagagtcacattcatgaccaaaaaactcgaaatagcatttcaaaacataaagctcaaaattcttcattccctccctggataatgaagattcgaaaagcgatgaggacacaaatatggatgaatttgaatgggatgattctcctaccagcttggaccagtgtgacagtaaaggctctcttataggacatcagcttgacaacagatataacaactatcaaggaaaattgtattacctacataaataagattgtacggctccaaatgtaattcaaacaaaataaaatgtgtccgagatacaattccttttaacgtatgtatgttcgttttcatgtttacatgtcattattgtacatatgtatacagttctaatgttattataactgtatactgaaactgtacttgcgcgacttaaaacctacatgtgtatgtcatttatgtacatacatatacagtttgtatgttatcttaactgtatcctgaatctgacggtaaccaaaacgcatgcttaaaaatgatatgaagatcgtaaccttttgcaatcaaaattttaaacaccaatttttgcgactttgattggtacatatgtacatatgtacgtatataaatatgtagctcgcaagctcacattcacacaaacatatgcatataaatatatttaaagaaacaaacaatttcaatcatttaccttttaacgaatgcagcattccgcgctgttggtacagcttatagggcgtcatactaaatgcaatcatgggaattaatttaaacaacggaatctttaccagcctctcttgcctgcgatcgcgtacaaatcttcgacatgcagatcaattgcgttggttaaatagcgcacaggagtgacctgttgtttttgcaagaccgctgagaataacacttgggacactaataaaactacttctactattaatttcactacactaagtccggcagctgggaactccgt

SEQ ID NO: 32273 - DNA, 405 bp, DROSOPHILA
atgctccacctgtcattcgcagtacaggtgcaaacggagcacaccattgtggaggaatggagctggcaagaccatcacagcaacagagacttgggaagctataactactacacagctctagattatgatcaaaatttcgacggtgatgagaattcaaacgataatgaatatgaagaggatgatggcagggctactgccgccggcttggaccgggatgaggatccgtgcgagcgcagctgtccccggtactaccggcctgtctgcattctccgcaatggccgcaatatgacatttgccacgctctgcgagttccacaatcaagtacgttgtgccaacgatctaagaagacaaggtcatggctatgtggtccccatctttcaataccaacatgatggtggctgctaa

SEQ ID NO: 32274 - protein, 134 aa, DROSOPHILA
MLHLSFAVQVQTEHTIVEEWSWQDHHSNRDLGSYNYYTALDYDQNFDGDENSNDNEYEEDDGRATAAGLDRDEDPCERSCPRYYRPVCILRNGRNMTFATLCEFHNQVRCANDLRRQGHGYVVPIFQYQHDGGC

SEQ ID NO: 32275 - DNA, 2237 bp, DROSOPHILA
cagttttagctaaacgaaatagatatagtctcctaaagtcagcaaaactacatttattcgagtagcaaatactgttcatgttttcaggaattcaaatgaagtactgaagtaatgaagtcactttccttaaaagctaggccataaaaatcgtaatgacttttttgtagtttgtagaaacttttgccgtctggtgtatctgtttattatgctatacagttttaagctataggaaatgtttaggtacttaaattttcaaaaaatttcctagaaaagtattgttcaatatatcaagaaatgtgttctattctcatcgtaataataaccgcatcattagaagttaatgtagtcctctttaacaaagtgcgcaccacaaagtacaaatttcttttgtgttgaaaacgtaattaaggaatctattctaaatgaaagatgtattatgcattaagcctctaatgtagtttttaatcgacatcaataacatttcagagctcagcttcacgtgtgtaataaacaatcgtacattagtctcccctggctcagttccggtttttacctatcaagcctacaacaaaaagcgttattaaacatttaagtttttaagcccgaatcgaggcttacacgtgccaccagcattgtataagtaagccattatttataaatcgaaattaaccttgatatgcccacatacattcgacaagtgtgcgatataagcttaaaaaataaaaaataatgtactgagtaatgaatataaagtttcgcatccaactattctagttttaaactacattgtttagttccaggaaaataatgtaattacaagtgtaaacatatattagatttcaaaatatataacgtacaacgtatatatatatatataacgtatttgtatgtttaaaatgtaaaatatcccaaaataatttgccaatggcaagacggcgagtaaaacattttgtcaatgtgaaaaaacacaaaaaacaagacgggatgggatggttggcaactaaccttcagttatgtcgatttcggcatttttggtctggaacttgctggccgctgcagccgccggacccgttggggcaccacccggcaccgcgccccgcgccgatcttaccgagtgcggattggggtggttggacttcatgccgccgccgtatccaaaaagatcgcccacaaggagcagcgagacgataacgaagatcatgaggcgacaacgccaggcggtgtcaatgagagccataatataaaactgtatcaattcacaagcgtttcacaactttatagttttcggtatttttttctttcagatgtttgatctctgctttggtttgttagcacctgggttttgacacttttttcaatggcaagccgacgagcaagaaaatggaaagttggggggaaaaacgaaagtagtttcttaatcgctttacgaaaacgttttcaaattgttgctgacgaacatgcaaagagcggcaattaaatttggcattcaagcgcacataactcgttagtaactgtaaaaccaaaatacagatacaggtaacacacgcgaaagcaacaggtactaagatataacgacgatatggagcggtacgtccgattcgtccaaaagttgcgatgccactgaactgaagcgggtccaagatataacactaaagctgggcccaaacgatcagctgctcgggagagtgagcgcaaagagccggagagccggatcaagcaatacttaggcccaggtacagctgttactcagagaggctctcgaaaatactcagagaaatagaaacttatcggagaggagtacctgtctgttcgcagatttacagcacccactgtaccgtattcgctcgtgttaattgtctgcaggcagtcgcgcagtcgccacagctgtccatcattcggctggaaaaaagttttgattaaggcgaacacagcacacaagtcacttacttactcaagtagtaacatagttacatatactaaagtgggctcacaggttcgacagtgctaatgaccccggttggggaattattgccaacttagtttggcgtgctgggtaatgaaattcctggagttgttttagagaaaatacctccacgtgcggatactgtaaatattgttgggaaaaaggtaaaaaacttgccaaataaaatttaattactaaataggataagtccctcgtaccataattcttaaaagtagtgccctttataaaaattaattttttttaatttcaatac

SEQ ID NO: 32276 - DNA, 237 bp, DROSOPHILA
atggctctcattgacaccgcctggcgttgtcgcctcatgatcttcgttatcgtctcgctgctccttgtgggcgatctttttggatacggcggcggcatgaagtccaaccaccccaatccgcactcggtaagatcggcgcggggcgcggtgccgggtggtgccccaacgggtccggcggctgcagcggccagcaagttccagaccaaaaatgccgaaatcgacataactgaaggttag

SEQ ID NO: 32277 - protein, 78 aa, DROSOPHILA
MALIDTAWRCRLMIFVIVSLLLVGDLFGYGGGMKSNHPNPHSVRSARGAVPGGAPTGPAAAAASKFQTKNAEIDITEG

SEQ ID NO: 32278 - DNA, 3557 bp, DROSOPHILA
tatatttcgttcaaggtgtgtggtaaaaatttgtaactgcgcctgaaagtatgcgatgaaaacctttgttttaaaagtaatcaaccaaaggttaattattttgaaatatctacaaataaaaaggtataactattgactgatatttacttaccttatagctttaccatcttaaatcatcttaaaaccagatattgatactaaaacttcagtttgggataaataaatgaaatttttttatttttattttttatttttatgggtgtatttattttttattgtaatcgtatcacccaaaaataaattttctgccatgccattgcaaaaactgcacgcagcttatattaatcaacatatttctaaacatggatttcccatctgacttggcatgcaatgtaccgtactttaagtcacattatactaggccaattaaactccacccagtcaaacgagaaatctccaatagtagatggccacatttgatgacggagacaaccttccattgcataacaatttctaaaaataagatttcattgccagcaggttgatcgctgcttcctagcaattacgaatctcgcacacctatgacacacttggtagcccgaataaaaagtgttagcttttatcgaagtcatttcacaaatcgcccgaaggtgagatggcaacaattaagatggattaaggcagacaattggggagtttgcacaccagagtgtaatttattaacaattacaggagcatccaactaacgactaggcgtaatgctaaatcggatcgtgactagtcacacgtactatatgtaattacaagctacctagatcttgtagccagtagatacagatacaagaggttacagttctacagtcacttcagtcaagtcggtacttagatctaatttacaaggtaatttacaagataagcttatcgaacggtgagaagacatatggtacaaaagttgaggggggtcgcctacatcctaatacttaaggttcggatccagtggctagaccctcactttgtagctgagcttcatcagcttcttggagctgatcgggcaatttggccagagattggcgcatcccataggtccgctgagattgtcgccagtgtgacgcatgagttcgcccatgtgggccgcaaaataccatttgctcggcggcatgttcatcatccagggcattgttggagatctgcaaataatgggcacattagacggaagtttctctgcagcaacgaaacacaactgaacaaatgttaaatattataataagccattatcatttcacgcttcggagtttgttcaagtttcgctttcagtagtttttcgtacatctagattctagattgcctcagccattcattcaccttgctgttgactcagtcgactctacatacatatatagatagctacgctggcctgacttttacattagcttcgcctcaccttcgtctcaagtgcgaggttacagctgaagttgaggtaggttacgactgctgatccatgggcttagccgggctcaaatatttgccgcatttagctaacccaattgacgcttttgtttccctaagtgctgcactttgctcaagtattgagtcaccgtccgtataaataattgtggtgtgcagcagcgttaatagaaattaaatggattgcaatgttagaatgctaaactcaaaccctttcaaacctgtttggaaactttcgtaatcgcttagcatgcaaatattttgtagatcagctcgaactggttctacttgttgcacttaacggacaaatattcgttaatgtatctagtcaattaatatatataatatatacatggaaagggatagtatcaatttggtatttcaatgaaataatgtttaagtagaaaaatatcaccaattaaatttagttttagcttatatgtctggaaatatttctatttgttttaaaggtctaaaaaaaagtgctgccacctttaacttcttaaacctttctaacaagctatagtatttattgaaactaacattattttatgcttatgctcttgtatattttgtgcaagtcatcacaaactagtttccataacatcttaaaacatccataaattcatgtgtttgctgacatttcggtttgttgtgtttgcttatttatttgctgctttagaaacagttaatcaacttcaaaaatgcacataaaacgcttttaatactgggaaagccatttaagtattattttgttgtcttaccagaaaattagcaaacaaatcaacttcgatttttcacaattcctgtcaaattaaatatttaaactttactttatctactattgtttggccatagctttgatgtactcattacttgttcactttttcccacttaaatatatagctttttgagttttccctcagtgtgtttccactcacctgatcagtcttagcagttcccgctccttttcgctgagttggtaatccgccttggaggccagttcgcagagcatcttggggagacatgattccttgatggcgtccgtgagttgggacttggtcttcagactagccccagtaaccactgccattccaggcttgagggattgagctgctgctgagagttcattgaaatcgtgctctataaataaaaacaaaaaaacactaataagtcaggtatgtagatgtattaatcagggggctggggctccatccgatttgacatttgggttttttgttttactcgctggcgctcatttgcatagcaaactgctttcaaattaagatttgagatttcgggaactgcgcacaaaatcgttaggaaatatacttgggaagaagccagatcggagaccccaactccaaggtcggcaaatctgaagctaaaaccaaacaatgactaatagatggcttaggactatagctaagaacattttgtcaacaaaaggcaacaaattgtgaacaattgagcaaatatgcaggtgggcaaatatgtaaaggtagaaattgagagtgtggaaagcgtataaacaaagcgagtatctgtttaattttttttttttttcgagtgcacagcggtgaataagccaaatatttatttggctatatggggtcggtcatctgttgcgaatacatctccacaacactttataaacgattcctatgccccgaacaaggccaagtcaatgcgttgaactttactttgcatatttgttcagtcattcaacgctcatttttattaattatggtcttcagtcgaatagtcattatgctactaccaactaaggcagctggttttgtcgaatttgaactttgaatgcggaaccgatgcaaaccctatcgaggtgtaaaaatccaaattcaatctgtttcgcattaaaaaacgtgttagtgaaaatttggcttcgaaaaaatgcagtcaggcatgagatagctggataaatagatatatttcttatagatatatttcttatttcttataattcattttattatgtttttgaaagaacacatatttactttacaggtttaaagtcatatgttatttcatattttgaactactgattataaaatgcatttttttttttggc

SEQ ID NO: 32279 - DNA, 339 bp, DROSOPHILA
atggcagtggttactggggctagtctgaagaccaagtcccaactcacggacgccatcaaggaatcatgtctccccaagatgctctgcgaactggcctccaaggcggattaccaactcagcgaaaaggagcgggaactgctaagactgatcagatctccaacaatgccctggatgatgaacatgccgccgagcaaatggtattttgcggcccacatgggcgaactcatgcgtcacactggcgacaatctcagcggacctatgggatgcgccaatctctggccaaattgcccgatcagctccaagaagctgatgaagctcagctacaaagtgagggtctag

SEQ ID NO: 32280 - protein, 112 aa, DROSOPHILA
MAVVTGASLKTKSQLTDAIKESCLPKMLCELASKADYQLSEKERELLRLIRSPTMPWMMNMPPSKWYFAAHMGELMRHTGDNLSGPMGCANLWPNCPISSKKLMKLSYKVRV

SEQ ID NO: 32281 - DNA, 2269 bp, DROSOPHILA
acaaatcttcggcgtttgactgtgagcaatatatcgatatctcaaccagaaagcttccatcccatgatatggccaaacttaaaagatttgaaaatgcaaaattgcgaaatctccacagtgatgcccgattgtcccaagctgaaaaccttatatatcaaattctgcaaatgtagaatcaaaggatatgtatgcagttttattttgaaaaacggcaataatatcgaggaaatcgatgaaagctgtgaaccggcaccatttgatggccagagtttccttcaagtcattcgaagctgtccaaaattgcaagtgttgtccactcaaatggggggtatcaagatctaccaagcttttgttacatccgtagtggatattctcaaggagactgcatcaacgcgaaaagaacccttcgagctgatattgtactgccgagacaagcttagatggtttcgacgatttgtgagtggaatctacaatatgtttactttacatacacttttcgttgttaattttcgtctttcagttacaacggacttctaatcctgaagtgattcatacgctttacctgtacaagttttaaggactggcaaattgtatatcagaaaacacaaaacaattaattataaatatattttaatttttatttaacctgtatagaacgattgtacaatttgtaaaacttagaaaatatttgatttttattttttaaattgtattgaattagaactgaataacaataattgcatatatctatctaatgttactaatataaatttataaatttatttaaactacattaaacttataatatttataaataatttcacaacttacgatgtgatgtcacttaactgagagctggagagtcggaatatgttcatacgtacgattcggtttctcttatttaacttttctttctccccctctcaattggattttagctagccgatgctcttgctgcagttttcagttcgcaattagctctcgggctaaaagctttgcgatggaaaaccagcggactatatacgatttgccgatcgaagtcctcgatctcatattcgtggaactacagagtcttgtggataaggtgcaactggcacaggtgcatgaaaagctgggcaaagcgtttgcgtaccacagtcgaagtgcctttaagaagctcagccctttctttggagtaactcaagaattgtggttggttattgtgagcctatgtggatcgactgttgaggaattttccagcagacaaatttggaacaccccatggagtgatatactggttgagtcgattgagcagcattgtaccaatttgaagtcggtgagaattgatgtgttcgaaaacaattgtgacggcgtgcggtcatttttgttgaaaatgagtaaattattggtatcagctgaacttactatattcacgaaagatccgaaaaagcttttcgattcggtcgcagaaatggctaatgtgacacaattagcattgaggggtaatattaccgaagatggtaagttaagtatgttagtgatagcccaatttaaatacaaaaatattatcaatattttcaatacttttccatatacacatttataccctaagaaattgttgaataaccaatacactcgctttttatttagtctgccagattcagaagttaactgctctggaggaactagtgatcgattataataaaagcttcaatccatttttacctttaaatcttctcgagatttgtacaccacttacgaatcttcgctccttgacagtacgcaacataactataataccctcagaacagccgcatcctttgatttggccaaagctggaggatctcaaaattaacgactgcgaaattattacggaattgcccgattgtccgaagctaaaaactttagacatgataaactccaactgctacattgaaggccttctgtttgggtttattctgcaaaatggagtgaatattaaaaagatgaatgaaaattccaatccacctccattcgatggagataactttctccaagttcttcgatcatgtccaaagttacgtgcattctatacaccaatgaaggctattaaaatttaccaagcttttgtgtcagccattgttgaagttctcaaggataacggcgtcaagaaggaggaaccttttaaactaattatttacgctcgtgcaaagtcaaaatggattcgtcgattggtaaaataaataacaaatagtgggaagcattatttattttttttttttttaagattccaaggacctcaaatcccgag

SEQ ID NO: 32282 - DNA, 201 bp, DROSOPHILA
atggaaaaccagcggactatatacgatttgccgatcgaagtcctcgatctcatattcgtggaactacagagtcttgtggataaggtgcaactggcacaggtgcatgaaaagctgggcaaagcgtttgcgtaccacagtcgaagtgcctttaagaagctcagccctttctttggaacaaatttggaacaccccatggagtga

SEQ ID NO: 32283 - protein, 66 aa, DROSOPHILA
MENQRTIYDLPIEVLDLIFVELQSLVDKVQLAQVHEKLGKAFAYHSRSAFKKLSPFFGTNLEHPME

SEQ ID NO: 32284 - DNA, 3382 bp, DROSOPHILA
gtagaagacattcaccgtcaagatcttcagtagatgctcgaaaaagattccaaatgacaaatgatgattgtaaagtaggtctgtaaacgtaaagtgtggtattgcagaacaaagaacttccgattttaataaaaatgaattgatttattaatcaattaattgattgattttttattgtattttttattctttttttatgtaatttccctgatttattaaccaatcatttaaagtattcctttgccacatcaacttcatgctgcgttatttatatctttagaccaattttcatttaaatgctatttttgcacgcggtccttaatagctcatcaattagctgaaagctgtcaaaaaataactggcattcctcttctcaagcatgtctttggggtagctatagatactcgagaaatattttataaaagcattttaattacatgtaagaggaattcagcttactgctgaaatccgcttacagaaagcaagcgaactgagaaaaactcaatcgagagcttgtgtgtatcttttggatacagatacgagtgcgacctacacaaagatagatatttctctgcgtaagcattattttttcttggccttttttatgaaatctcaaggtcagcggcaagtagctagctctttatgtatgaatgggatctaattgttcgtgaggagacaaagtgctcagatgggtgggttacgcgctgggaatacgacatgtgggtggttcctccataagtacatttgctaatggatataaggagattttcggggaagagctaagctactttatcgtcatgttcgcatttcaaatgcgcttgacaatgacattttctttcctttggatttgcaaatgtggctcaaagtcaatagacatttgacacaatttggcagaacgattatttaaacaagtgtctgtaatggaatgctaacgtctgttcttttttttcagctcgttggatctcaattgcattgttatcgttatgctgtacagtaaaacatggcaaagtcgacactttatgctgctggggtgacctgtctgggctttatttgcttcgccttggcatctgtggccattggcatacccatttggggttactacgatagtccatcgggtgagtgcgcactgtatttacacttaatttgattaatctaattccttttccaaattaacaggcggctatgacttcgatcgaggttatttcggaccgtttaaggtctgcaagcaattgacttataatcgcgagaaatgcggcaacgacgtgtccaagtttagattaagtagtaagtgttctaaactaataatattcgaggagtagcagactgtacaattagtctttacataaattgtaatgcaaaaataattaattttatttattttttcagatgcggtttttgtcagtggactcttggccattggcagctcagctgtgctgggcatcttctgcattctgtcggtcattcaacacgcgatgatctcatccagggagaaggtggttatgccctacacaactctagtgatagtgaagttaatgttggcattgctgggaggtgagtgcaaatgggtttggctaagaacgataaagaaatgttacttaatttatatatatttccaggtgtactggccatcatagcgacggttttgtttgctctgcaaattgatgagcaggagcgctatggcttcaagatatcgcggggcatttccttctatatacaggtgaataatggtcaattactcacggagcaggtggaacagtgatcaggcgaacttaaatacttctatgcatgaattcagtttaatacctattttaaatttttgataaagataccaaagtcgtgtgctaaatgcaggaactcgctgtttcataccactacatctactttcagacataaaataacgattttcattcaatttcacagattgtggctattgttttgacaattgctctgttcgtggccgccctgtacgatgtgatctactcgcgcagtccaggcggagatcccacaatggcgctggatgtgtcatctccgggcagtgccactacgttcaataatcctggtttcaaggagcctcgcagtcgcaacggcgtttcggtgacggacgcatccggtaagccctacagcggaatccggaatggagcgggaacggcgggcagcgtggcctccatgagcaccaccgtgaccagcgtgtccaatggatccacccttgactcggtgactcgttcaccgctgcgatcgagtctgaagaagccgagaccacggccggatccaacgttaggcattcaaaatcccggctattctggatccggaagctcgccacctatgcggcgcaatggaagcgtgaagaaggtccgaattcagacgcacagcaccgaggtgtaagatggtttcaaccaactagaattaagcccttcaacaagcagcaaacgacaaaaaaaaaacaaaacaaaaaaatatacaaagactgtgtacagtagcaaaaaagacacaaagaaatgtttagatgagaaagatgtaggtgtccctcattaattaattgatagtttccaactgaaaattgaaaattctttttcatttgtcttccaacaaggatgcattaaattcaatcggccgaggccaaaaattctgtttcgtaagcaacggtttccgtccacgggcaaggcaagagtatttaatttaaattgaaagtccccaaaagtatttgagtttctatatacctcccaagtgcccttaagacccggcccagtcccgtgcactttggaaaatccacaaaattatccacaaaaacactaaaacaccaacctacaaataaaaataatttgcaatattcttatttaacagaaaaaaataaacgtaagcattataaagctacatttgtaaaatacattaaaataaaaatgacacaaattgttatttataattaagtttaagtcaaggcgcattgaacgcctttcaattaaatttgatatgtgtatgttattgttagcaatactttaaattaaacgcgttaattaacctaaatgaataataattgttgctctaagatttcactttaaaagacacttagattttttgctaagcttgtttgtttagttttttgtaatttaattgaaaaatgtgtttcatatttttctccgtaaggtaagaaaatactaaataaaaagacaaaataaatatttgttgaaaactttcttagatgtgtgaaatatttgcatgttttaatgatatacaaataaataaatgcaggattgcatgattactaatttccgtttgaactggatttgaactgcttggcatgcgtttttcgtgcaacaagcagtatgcacatgagcttcgtgcgaataaagcagttaacatcttcacgcaagcagtgtactgttat

SEQ ID NO: 32285 - DNA, 951 bp, DROSOPHILA
atggcaaagtcgacactttatgctgctggggtgacctgtctgggctttatttgcttcgccttggcatctgtggccattggcatacccatttggggttactacgatagtccatcgggcggctatgacttcgatcgaggttatttcggaccgtttaaggtctgcaagcaattgacttataatcgcgagaaatgcggcaacgacgtgtccaagtttagattaagtaatgcggtttttgtcagtggactcttggccattggcagctcagctgtgctgggcatcttctgcattctgtcggtcattcaacacgcgatgatctcatccagggagaaggtggttatgccctacacaactctagtgatagtgaagttaatgttggcattgctgggaggtgtactggccatcatagcgacggttttgtttgctctgcaaattgatgagcaggagcgctatggcttcaagatatcgcggggcatttccttctatatacagattgtggctattgttttgacaattgctctgttcgtggccgccctgtacgatgtgatctactcgcgcagtccaggcggagatcccacaatggcgctggatgtgtcatctccgggcagtgccactacgttcaataatcctggtttcaaggagcctcgcagtcgcaacggcgtttcggtgacggacgcatccggtaagccctacagcggaatccggaatggagcgggaacggcgggcagcgtggcctccatgagcaccaccgtgaccagcgtgtccaatggatccacccttgactcggtgactcgttcaccgctgcgatcgagtctgaagaagccgagaccacggccggatccaacgttaggcattcaaaatcccggctattctggatccggaagctcgccacctatgcggcgcaatggaagcgtgaagaaggtccgaattcagacgcacagcaccgaggtgtaa

SEQ ID NO: 32286 - protein, 316 aa, DROSOPHILA
MAKSTLYAAGVTCLGFICFALASVAIGIPIWGYYDSPSGGYDFDRGYFGPFKVCKQLTYNREKCGNDVSKFRLSNAVFVSGLLAIGSSAVLGIFCILSVIQHAMISSREKVVMPYTTLVIVKLMLALLGGVLAIIATVLFALQIDEQERYGFKISRGISFYIQIVAIVLTIALFVAALYDVIYSRSPGGDPTMALDVSSPGSATTFNNPGFKEPRSRNGVSVTDASGKPYSGIRNGAGTAGSVASMSTTVTSVSNGSTLDSVTRSPLRSSLKKPRPRPDPTLGIQNPGYSGSGSSPPMRRNGSVKKVRIQTHSTEV

SEQ ID NO: 32287 - DNA, 6313 bp, DROSOPHILA
ttgtcccaatagaagccgagtataaaaagaaaccaaatcgctgtgggcattaaacttttagggcctgtcagcgtcccgccaaataaaagttgacaataatccgaataattttgcttggttcgccgggactgaagatgatggtatccgattatttctggcggtcgtgcggttgcataaacacggcgcaatcataaaaaaccgaattaaacaaatgtcgtcggcagggagaactccttttggcggatagcacgtgagaattgcattaatatgaatgcaaatgtgcatccccgtggggtaacagtgggtggtaaatctataaatttatgtgcaaatgtagcaagaaaatgtcgagcaaaagtcgtcggaaattgtgcgaattcttttgtagtttgagtttgacagcaagtttttatgatgttttccaccattccattttcccgctttaggcgacgtgcgaagacagtttggcttgagcttatgaatcgctgacgtgagcagcgggattttccacattttcctcaaactccacccgcaaaatgcaattgctatgggagccgcgaagtgtgcaatgcaaaattgcaattctaattatcgcattagtcgtcaacgtgtcgtgcataagaaatggcaacgggtaagttgattgagctctcttgattatgcaaataagcctctaagcttctgttgcaaagatgcttcatgttcttgtttttttataacttataacttataaaaagtaataaaattatagaaatttatcattaagataaataaataaataataagaaatatttatagaattatatcttggctttctgtttttagagacattactatgatatattaaattaaatatgcataactttttttccccagtgaggacgaacagatatctgtgaaattgaaaaacttctttccctcagaagaagcttcagttggtcagagttttcctgaaacttcagccagagtgacaacgggtggtggatttagaccctcgcaaatgctggacttcacgccctccgatgtgatgccccagtctggttacacccgttatcctccgagctatttggaaccgaactacaagcacgaacttccaagttctctgggacagcaggtggcattggacaagcagttctcctttccccaggactcgcactcgatgtttcagagcacaccgctgcccacaacgccggtagttagctacctggatccgtacacccagcagaactatcgctacacacccactccgccttctataattcaatatcaacgtgagcagccagcccaagacgatcaggcctatactgtgcaatcttccctgctggtgggcagtcaccaacagcaaaaccaccagcagccgtatcctggccacgtggaggatgtttatctaaagcgacctggctacgtcttcgatgaaagccccgctccatcgtatcgacgacccacaaggccaccgccctcgcttccaccaccgcccaccaccgcggcgcacaaaatctcctatgatagccatgattacccaccgcccagctatgcggccgagcaaacttccaatttcgtgccccagcagccaaagcagcgaccgctgtaccaacgccaagacatcaagccaaatcgaggtggagcagggggatcaggaggagcaggtggagcaccaccaccaggctcgtctaattatgcaaacaacttcgataattattcgaagcggccaaacccacagcagacacaaatacagaaccccaaccaggtacaccaaggaaaaatcatatatattatatagagatatggataacaaaatattaatacgatatttatttccaactaaaaaccaatacatattggattagtataagggaactacatatgcgaaaatattatataatattaagtttgcaacccttaaccaatatttttttattgtgcagattcagacgcagtttggaaactatccgtacaatccccagaatggaggagcaggagttcctgggaccggactaccccagcggcccaggccgggacacaattactacgagtaccaaattggcgagataccaccaccgcagtcccagcacttccagcagccgcagcagcagttcaactatcgtcctgccactcagtcaccgggtgtcggtggctccggcggcggtgtgggcggcggattggccaccctggcctcgctgtacgcaccgcaatttacgaatctcctcctgggcggcggtggctccccctctgcgtccacgcagtcgtccagtccattaggcagtctcctcggcgctttcgccggcgcacaaggaggagcaggacagcaatccgggggcctgggaggaagtcgaccgcccaacacacagctcattagggcactggagaacatcgctcgcaacgacgatttgcagtgcgtgcccaaggtgctctgccagatgattgccggtcaaacgttacgtggccaattgcccggattcgttacctccccggccataaccaagtgagtatatcagaagggtggcagaatagtctgattgcactgagaaaaatagacaataataatataatatttccttaattcttatttacttttcataagagacaaatataatatccaaaataactctgagagcttaaaggtttttaattataaataaattaatagttacatattctaatatattctaatattctaaaatgcttaatattattttggacctcttttacttttgcaacgaacatttgcctatattatatcaaaacagttaactttgtaattctattttttatcatttaatgttacatctttttaccttttttgcaattattgtagaatttgttttcggtggaatggaatgggctggtttccattttgcaggggctttagttgtgagtaaatattattaaatttacattttgcggcagatgggggcatcttggttctgtggtgcagcgttaaatgggattagacttcattactgccttgcagaccatattgattgttccattaaatgagatacgtctggtggggattttctgcggagaatggtaaatgggaggggggttgcgatagtacccattgtaaattgaaattgttttggctttggcaaattcttggcttcgagtcaattaagttttataagcggcctagagagagtccaaagggcagatggagttgcattacttgtgtaactataggagaagcctaaggggtgaaattttacttctagggtagccatcattgtggaatggtcacagctactgaacatctagctaggcttctgtcaacttgtatttagttacttttatacccttccaagtgcttgtagagtatgtatacattaagctaacgtgtattaaactctttttattgccattaatttgtaaattgattatgtaaagatataataacttattctatttaccttttaatgcagtttcctcgctggatttccagtagcatcacctgctcttatttatggaagagctgcacttcttggtttgagtggtggagagaaaagttgcattcagacctacttaaagtgtcctaaaaatgatgtgagtaactacgccaacgtatgtaatccaaagtaatagaggtatatgatcgaagtatctctataaaataatattaagtacatgcaagaatttttaaaaatccattattttccacaacaaaattgtatatttagccaaagaaatgatgtaaatcaataaatcaatttacaactattactttatctaaacctcgtctactttggataacattgtcgttattttaattgtttgtcttatatcttcattcaacttcttcttcaacagatggaaatcattcactatttaaacaatcatcgcggcggattcttcaaattcttcagtgagccagaggaaaagccagtggccttccagcaagcagaaggcgattcgggttccttgcttagcattctctcagctttgacaggaggaggtggtggaggtcagagttacaccacccaacgacccgccccacgtcccactaagcgtccctccgcggatataaccagcggaatcggaagctttttcacccaggtgctatccgaatacctaaatggagtcgagtaccagaggaggagaaggcggaggagtatagactcggatgaagatttccatgacgaagaggacaacctggacacccaaacgagtcagctggtaaagtttcaggatgatgaagaggaggaagcggccaaggcccacacagaactcattggagtcctgcagtttcccgaagatgaaggagaaggtcgggtggttaacttcaaggacattcaaagcgaggaacaagtcgaagaaggatctgtccgatttccggatgccacgccagcggatgttatatgggagtttaaccgcgatgctgcccaacgaaaactgaaatttcctgtagatcgcgatgaacgttctgaaagtgttcggcgtggcaaggaaatatcgttcatggatggatggaaagttgtccttcccaatggcctttcacaatccgacttgggcgtggataagcgcagaggaaagaggattgtctttagggataccaacgaatatctggacgagcagaggctggaagaggaaaggataagggaggaggaacagtttagagaagctgaattgagagaggcaagaatcttggaggagcagatcagggaacaacaaatcaaagaagaactcttccgagaagagcaaatcaaggaagaacagttccgagaggaacaactccgagaagaggaagttcgcagagagcagcttcgagaagaagaaatccagaggcagcaggctcaaattctgcgcattcgagaggcacaatatagcgaacaatcctttaaggatgacagccctgccccaaatgcagtttacgatgatgcagctcctccgcagcgaggagctcgtgttatcttccccgatcactatgaacagcacattcgcaagggcaagatcctcaatcgccccacttatgcgcccacctatgagtacaatgaggatggagagcccaaggaggatcgcttagtggttagcgatgagcatagaccccacagccactaccgcttggagggtggcttcaattccctgaactacggagaatatatgccgggaaataaggttcgttttgaaaatcccgcaaatgaaagaccccattacaactatcccaatgcaaactacatcagtgataatcgttacggaagcaatcaaaatcaaaagcctcactacgaagatgacaaaaatatttatgttaccaactcgcagggagttaacgagtactatatacgacctgatggcagtaaggtgtatcttaaaacaggttaacatagatttaacaactttcaaaatgggtcttaaagaaatgaatacaaattgtgaattcttctaaaattgtaaataatttttcaaatttttataattctttgtagcttaactagatcagttttaatttgtatttgtattgtttaagtttcctatctttgcgttaatagaaactacaattttatgggttaacaatgaagacccacacagaggcaggccaccacttagtcacataagtctgtaaatatttaactctttaaacacttatttattaataaaacataattcaatcaaccgagagtatgcaaaagaaacaaatttcttcatcgccgaccattgtttcaacaagtagaacgagctgccagctgaattgacgcataaatctagcggcaacaggaatacgtttgaaaaattaaatgtgataaaccgggacaataatggaaacgcaaaaatgaaaaaaaagaaacaatttgctcagatcatttgggtgaaatagaaaataccctcgttttaatatcaatagtttagagaaccaattaaaagacatatgaacacctaaatgtatattaatggtcattgtgtggctatcttatattcttgtttatttacttatatttaaagcatttatttatttttttcttaacgctgtttgttaatagagggtacaaacaagaagtcagtaggaatgcagttctagttgaagcccctgaaagcgccctgaaataaatttattctattttccccgacagcgttttcccaaatggtcgagcgtttgtcagcaggaaaatcacacagaaaattcaaaagtgcacaaaaagtgcagcatacttttgtgcggcccaggcgaccagggttgtcagggttgccatggaaaagggaaagcccccggcgacatttgctgctgcagttgctgtcgtcttattttatttacagcactcgggacgccgacagcagccgccgtttgtatgcaaaccatatgcaacgagttaataaatgggaaaca

SEQ ID NO: 32288 - DNA, 2757 bp, DROSOPHILA
atgctggacttcacgccctccgatgtgatgccccagtctggttacacccgttatcctccgagctatttggaaccgaactacaagcacgaacttccaagttctctgggacagcaggtggcattggacaagcagttctcctttccccaggactcgcactcgatgtttcagagcacaccgctgcccacaacgccggtagttagctacctggatccgtacacccagcagaactatcgctacacacccactccgccttctataattcaatatcaacgtgagcagccagcccaagacgatcaggcctatactgtgcaatcttccctgctggtgggcagtcaccaacagcaaaaccaccagcagccgtatcctggccacgtggaggatgtttatctaaagcgacctggctacgtcttcgatgaaagccccgctccatcgtatcgacgacccacaaggccaccgccctcgcttccaccaccgcccaccaccgcggcgcacaaaatctcctatgatagccatgattacccaccgcccagctatgcggccgagcaaacttccaatttcgtgccccagcagccaaagcagcgaccgctgtaccaacgccaagacatcaagccaaatcgaggtggagcagggggatcaggaggagcaggtggagcaccaccaccaggctcgtctaattatgcaaacaacttcgataattattcgaagcggccaaacccacagcagacacaaatacagaaccccaaccagattcagacgcagtttggaaactatccgtacaatccccagaatggaggagcaggagttcctgggaccggactaccccagcggcccaggccgggacacaattactacgagtaccaaattggcgagataccaccaccgcagtcccagcacttccagcagccgcagcagcagttcaactatcgtcctgccactcagtcaccgggtgtcggtggctccggcggcggtgtgggcggcggattggccaccctggcctcgctgtacgcaccgcaatttacgaatctcctcctgggcggcggtggctccccctctgcgtccacgcagtcgtccagtccattaggcagtctcctcggcgctttcgccggcgcacaaggaggagcaggacagcaatccgggggcctgggaggaagtcgaccgcccaacacacagctcattagggcactggagaacatcgctcgcaacgacgatttgcagtgcgtgcccaaggtgctctgccagatgattgccggtcaaacgttacgtggccaattgcccggattcgttacctccccggccataaccaatgagccagaggaaaagccagtggccttccagcaagcagaaggcgattcgggttccttgcttagcattctctcagctttgacaggaggaggtggtggaggtcagagttacaccacccaacgacccgccccacgtcccactaagcgtccctccgcggatataaccagcggaatcggaagctttttcacccaggtgctatccgaatacctaaatggagtcgagtaccagaggaggagaaggcggaggagtatagactcggatgaagatttccatgacgaagaggacaacctggacacccaaacgagtcagctggtaaagtttcaggatgatgaagaggaggaagcggccaaggcccacacagaactcattggagtcctgcagtttcccgaagatgaaggagaaggtcgggtggttaacttcaaggacattcaaagcgaggaacaagtcgaagaaggatctgtccgatttccggatgccacgccagcggatgttatatgggagtttaaccgcgatgctgcccaacgaaaactgaaatttcctgtagatcgcgatgaacgttctgaaagtgttcggcgtggcaaggaaatatcgttcatggatggatggaaagttgtccttcccaatggcctttcacaatccgacttgggcgtggataagcgcagaggaaagaggattgtctttagggataccaacgaatatctggacgagcagaggctggaagaggaaaggataagggaggaggaacagtttagagaagctgaattgagagaggcaagaatcttggaggagcagatcagggaacaacaaatcaaagaagaactcttccgagaagagcaaatcaaggaagaacagttccgagaggaacaactccgagaagaggaagttcgcagagagcagcttcgagaagaagaaatccagaggcagcaggctcaaattctgcgcattcgagaggcacaatatagcgaacaatcctttaaggatgacagccctgccccaaatgcagtttacgatgatgcagctcctccgcagcgaggagctcgtgttatcttccccgatcactatgaacagcacattcgcaagggcaagatcctcaatcgccccacttatgcgcccacctatgagtacaatgaggatggagagcccaaggaggatcgcttagtggttagcgatgagcatagaccccacagccactaccgcttggagggtggcttcaattccctgaactacggagaatatatgccgggaaataaggttcgttttgaaaatcccgcaaatgaaagaccccattacaactatcccaatgcaaactacatcagtgataatcgttacggaagcaatcaaaatcaaaagcctcactacgaagatgacaaaaatatttatgttaccaactcgcagggagttaacgagtactatatacgacctgatggcagtaaggtgtatcttaaaacaggttaa

SEQ ID NO: 32289 - protein, 918 aa, DROSOPHILA
MLDFTPSDVMPQSGYTRYPPSYLEPNYKHELPSSLGQQVALDKQFSFPQDSHSMFQSTPLPTTPVVSYLDPYTQQNYRYTPTPPSIIQYQREQPAQDDQAYTVQSSLLVGSHQQQNHQQPYPGHVEDVYLKRPGYVFDESPAPSYRRPTRPPPSLPPPPTTAAHKISYDSHDYPPPSYAAEQTSNFVPQQPKQRPLYQRQDIKPNRGGAGGSGGAGGAPPPGSSNYANNFDNYSKRPNPQQTQIQNPNQIQTQFGNYPYNPQNGGAGVPGTGLPQRPRPGHNYYEYQIGEIPPPQSQHFQQPQQQFNYRPATQSPGVGGSGGGVGGGLATLASLYAPQFTNLLLGGGGSPSASTQSSSPLGSLLGAFAGAQGGAGQQSGGLGGSRPPNTQLIRALENIARNDDLQCVPKVLCQMIAGQTLRGQLPGFVTSPAITNEPEEKPVAFQQAEGDSGSLLSILSALTGGGGGGQSYTTQRPAPRPTKRPSADITSGIGSFFTQVLSEYLNGVEYQRRRRRRSIDSDEDFHDEEDNLDTQTSQLVKFQDDEEEEAAKAHTELIGVLQFPEDEGEGRVVNFKDIQSEEQVEEGSVRFPDATPADVIWEFNRDAAQRKLKFPVDRDERSESVRRGKEISFMDGWKVVLPNGLSQSDLGVDKRRGKRIVFRDTNEYLDEQRLEEERIREEEQFREAELREARILEEQIREQQIKEELFREEQIKEEQFREEQLREEEVRREQLREEEIQRQQAQILRIREAQYSEQSFKDDSPAPNAVYDDAAPPQRGARVIFPDHYEQHIRKGKILNRPTYAPTYEYNEDGEPKEDRLVVSDEHRPHSHYRLEGGFNSLNYGEYMPGNKVRFENPANERPHYNYPNANYISDNRYGSNQNQKPHYEDDKNIYVTNSQGVNEYYIRPDGSKVYLKTG

SEQ ID NO: 32290 - DNA, 4165 bp, DROSOPHILA
ggaaaagggcaaagggggtgtaccctttagcaagcccggaaacccatttaaccccagaagtggaaaaagtgtaacatctgtggcagcaagcgatcagcggcgcctgataagttcgccagtcaaataataattatgcaaacatttcgggccgctaatttgccgcctatcttaatttaaatcgctcaaaagcgcactggaaccagcgcacaagaaattgtttaattgtcgtgacatgacaataagcgacctggaaattagggtccttcgctatccttttttttcgcgtgtggcttgatttttggcgatgataagcaagggggaaattatagggtatgcaaatgctcgcatagtgtcagtcgcgtgtcctggatcaagttttcattcgggttcgttttccactcaaattccttcttagcgcctgcaattatgctcggcggagagacagtttatgataacatatttgtagttaatttagttaaattagtgccacatatgttaaactgatctgagatagccaggtgggagctgcaaatgggtgaaaattccatcgagtcacaggttgctggcaaactgctttcgattgggtccacactcaaatatttcaatagttaaaaccacgggtaatagacatttaaaaagaaaaaagaaagcaatataaaagcaaataagtgtaatctagttaacttaaatacatatagtcaagtcatctaaatatgctgtttcccttttgtattgcagactggatagatagagcttcaaaaaattgttcggtgttcttttttaattaaaccttaaaacgtttatttcagttgattttgagaaagttgttctataaaagcataaacaaagtattcaatgagaagagtgtaaataaactttaagaaattattattattccttaagggaagcaaaattccaaagcatttacttaggcatgagctagataccttagtggtgtcataccgcaaagctcgaccaggatatccatcttataatcataatgaacacttcggataagaatgacaatgataatgattccttgggcgacgagcaggatcaggaagtccgccaaatactagattcaatcgaaagcttcgatgacgtctgcaaaactttcaagtcgaaaagtgttcaagaattaaacgctcaaaagacaagtgaagttcccaaatctgaccaggaaaaggttcacacgtcatcgtcgaaatacaattctactccccagacagaaaaacttacttctgaggcagatccagatagcgaatacacacgttttctgaagcaaatgagcgttcgttagtaagttaagttattttaacaataattttaatttaattttcttactcatatgcatcttagctcagagtttcgcattgcctcgggtcaagtagttcaacaaaagggtcagacaatggactaccgagactataactatagcgaatgtaaatattgagtttctaatttctaaaatatttttggaaatttattgatctttttatttcctgctattgtagatccagtatgtcaaccttcttgtagctggcaatcctttaacccaatgactcaggactcgacatctggacaaagagagatggaatcgtcatcatctagttcgcccgggcagatgtgccaaaatcaatacggctatggtcaatctcttccggaagccggatcaagatcggacgagaccattgtcaacgatcccagtactaccagttcagctccatgtgagagtgagagtccttgctgctccaaagagacttgtggctgttgctgtgatatcgcttctagtcagcaatctggatgctcccaatgggatcagacttatcctggccagcaacagcacatttttcctgttccaatgggtgtggatccgagtaccgggtttcccatctactgctactctaccccactaaattatcaaggcaatgctatgtactcaatgccaggcatgcaaatggatgaaagtcaaaggggaggcggtggccagaacaaccgggaaactggtacgaaatgtcaaacttcatcagaatcttcagaggaaaattgtcattcaaatggggatagtgcttcatttcatcaaagtcctaacaatttggacatggaggcctttatgcaaaagtaccagaagagtgttcagcaatgctatgccactgcacaacaaggtaagcatgataaataagcaaccgtggatgcaatgtaatatgccgaattttaggaattcaacaatcatttgctaatgctcagagtcagccgtatttcaataactttgcgcagggaactcaacagttttataacaatggtactgagggtaaacatgaattcgtaatcctaaaacaatttgaccacattttcatcatttaagcaggtacgcgttcaatgtttgccggatgcaatcaaggtaagttttagcactcagtaattaactcttcatcttattttaataatatccaactgttttaaaatatattaattattttaagccattcaaataggtatgcatgaaatgttaggcagccccaatcaaggtatgcttaattaaattattcactttcataaatgtcctaatgacattctatcgttttaactattgaattatttccgaaaaccaacatctctcagattgtcaaggcatgcaacaggctttcagttcttctttcggtgctcaacaatattgtagcaatgatggtctaggtacttacttagcataccaaattttcaaatggttaccgattttcgtttaggtgctcaacaaatcttttcctcattgatgggaatgccttcccctaactggtttgccagtaacactggatttatgagcgactctctgcagaaccacacagtatactcctcagactacaaacccttttccaacgatggcaaccactttaaccacttccccaatgggggcatggacatgggcttggccaccgaaccctgtaacatctacggtccagctggatcccctggcctggttgagatgggcaacggtggtcaggtctatggcatgggtggtgcctgcgacatgaatatgagcgcttaccctctcagtcaaatgaggtaagaaatattcaaaatactaaaccatgcaatataactatttgtttttacctgcgtcagttattcaagtccctattcctacgatatgccttgttccacacttaactataatccagcatcaggtattcctatggctactcctcaaatgcaagctagtcatataagtagtggaaatccaggtttgtaacgaataattgttgtatgtttttacaatattcgcgatcaacagtgcaacagggctgaatcggaaggaaccccgagagtgagatggtggaattgatacaataattatatatattatattataatactcttaaacaataaaggcaaccaaaaaaagaaatataacaacttccttttcaatttataatcttagaaaacaatgttgagttaataaaagttaataaaacttaaaataagttcaagaacaaggtattgatcattacttaaaacgtttcattactatgactgctgaagatgaagactttgtcgagcaagtttctcaatagaacttttttgcagtccagcaatggtaatgactcacagtaggaatgttccaccttcccagatcctgaacttcgcatggcatgcactttaagtcaaagctaattacagtgagctggtctattgattttagcagtaaagtacactaacccgtgagggaaccctcgcattggacaaacaaacgggcgacatcagtgacccagtttcgtgcaaaaaccaagtcggaaatgtggcaagctgaaaaagggccaggcaaacaacgcccccaaatgcgaaaggcctgtatgtggagcgaaagtgaaacgcaatatggccacaaacgaccacattcgtttaagaggggataggagtatctgtgactgtattcacttgctttgtccaggaaaagaggcaaatcaaatatcaaagtgccgacaatgaaagctctggttaattgtttgatgttaaagaccgaggcaaagtgaagttaagtaaagacttcttgagattctcggattgacatttacggctgactgactattcattaatctcatgattcatagacccaactcaatgttaggggcttctaaactattcccgccgaaaaaacgtgtgtcaacac

SEQ ID NO: 32291 - DNA, 1520 bp, DROSOPHILA
atgaacacttcggataagaatgacaatgataatgattccttgggcgacgagcaggatcaggaagtccgccaaatactagattcaatcgaaagcttcgatgacgtctgcaaaactttcaagtcgaaaagtgttcaagaattaaacgctcaaaagacaagtgaagttcccaaatctgaccaggaaaaggttcacacgtcatcgtcgaaatacaattctactccccagacagaaaaacttacttctgaggcagatccagatagcgaatacacacgttttctgaagcaaatgagcgttcgttactcagagtttcgcattgcctcgggtcaagtagttcaacaaaagggtcagacaatggactaccgagactataactatagcgaatatccagtatgtcaaccttcttgtagctggcaatcctttaacccaatgactcaggactcgacatctggacaaagagagatggaatcgtcatcatctagttcgcccgggcagatgtgccaaaatcaatacggctatggtcaatctcttccggaagccggatcaagatcggacgagaccattgtcaacgatcccagtactaccagttcagctccatgtgagagtgagagtccttgctgctccaaagagacttgtggctgttgctgtgatatcgcttctagtcagcaatctggatgctcccaatgggatcagacttatcctggccagcaacagcacatttttcctgttccaatgggtgtggatccgagtaccgggtttcccatctactgctactctaccccactaaattatcaaggcaatgctatgtactcaatgccaggcatgcaaatggatgaaagtcaaaggggaggcggtggccagaacaaccgggaaactggtacgaaatgtcaaacttcatcagaatcttcagaggaaaattgtcattcaaatggggatagtgcttcatttcatcaaagtcctaacaatttggacatggaggcctttatgcaaaagtaccagaagagtgttcagcaatgctatgccactgcacaacaaggaattcaacaatcatttgctaatgctcagagtcagccgtatttcaataactttgcgcagggaactcaacagttttataacaatggtactgagggtacgcgttcaatgtttgccggatgcaatcaaggtgctcaacaaatcttttcctcattgatgggaatgccttcccctaactggtttgccagtaacactggatttatgagcgactctctgcagaaccacacagtatactcctcagactacaaacccttttccaacgatggcaaccactttaaccacttccccaatgggggcatggacatgggcttggccaccgaaccctgtaacatctacggtccagctggatcccctggcctggttgagatgggcaacggtggtcaggtctatggcatgggtggtgcctgcgacatgaatatgagcgcttaccctctcagtcaaatgagttattcaagtccctattcctacgatatgccttgttccacacttaa

SEQ ID NO: 32292 - protein, 506 aa, DROSOPHILA
MNTSDKNDNDNDSLGDEQDQEVRQILDSIESFDDVCKTFKSKSVQELNAQKTSEVPKSDQEKVHTSSSKYNSTPQTEKLTSEADPDSEYTRFLKQMSVRYSEFRIASGQVVQQKGQTMDYRDYNYSEYPVCQPSCSWQSFNPMTQDSTSGQREMESSSSSSPGQMCQNQYGYGQSLPEAGSRSDETIVNDPSTTSSAPCESESPCCSKETCGCCCDIASSQQSGCSQWDQTYPGQQQHIFPVPMGVDPSTGFPIYCYSTPLNYQGNAMYSMPGMQMDESQRGGGGQNNRETGTKCQTSSESSEENCHSNGDSASFHQSPNNLDMEAFMQKYQKSVQQCYATAQQGIQQSFANAQSQPYFNNFAQGTQQFYNNGTEGTRSMFAGCNQGAQQIFSSLMGMPSPNWFASNTGFMSDSLQNHTVYSSDYKPFSNDGNHFNHFPNGGMDMGLATEPCNIYGPAGSPGLVEMGNGGQVYGMGGACDMNMSAYPLSQMSYSSPYSYDMPCSTL

SEQ ID NO: 32293 - DNA, 2327 bp, DROSOPHILA
cttgcggtcatagggagttgtaggatggtaaattgattttcttcaagtacaagaatagtcgggtgaggaattttaagtcttgtttagtacttatatagtacgaattcttgcaaagcttggatgtaaatgttacaattttattgtcatattttataaatgcttactaagttggaaaaaattttctatatttaatttgtatcaacaattaaaactcttggcaaagaaacgcaaaaaaaacaggaaaaataagccaaacaggaaattggtcaaggtcacgtctaagccaaggcaagaaaagtgaagaaaaggcaaagcaaagcaaaatctcacatcgaatttttgtataagccattcgactacttcccctttgctgttcgaaaattcagaaatttaaaatttgcatatgttagctttaaaaagaaatatatatcattctaccatttctttgttataaaattagctttaatgaaaataatttatcttaggtacttctagctcgacttcctaaaaataaattctttccccttaaatttgttttgtttcattttcgaaaactttcctgtcctggttcgaaaaacgtaggaaaaccaccccatataaattcgagcttcaaacgtaacggcggggtaagtaacgtaatggtaaaacgtatgtaacatgccacaagtgtgacgctctctgcattttgtttgaggaaacgtttactgcacgtgatgaaagttgatattgtcatcacagagagggcgacagagagagagagagaaagagagaaagagagaggtaggaaaaaagggagggaagatggtaaagagaaagcgggcacagagggtagctaattctcccgccgtttcccgggtataaatacgggcgtcctgctggctgagctcttcagtcgtacgacaactcgccaagagttcagatctggaaaatcaggaaataccttgccacacatcgaagttaacaagtgccatttttacgtaacattttgagcgactcaaatatggccattccatttttcgaagaagagcacgccccgaaatcggaacccagtggcgatcaagtcgatagccccatggctttctccatagaccccggacatgatcaagtggactttgaaggacctccgtctgcagcagaggaactcccgccaccaggagcaacaagtgagccagttgcgcctccgagtgccgaggagcaactgctggcctggaaattcctggccatcaccatgtgcaaggtcctgaagcaattttaccaacagcacaagtcgtccggaaaatccagcaaactaaaggccaccgttcaaatacaaccgcaggcgcagtaaaaatttcgaaaaccaacttaagcaccaactaaggctcctaaaagcgcaacttgtgattactttacgttggtgagaactagcgcagcccgaaaatttcgagagagaatgagcgagacagtgacagagaaatgtgaatcaatttcccaaggaaaaccctaaaacaagattaacttttgatacatgtattttctttgctggaaattaagcacatagtttcttatccgtcgggatacaacaaaattttaaaactttggataagcgcaaatgtgataaataattttgctaaaaaaatttacagtccaagtatttgtttagtaaacttatttaagttagttttacttgtttaactgaataagttagattctcgtaggtggtcggcccagtgcaagaataagtgaacgaaaaatccaaacattcatatattggaaaattgtctcaagagataaaagcaaaattttgtaagcagtcgctagttttcaaatcgaaaccaacttagttgataagtcaaactattctacatgctataactacaaatagttacaacttttttaccaacaactctcttggtgtctatttatggggaaatttaaatgattcaacttcctaggtagagtgcttcttaaacttagcaaatatatatggaaatatattttttaaaattgaaacatatttttatatttactttgccgtcgatatataagctgtgtacgtgtcaatctagtttatagatctattcttataagcaatatgtggctaagattccatgcgaaataaatcgatgaaaaggcgttcttcgcgtaacgagcataaacatagtacaagttcaaaagtagaaatatttacacacataaatactccaaactacacattcttttaagcaatttaatgtaacttaagctaagtaaagcaaatggcatgaaataaaaatattattgaatggaaaaatacgcatttttaactagtgatgggatgaacaattcaaaaacgtttattttcagat

SEQ ID NO: 32294 - DNA, 327 bp, DROSOPHILA
atggccattccatttttcgaagaagagcacgccccgaaatcggaacccagtggcgatcaagtcgatagccccatggctttctccatagaccccggacatgatcaagtggactttgaaggacctccgtctgcagcagaggaactcccgccaccaggagcaacaagtgagccagttgcgcctccgagtgccgaggagcaactgctggcctggaaattcctggccatcaccatgtgcaaggtcctgaagcaattttaccaacagcacaagtcgtccggaaaatccagcaaactaaaggccaccgttcaaatacaaccgcaggcgcagtaa

SEQ ID NO: 32295 - protein, 108 aa, DROSOPHILA
MAIPFFEEEHAPKSEPSGDQVDSPMAFSIDPGHDQVDFEGPPSAAEELPPPGATSEPVAPPSAEEQLLAWKFLAITMCKVLKQFYQQHKSSGKSSKLKATVQIQPQAQ

SEQ ID NO: 32296 - DNA, 3332 bp, DROSOPHILA
gataaagcccaattacagaacctaatacatacacctaaaatgactaattgacatccattgtgcgtattacataataatgaataatttaagtgatagttgtttgaacttacagaacacttcttagtattgcggactcatcccatccaactgttgactcatttcaaattctatttaattatatttctggtcctggcacgaacaataaattgagtttatatgtattacgccccttcttgtggtctcactttatgaaaaagttaattgcgtgtagttgttggctttgctagatggatttttattgtgccgctttactgtctgcttttttcttcattttccactcgcctttcatttttcatccgccggaaagcgaatcattttttcgcacgctgagcagtgcaaagaaagcaaacacaagcaaacgagcagaatttcatatagttgattgcattgtctgcaggaagatgttcgcacgatgatgcaggacatgcaggactaaggacttcgaagcgaatggtgtgggctggggcagggatagtctcatgaaatgctgatagcatgcgctcaatattgtcagtaaataatacgcgcttgttagagccaactgcataccaactaaactgaacacagtgagaataaacataacagaaagttgaatttgcttaatatataatttcataaatttgtcacaccaaaattcggatttaaattaaaagtataattatattaataacattatttaatataattataattatatataaaaatatatttttatatgtatgtttcatttggttgctgaaaaccagtaactaactaatctttgtgggctatccaaatctcttcattgcagaaaccgcagcgtgcaacatgtgacgtcacaggcataaagtatggagagcatattaaaatatttgccatttagctggtttagcatgcattgttgcattgactgccacataacaagtggaaattagcaggcagctactgtagacgaatcgaaatggaaggtggatggtggcgaggaggaggaggaggaggacgtttgggcgggaaagccatcatggaaggacactcgacaccaaatggggcagctgcaagccacagaaacaacagcacaaggaccaatatcgcgaccaacggctgtgcccattcgggcatcctgttatttgtgctgacagctatgacactaacgagcttaataacgcccacagagcagctggcagtggcgccaaatggcaccacactgcatcaactggagtccgtggagtccgagtcgtatccatccataaatggcactcagaatgaaacaatggtgaccagtgtgcgaccccacctggaccacaggaatcgaccgacgcagcagaatggcagtcactatttggagtacgacgatgatggcccggactgttcgtacagctacaacttcatcctgaagctcatcacgatgatcctgtacgcactggtctgcatcattggactctttggcaacaccctggtgatctatgtggtgatgaggttctccaagatgcagaccgtaaccaacatatacatactgaatctggctatcgcggatgagtgcttcctgatcggcattcccttcctgctctacacaatgcaggtgggcaactggcccttcggcaactatatgtgcaaggcctacatggtgagcacctcgatcacctccttcacctcctcgatcttcctgttgatcatgtcggcggatcgctacatagccgtttgccatcccatatcctcgcctcgctaccgaacgccctttgtatccaagttggtttcggccttcgcctggatgacatccgtgctgctgatgctgccggttatcctttttgccagcaccgtgcagtcgagcaacggcaatgtgtcctgcaacatcgagtggccagacactcagaactcgcacaccgactccaccttcattttgtactcgctggtcttgggattcgccactccactgacttttatcctggtgttctactgcctggtgatcaggaaacttcacaccgtgggaccgaagcacaagtctaaggagaagaagcgctctcacaggaaggtcaccaagttggtgctcacggtaataatatatgacatttcgattagttgtggaactaactactacctgaccactcttgtgttcagtttgataaatattattattacattataaatatatatttttttttgacattttgaattcgactataaattaattgttttaaattgatatatagaaagaattttataatatttattcaatacaatttatggttttttgatttctccacaggtcataagtgcgtacatattttgttggcttccacactggatttcacaggtaactaattgtatacattacagtctaaaaacatttatctttgtgtactttaaaaggttttaaaaccataagctatttgcctactattatccttttggattgatttttaaattattatagctaaaacaaattacgagatttgtggaaattgacatgaactggacttctttggcagatcatttgtagattcgctttttattgactattttccaggtggctttgatcagctccgctcctcaacgctgtgcatctcgtctggagctggccgtcttcctggcctgcggatgcctcagctactccaactcggccatgaacccaatactgtacgcctttttgagcgataacttcaagaagagcttcatgaaggcctgcacgtgtgctgcccgcaaggatgtgaatgcccagttgcagctggagaacagtttcttccccaagtttggcaagggcaggcaatcggagcgtcttcttggtggcaatggaaaaggtggcgcccagcgtggggcattaaccaagaagaagtgcttggcgacgagaaacaacaatgctccgatggccactacaacgacgacgacaaccaccacaacgggcacggatgcagtgacctgtctccagccgccagtacaccaggtgccagccgagatccaggtgggaaatccggccaccgtgctggtggtcaatgctgagaccaacaactgtaaaccgcccgtgctccacacggacttataagaccgggctccctcgatgcccctggaaacggtggtcttcatcgcgcggaggtgagaccatcaggttgagctggacctcgatacggccatcgattgccaggcaatagcgaggcagccggaatgcttgctataggtcgcctaaaatgatattaacattttataccaatatggcagagctttgcaaaaacgggtaaacttaatcccatttttatatgatcgaatctcagcaagaagaaatttttaaaaacccgaataaa

SEQ ID NO: 32297 - DNA, 1332 bp, DROSOPHILA
atggaaggtggatggtggcgaggaggaggaggaggaggacgtttgggcgggaaagccatcatggaaggacactcgacaccaaatggggcagctgcaagccacagaaacaacagcacaaggaccaatatcgcgaccaacggctgtgcccattcgggcatcctgttatttgtgctgacagctatgacactaacgagcttaataacgcccacagagcagctggcagtggcgccaaatggcaccacactgcatcaactggagtccgtggagtccgagtcgtatccatccataaatggcactcagaatgaaacaatggtgaccagtgtgcgaccccacctggaccacaggaatcgaccgacgcagcagaatggcagtcactatttggagtacgacgatgatggcccggactgttcgtacagctacaacttcatcctgaagctcatcacgatgatcctgtacgcactggtctgcatcattggactctttggcaacaccctggtgatctatgtggtgatgaggttctccaagatgcagaccgtaaccaacatatacatactgaatctggctatcgcggatgagtgcttcctgatcggcattcccttcctgctctacacaatgcaggtgggcaactggcccttcggcaactatatgtgcaaggcctacatggtgagcacctcgatcacctccttcacctcctcgatcttcctgttgatcatgtcggcggatcgctacatagccgtttgccatcccatatcctcgcctcgctaccgaacgccctttgtatccaagttggtttcggccttcgcctggatgacatccgtgctgctgatgctgccggttatcctttttgccagcaccgtgcagtcgagcaacggcaatgtgtcctgcaacatcgagtggccagacactcagaactcgcacaccgactccaccttcattttgtactcgctggtcttgggattcgccactccactgacttttatcctggtgttctactgcctggtgatcaggaaacttcacaccgtgggaccgaagcacaagtctaaggagaagaagcgctctcacaggaaggtcaccaagttggtgctcacggtaataatatatgacatttcgattagttgtggaactaactactacctgaccactcttgtgttcagtttgataaatattattattacattataaatatatatttttttttgacattttgaattcgactataaattaattgttttaaattgatatatagaaagaattttataatatttattcaatacaatttatggttttttgatttctccacaggtcataagtgcgtacatattttgttggctt

SEQ ID NO: 32298 - protein, 393 aa, DROSOPHILA
MEGGWWRGGGGGGRLGGKAIMEGHSTPNGAAASHRNNSTRTNIATNGCAHSGILLFVLTAMTLTSLITPTEQLAVAPNGTTLHQLESVESESYPSINGTQNETMVTSVRPHLDHRNRPTQQNGSHYLEYDDDGPDCSYSYNFILKLITMILYALVCIIGLFGNTLVIYVVMRFSKMQTVTNIYILNLAIADECFLIGIPFLLYTMQVGNWPFGNYMCKAYMVSTSITSFTSSIFLLIMSADRYIAVCHPISSPRYRTPFVSKLVSAFAWMTSVLLMLPVILFASTVQSSNGNVSCNIEWPDTQNSHTDSTFILYSLVLGFATPLTFILVFYCLVIRKLHTVGPKHKSKEKKRSHRKVTKLVLTVIIYDISISCGTNYYLTTLVFSLINIIITL

SEQ ID NO: 32299 - DNA, 2675 bp, DROSOPHILA
caaaaaaaaaaaattgcaagatttttaaagtaagaaatcctatttcttcttacttcaaaaatctcaagataaacttagtcagtgtttcccattcgaataaagtatttatgccaattaacgtatattgtttatatagtaattgttttttttccagtgccagaagtgtgaagaatggcggtgggggaccgtaaagcaagtcgcatgtgtcctcgatgttcgtaaagttgattcattcattgcagaaatttatatggccccggacacagcacggattttcagcggttcagcagcaggactttgatgctgatgcggatccaaatgcgaatgcgaatgcgaaagcgagtgaggacacgaaggcggatgatttggatgcgaatgcggatgaggacgacgatgatatgccgctgacaatgccaatgacactggcagctaatgccgcccgctcgctgagcgacgccgcgtggggcatccttgtttgccgccgagaaggatgatttatctcgcagctggccggaacagaagtgtcctggctgccttacgcttggggctcactatacgcttccaattagatggtcatatggccatgggtgacgcctcaaaaggggcagtttacggggctaaacaaagctacgccagtaatttaagccgacgctccgtgggagactcggtcgagaaagtccatcaactcaatttcgagcaattggtagcggaaataacatatcgataaatgggcgttgattgtggcaatgtagcagattcaaatacgattttaatagagttccgaatggggcattaaagagcataaagttttataccgaaagttcggctataaaagacaacttttgcaaaatatctaaagatgctactataaacaccactgaattatgcttgacttatttcattttcttatatttagattggaattacctattttggaactttggtgatatctttaattacttaatttacatcataatttacatatagtacagtataccctctacttcttcgtcatcgctttctttcgcttgcgcgcaaactttgctagctcctcttcagtgggccggggttcactgtacttctgcacccaggcatcggccattttgaagaatcgcaccggatcattgcgatactcgccggccatttcgatgtgccaggcgttctccggctgtggatcattgatggtggccagcagtacctgcagcacctggtcaatccgcgtggttgggatccagtgctcgacctccaaaataggcacacacacctgaccacgctcattgacattcaggtggtacatcctcgtgtttatatggatgcgaggcggcttgaatgggtagtccagtggaaagtcgatctccattttgtaggcacccttgtcataaggcggtgccaccggcatcagcaggcctgtccacttgtagatgttgttcggctccaccaagaggtttcggaactgcaaattctgtttatcctccaacatcagggccaattcgcggttcatccgcttgggtccgtccataagaggctcctcctttttggccatggtgtcctgtgtttttgtgttgtgctttaagtgttagcgggtggaaaagcttgcgtgtgttcttgtctgcgagtatggaagttctgggctggattttcctaacatttttgacctgagctactagggtgtgcaaaagggaaacactacgaaaaaattaaaatccgtttaggactttttagtgatgttaacttctcacatggatttctgtcatcataacacataattataaaattttacaatattttacagaaaaggcttcatctgctattctcacacaaaatccctcattcatgttttctccgagtgattctgaatggaaatgctactgaggagcggtgcgggaagggcgctagttgagttccaatgcatgggaaaaatcctttcacattgacattaatccccgaaatagctggcgagagtccggctgacgtcgacaggctctgacagcagcacattaggatcagacctggtcgtggaaccgaagcaactgggagatggagctaaggctgcatggtcgaagcaatggactggagcccgcagcagtggcgatacaatgcccggccctcgaaatgaaaagccgttttatgtgcttagccgcgttgaagttgcaaaaatcgggctgttttccccggccttatacagtacttccctttttttttttacccgtcacattttaagcgcagatttcataaccccgggcggcgaatgagtggcgtgtctggtcggatagaatgatcctggctggcggatgatgagattgccattgacgttttagttttcaattagttggacgaatggagttgcgcttctacccaggatttatccatttccctcggggaaacattcactgtgtgccactcataaatatgtaaaaatcagccaacaaacagaatcaaaggaaagaagagcaagaatatttaccttttgccaggcagataacaaaaacataaaaattaaatatcaaaatgtaagcgacaacgtcacagtgcgtgtgtgtaataatttataagcagagatgtcatcatcatgtaaatgaaaccagagcgccaaaggacgctccaaggaaccccgaaaggacctcattggcaacgggaatgccagctaagcataattatttcatatccccttctct

SEQ ID NO: 32300 - DNA, 675 bp, DROSOPHILA
tgcacaccctagtagctcaggtcaaaaatgttaggaaaatccagcccagaacttccatactcgcagacaagaacacacgcaagcttttccacccgctaacacttaaagcacaacacaaaaacacaggacaccatggccaaaaaggaggagcctcttatggacggacccaagcggatgaaccgcgaattggccctgatgttggaggataaacagaatttgcagttccgaaacctcttggtggagccgaacaacatctacaagtggacaggcctgctgatgccggtggcaccgccttatgacaagggtgcctacaaaatggagatcgactttccactggactacccattcaagccgcctcgcatccatataaacacgaggatgtaccacctgaatgtcaatgagcgtggtcaggtgtgtgtgcctattttggaggtcgagcactggatcccaaccacgcggattgaccaggtgctgcaggtactgctggccaccatcaatgatccacagccggagaacgcctggcacatcgaaatggccggcgagtatcgcaatgatccggtgcgattcttcaaaatggccgatgcctgggtgcagaagtacagtgaaccccggcccactgaagaggagctagcaaagtttgcgcgcaagcgaaagaaagcgatgacgaagaagtag

SEQ ID NO: 32301 - protein, 180 aa, DROSOPHILA
MAKKEEPLMDGPKRMNRELALMLEDKQNLQFRNLLVEPNNIYKWTGLLMPVAPPYDKGAYKMEIDFPLDYPFKPPRIHINTRMYHLNVNERGQVCVPILEVEHWIPTTRIDQVLQVLLATINDPQPENAWHIEMAGEYRNDPVRFFKMADAWVQKYSEPRPTEEELAKFARKRKKAMTKK

SEQ ID NO: 32302 - DNA, 2894 bp, DROSOPHILA
cggacagtcttgtacttgtatccatcggcggcaaggacagcggagtcctggctagcttcctcaactggaacctcctcaactggggcatcagcaacaacctcctcagtgggtggcaggtattcgttggcgatctcagaaacatcacgtcgctggcggtacttcaggcgacggacagtcttgtactggtatccatcggcggcaaggacagcggagtcctggctggcttcctcaacaggagcttcctcaatgggggcttcggtggcggcatcctcagtgggtggcaggtattcgttggcgatctcagaaacatcacgacgctggcggtacttcaggcgacggacagtcttgtacttgtatccatcggcggcgaggacggcggagtcctggctagcttcctcaactggaacctcctcaactggggtatcagcaacaacctcctcagtgggtggcaggtattcgttggcgatctcagaaacatcacgacgctggcggtacttcaggcgacggacagtcttgtactggtatccatcggcggcaaggacagcggagtcctggctagcttcctcaactggaacctcctcaactggggcatcagcaacaacctcctcagtgggtggcaggtattcgttggcgatctcagaaacatcacgacgctggcggtacttcaggcgacggacagtcttgtacttgtatccatcggcggcgaggacggcggagtcctggctagcttcctcaactggaacctcctcaactggggcatcagcaacaacctcctcagtgggtggcaggtattcgttggcgatctcagaaacatcacgtcgctggcggtacttcaggcgacggacagtcttgtactggtatccatcggcggcaaggacagcggagtcctggctggcttcctcaacaggagcttcctcaatgggggcttcggtggcggcatcctcagtgggtggcaggtattcgttggcgatctcagaaacatcacgacgctggcggtacttcaggcgacggacagtcttgtacttgtatccatcggcggcgaggacggcggagtcctggctagcttcctcaactggaacctcctcaactggggtatcagcaacaacctcctcagtgggtggcaggtattcgttggcgatctcagaaacatcacgacgctggcggtacttcaggcgacggacagtcttgtacttgtatccatcggcggcgaggacggcggagtcctggctagcttcctcaactggaacctcctcaactggggcatcagcaacaacctcctcagtgggtggcaggtattcgttggcgatatcagaaacatcacgacgctggcggtacttcaggcgacggacagtcttgtactggtatccatcggcggcaaggacagcggagtcctggctagcttcctcaactggaacctcctcaactggggcatcagcaacaacctcctcagtgggtggcaggtattcgttagcgatttcggaaacatcacgacgttgacggagcttcaatcggcgcacggtcttgtagcggtatccatcatctcccagggcggcggggtcttgggccagctctgctccaacttcctccgccggcgggatgtactcgttcacgatctcggagacgtcacgacggtgcctggcttgttcgacaggaatcactgcagccgtcgcggcggcaataaagatgcaggctaagaaaagtttctgcaatgtgagtgtatataaagtgttaggttagataatcctggagggaaggtatccttgctgctggaatattcaccatcttgctatagatctccaagctaattgctttgacgatggaatctatgggtcgaatgattaatcgtcgcaatttgtccgcatatttatacgctccaatgtttgccagcttccattcaaacaatgatcgacgctctgtttgccggcaaacagcggcggaaaccaaaaccgaaatcgaaaccgactccgaatcggtaacaaagcaatgaatttggccaaagacccaacatgcgccactcgagccctcaagtgcccccgtcaccgtctcccagcttcgtcttcacgtggagattaagcccagctgggagccggttcgcttacagagcacagtgggtaaaataaaccaaagtgtttgataaacaactatccaattagataaaatttaaatattatatattatagatgctttagttatctatataatgtagaaatgttataatcccaaactccctttttggaaacattgaatccaaaaggatttagacataacagaaagcaaagaaaaatgtattttataccacaaccaacatgaataacatgtatcccatagtggataggagttgcccaaagattgcccagtgcggaactaaatgctctgcgtttcgctttcgtttgtcgttcgccacttggatcgaattcgatggctattgctttggcttaagatacagcttcacggtcaagagcgagcatcggtgctcttaacaagatctaatgcaaaatcacaatggttttccatggtgttcactttaatggcagcatacgcatacgtatttattaatttatttcgaacgttattaatagtttcgaacgttaatttctcaagtggctatcggtaatttgcgtactactcggttttggagttcaacgaaccgctcaagattgatggttggcaaaaggtcgcacgggcagcacgacgtatttgtttaatgggtttcgctgataagttttcgaattggttttaattggttccgttttgtgaatcatataggatttaaatttattttaattggactgtgggttgttggaagttgcattgtcaacggtttaaatcacatgtaaattacgttttatttttttagcttggagtaatatgtagcatttataaatttttagagt

SEQ ID NO: 32303 - DNA, 666 bp, DROSOPHILA
atggaagctggcaaacattggagcaaacttttcttagcctgcatctttattgccgccgcgacggctgcagtgattcctgtcgaacaagccaggcaccgtcgtgacgtctccgagatcgtgaacgagtacatcccgccggcggaggaagttggagcagagctggcccaagaccccgccgccctgggagatgatggataccgctacaagaccgtgcgccgattgaagctccgtcaacgtcgtgatgtttccgaaatcgctaacgaatacctgccacccactgaggaggttgttgctgatgccccagttgaggaggttccagttgaggaagctagccaggactccgctgtccttgccgccgatggataccagtacaagactgtccgtcgcctgaagtaccgccagcgtcgtgatgtttctgatatcgccaacgaatacctgccacccactgaggaggttgttgctgatgccccagttgaggaggttccagttgaggaagctagccaggactccgccgtcctcgccgccgatggatacaagtacaagactgtccgtcgcctgaagtaccgccagcgtcgtgatttgaggaggttccagttgaggaagctagccaggactccgccgtcctcgccgccgatggatacaagtacaagactgtccgtcgcctga

SEQ ID NO: 32304 - protein, 221 aa, DROSOPHILA
MEAGKHWSKLFLACIFIAAATAAVIPVEQARHRRDVSEIVNEYIPPAEEVGAELAQDPAALGDDGYRYKTVRRLKLRQRRDVSEIANEYLPPTEEVVADAPVEEVPVEEASQDSAVLAADGYQYKTVRRLKYRQRRDVSDIANEYLPPTEEVVADAPVEEVPVEEASQDSAVLAADGYKYKTVRRLKYRQRRDLRRFQLRKLARTPPSSPPMDTSTRLSVA

SEQ ID NO: 32305 - DNA, 2576 bp, DROSOPHILA
tttttggtgcatgtgtgtgggcggagtattgtgcatgtgtgagactttaacgcattatgatgcactgatgcatccgtatgattccataggtgtggggttttaataacccaacttcagcaattggagactctaacgatgagtaactgggccaagtgtgcgtcacacaatcaggcacaagaaaactctacaaaaatgtgtgcttatcagtgcgattcagataagcactgtgtttactcattgttgccccatcacttggtgtgcttaactttagggcgtggtgaatcagtgagttcagagggaaatctttttggattgaaaggtatcccaaataaaacatataatttagctggcagtgagtaaatgcgaaatcatttcctttgatttcatgcaatttttattaggccaaaagtccaatgccctaaaaccggaagtggcataattattgcgcatataaattatgaaatatgttagacaaaaaagtgaatgaaaacaattaatattggttagcggttggccaacgaaaatcggtcgcactcttagccacatacatttggcggatgggttttgtcaaatgcctgtctccatgaatcaccgactaatcgaatcgaggaaaaatctatacactttccatatcgacaaacaaatccatttaatatttcatacgcaaaatatgccgaatgagctgaacgaacacacacataaaatattattaattaaaaatacattttgataattttacgtgaaatcgaatctgacatccgcaatggaacaatggggaaggaatatgccagctcacatttatcatcgaagaagttggcgcgcgcgcgctattttggctcaatcagaatcagcgttttttgttgattttggcccggctctgttgttaaacattttctcaacgattaattgttaatatcttaacaagtcttcgcgcatttgaagatctatatgatgaatggtcttgctgttatttcaatgagttccgtttggcttgggtttgatggatgcttcaaagccaatgccgcaatcttaccaggccaccttcgaccacacgccgcgtgatcattgaaaaaatgtgtatgatgtgtgttttgcgcctcggacgaatcactatgtctaacaaatattaaatttgtatattcttttctattctgtagtactgttggcctgctgcctgcaagaatcggaggccacgcgacgtgtgaaccgcggacgacgcacccttacccgcagatacttcagtaagtgatgccgtatacgtgatcgatattgctcaacattgttatttcttgcagctggccttgctattcccggatgggctctcatcgtttgtgtagcggtaggtgagctgctgattggtggagccctctacttcatcctcaagaaggtgatcctggacaaggaaccagatcagacggcggcctcctacacgcccgcccagactcatgcgacggccacaccttatactcccgcccagactcacgatccggccacggccacaacctatactcctgcccagactcatgagacggccaatgtgactcccactccaacgcatgccaccgctattgtctgaggagatgtgtacagatccaagtgaccacttttggttcataaccctttccaaatcagttcaaattccaccattaactagctttattgtcatttaatcgacacacaaatagaacctgtgccctttgtctaccttcattttcgaataaaattatttgccacttatctggcgccaaactagcttcacatttgtacggttaaacggtttttaagacgatacacgctggcttttaacattttattgcaccggctaagcggcccaatatccgcccaagaccgatccagtttgtctactcattgtctgcaccacacgcaacgctaatttatatctaattaaatcaaactggttttgagttttggatttttcatagcccatgctggggatgaagattaattagatgaatagatttgtaagcaaattaatgcctacttttggggctgcggaaatactagctattttcaagctacacccaatataaaatatcaaagggtgtacggattatgagcggagtcacccggtgcttcagctgtcttaacagcggattaacattttatatatcgatgctaattgaactgaactgtattctttctttctccattgtaattttgcggtcatagcgatcagacgtgatttttgtatatgaagaaataaatgaagttaaatagtgtatatatgattcttatttgcgaaccccattacaatgatgtcaaagcagtgaggcatcacaactattcattggtggcccatgaggggaaccttgctcataagaatcataattaataattgctaaaagctgtttggcaattttatcttcgtggtcggcttcatccagataaatcaccgtgcctacgttttctatcgcgctcgctctcatcacgacagagcagtatacgcaaaccgttcgcgctcgctctcatcacgacagagctaagtcccgttgcccttcgattccgttagatttgccggaatctctgccaactcaaaaaacaagacgtcaaagaag

SEQ ID NO: 32306 - DNA, 423 bp, DROSOPHILA
atggatgcttcaaagccaatgccgcaatcttaccaggccaccttcgaccacacgccgctactgttggcctgctgcctgcaagaatcggaggccacgcgacgtgtgaaccgcggacgacgcacccttacccgcagatacttcactggccttgctattcccggatgggctctcatcgtttgtgtagcggtaggtgagctgctgattggtggagccctctacttcatcctcaagaaggtgatcctggacaaggaaccagatcagacggcggcctcctacacgcccgcccagactcatgcgacggccacaccttatactcccgcccagactcacgatccggccacggccacaacctatactcctgcccagactcatgagacggccaatgtgactcccactccaacgcatgccaccgctattgtctga

SEQ ID NO: 32307 - protein, 140 aa, DROSOPHILA
MDASKPMPQSYQATFDHTPLLLACCLQESEATRRVNRGRRTLTRRYFTGLAIPGWALIVCVAVGELLIGGALYFILKKVILDKEPDQTAASYTPAQTHATATPYTPAQTHDPATATTYTPAQTHETANVTPTPTHATAIV

SEQ ID NO: 32308 - DNA, 3146 bp, DROSOPHILA
ataacccatctacatatcaaacgcttttcgacagacagccccgcactcgacactcccgccaagccaatgccattggcatcgtcaagtggtgctccatcatacattcccatcgccagaatgaattcctattcctccgaactatcgaacacgctgtgagtgggagattgccaagccatttcagcttatccgcaagatttatggcttgcctgccgctcaattggagcatctacgctatttcggcttaaaaatataaattaaaaattggaaaagtggcgatctcttaaatcattcatctatttatagccgcctaatggagcgtggcgagcaaaaaccaaaaatagcaacactcgatggaccatcaagcgcgtatcaatcgagatggcgtataaatactttcggccgatcttggccttaagcgctcatcgagatccgagaggcaagagcatccaaaaatacattgaaaagcggcgacttccgcttgcaattaccaatggtaatggattgtcacaaatgtatccgatctattcaagcatatggcagacataaatcgatgcaaataatcgagacaatcgaagagccctcgaccattgttccatctgcctacgaatctacaaatctaaaatatctacaaatctgcggacttcgccggctcgtctttgtttactttcgttttgtcttctggcagctggccgcgctaatcatcttatatggccagccagagttcaattggtgcttgagacactttttgacaatagcaactagacaatccaaatctgagttcggccccagtagaagaagccatcgatcgatgcggtagttcgccgcttgttaaccggtttgctcagcgatcatcatagctcatctcagttcatctgatctcgcaaagtgaatggacatcggtcagccgagaacttttcgcgcagtttgtgtataaatagtgtcgttgggtctggtttgaaaacagaatcaactttggattaatctagcagacatcgtcttggatcttctggaaaaatggttagttctccagcagtcatcctgcgaccaggactaacccataaccctctccttcgcttattgccttgcagaaattctttgtcattgcctttgctgtgatcgcagctgcctcggcggcctccattgccacggattacctgccgccagtggacaacaacctggaatctgcctccgaactcgtggaggtgcccgccgagcagggagttctctccgacgatggataccgctacaagaccgtgcgccgcctgaagttgcgccaccgtcgtgatgtgaacgagctcccctccggtgaatacctgccccctgttgaggaatccgcctccgaagccgttgccgtcgagactcctctggctgatgatggctaccgttacaagaccgtccgccgtgtgatccgtcgtcgtcgtgatgtctccgaactctcccctgagtacctgccccctgttgaggagtccgcctccgaggctgttgctgtcgagactcccctggctgatgatggctaccgctacaagactgtccgccgtgtgatccgtcgtcgtcgtgatgtttccgagctgtcccctgaatacctgccccctgttgaggagtccgcctctgaggctgttgctgtggacacccctcttgctgatgatggttaccgttacaagaccgtccgccgtgtgatccgtcgtcgtcgtgatgtcaatgagcttccttccggcgagtacctgccccccgttgaggagtctgcctccgaggctgttgctgttgagacccctctggctgctgatggataccgctacaagactgtccgtcgtgtgatccgtcgccgtcgtgatgtaaacgagctgtccgccgaatacctgccccctgttgaggaatccgcctccgaagccgttgccgtcgagactcctctggctgatgatggataccgctacaagaccgtgcgtcgtgtgatccgtcgtcgtcgtgatgtctccgagctgtcccctgaatacctgccccctgttgaggagtccgcctccgaggctgttgctgtggagactcccctggctgatgatggataccgctacaagaccgtgcgtcgtgtgatccgtcgccgccgtgatgtctctgagctgccttccggcgagtacctgccccccgtggaggagaccgcctctgccatcattgatgtgcccgccgagcagaccgtcctggccagcgatggctaccgctacaagaccgtccgtcgtctgaagctccgtcgccactaagccgccgattgcgccaactcccaccgcagcatttgagattttcgaggatgtttttccagaagaagtcctgactttgacagtctcagattgaaactaacaataagtcgagcgtattagtcaatttgaatccactatgaacaacccgagtacaaacccgaacttacaataataaacatttttaaaacaaatatcctacaactactatatctttttgcagaatatttttaaatattcgaactatcttttaaacaatatgcctaggattgggataaagcttataaagtcgaaggagttggtgaaaagattttataaaaatattttttaaaatgggcaataaataaagaagactcttattgtccttcgatagtacagatataaaatattgtgtaaggacttgaactcaacgaattttgcatattgaacatgttaggcttagaaatataggagacattttagattgaacataaatgaaactatttttttcagtgctgatgacctcagaagtaatatatagcgggagaaaagagagccttctaatcttatcaatgaaagataaggtgctttgagataagatactagcacctgccgacgaatgcaatcacgcacaggtttttagttccactttggagtcgacgacgtgcgcgttacaaacttggctaacagctaaaagcgaacataagtttttcgaaagaaccgacgaaaacgacggaaatgaagttggctaagaagtgctccacctacttggtgatatgcctgggtaaagttctgcatgctcgttcgaatctgccgagttttgagtgccaactagagatacgcagcacaccggcgagatactttttggtgcatgtgtgtgggcggagtattgtgcatgtgtgagactttaacgcattatgatgc

SEQ ID NO: 32309 - DNA, 801 bp, DROSOPHILA
gatcttctggaaaaatgaaattctttgtcattgcctttgctgtgatcgcagctgcctcggcggcctccattgccacggattacctgccgccagtggacaacaacctggaatctgcctccgaactcgtggaggtgcccgccgagcagggagttctctccgacgatggataccgctacaagaccgtgcgccgcctgaagttgcgccaccgtcgtgatgtgaacgagctcccctccggtgaatacctgccccctgttgaggaatccgcctccgaagccgttgccgtcgagactcctctggctgatgatggctaccgttacaagaccgtccgccgtgtgatccgtcgtcgtcgtgatgtctccgaactctcccctgagtacctgccccctgttgaggagtccgcctccgaggctgttgctgtcgagactcccctggctgatgatggctaccgctacaagactgtccgccgtgtgatccgtcgtcgtcgtgatgtttccgagctgtcccctgaatacctgccccctgttgaggagtccgcctctgaggctgttgcttcgagactcctctggctgatgatggataccgctacaagaccgtgcgtcgtgtgatccgtcgtcgtcgtgatgtctccgagctgtcccctgaatacctgccccctgttgaggagtccgcctccgaggctgttgctgtggagactcccctggctgatgatggataccgctacaagaccgtgcgtcgtgtgatccgtcgccgccgtgatgtctctgagctgccttccggcgagtacctgccccccgtggagga

SEQ ID NO: 32310 - protein, 196 aa, DROSOPHILA
MKFFVIAFAVIAAASAASIATDYLPPVDNNLESASELVEVPAEQGVLSDDGYRYKTVRRLKLRHRRDVNELPSGEYLPPVEESASEAVAVETPLADDGYRYKTVRRVIRRRRDVSELSPEYLPPVEESASEAVAVETPLADDGYRYKTVRRVIRRRRDVSELSPEYLPPVEESASEAVASRLLWLMMDTATRPCVV

SEQ ID NO: 32311 - DNA, 2551 bp, DROSOPHILA
tttggaaccgcccactcaagtccctggctgccataaatcatagggcgacccacgtatgtgactacttgggctaggggatcgataaattattattagttggtctgtccaacggtcctagccccgagtccttccccttttggccaaccttctggttggaggcgcgtgcaaaggaagttgttagatcccagaaaggagcgctgaccgaaatccttggctcgctgcggttcaaatgccttttaacttaacaactttttttcctgctgctgccaacaccaaacaagggcccacacccacacacaccatcgcaaatcaatgggtgactttgttcctggcgggtggccacactgagagcatttattcctaaattgttcctaacacgacttgtacgaaaatattataaatgtacattttaccaaaaccagctgaaatttctttcagcgcagggataatggggctgagaagggcatggcaggccagggcaaacccttaacgttgtgtgtaaagtggacttgacatgagattaacatcttcaaaagcatagcttaaagtatttgttagagttcgccgaagttgcgcctggctgcgaggaaggtgccaggacccgggacaaaatacaggatcccggttcgagtcctgaccaacccgctgacccttcgccgtcgcccttgcccacctcgtttttggataattgccttcctgtgcgctgagccatgagcttaactgttgctgtcataactaagcgaaaaggtacacaatttatggaatcgagtccaagtcccattcccaacaggtgcgtggcccttggggtgggctcaccagcatcggatattcacatatacaggtgggttatggtataacaattttcgttggatttattcgttgatttcaatcgttaaataatagcaaaacttacggcctagttagtgggtggtggtgggtgtgagagaatcaagtcgcgaacgagaagttcaggtacaagtgtattcgcagtcatccagacttacagggcacggcggtgacgcagcttcaggcggcgcacggtcttgtaccggtagccctcgtcgccaaggatggcggagtcctgggacacttcctcaacgggcgcatcagccaccaccgtttcctctgcggggggcaggtagtcgctggcaatctcggagacatcgcggcgctggcggtacttcaggcgacgcacggtcttgtactggtaaccatcggcagccaaaacagcagagtcctgagaagcttcctcaactggagcctcctccaaaggagcctcggtgacgacttcctcggaagggggcaagtattcgttggcgatctcggaaacatcccgacgctggcggtacttaagacgacggacagtcttgtactggtatccatcggcggcaaggacagcggagtcctggctggcttcctcaacaggagcttcctcaatgggggcttcggtggcggcatcctcagtgggtggcaggtattcgttggcgatctcagaaacatcacgacgctggcggtacttcaggcgacggacagtcttgtacttgtatccatcggcggcaaggacagcggagtcctggctagcttcctcaactggaacctcctcaactggggcatcagcaacaacctcctcagtgggtggcaggtattcgttggcgatctcagaaacatcacgtcgctggcggtacttcaggcgacggacagtcttgtactggtatccatcggcggcaaggacagcggagtcctggctggcttcctcaacaggagcttcctcaatgggggcttcggtggcggcatcctcagtgggtggcaggtattcgttggcgatctcagaaacatcacgacgctggcggtacttcaggcgacggacagtcttgtacttgtatccatcggcggcgaggacggcggagtcctggctagcttcctcaactggaacctcctcaactggggtatcagcaacaacctcctcagtgggtggcaggtattcgttggcgatctcagaaacatcacgacgctggcggtacttcaggcgacggacagtcttgtactggtatccatcggcggcaaggacagcggagtcctggctagcttcctcaactggaacctcctcaactggggcatcagcaacaacctcctcagtgggtggcaggtattcgttggcgatctcagaaacatcacgacgctggcggtacttcaggcgacggacagtcttgtacttgtatccatcggcggcgaggacggcggagtcctggctagcttcctcaactggaacctcctcaactggggcatcagcaacaacctcctcagtgggtggcaggtattcgttggcgatctcagaaacatcacgtcgctggcggtacttcaggcgacggacagtcttgtactggtatccatcggcggcaaggacagcggagtcctggctggcttcctcaacaggagcttcctcaatgggggcttcggtggcggcatcctcagtgggtggcaggtattcgttggcgatctcagaaacatcacgacgctggcggtacttcaggcgacggacagtcttgtactt

SEQ ID NO: 32312 - DNA, 453 bp, DROSOPHILA
atggatacaacccccattgaggaagctcctgttgaggaagccagccaggactccgctgtccttgccgccgatggataccagtacaagactgtccgtcgtcttaagtaccgccagcgtcgggatgtttccgagatcgccaacgaatacttgcccccttccgaggaagtcgtcaccgaggctcctttggaggaggctccagttgaggaagcttctcaggactctgctgttttggctgccgatggttaccagtacaagaccgtgcgtcgcctgaagtaccgccagcgccgcgatgtctccgagattgccagcgactacctgccccccgcagaggaaacggtggtggctgatgcgcccgttgaggaagtgtcccaggactccgccatccttggcgacgagggctaccggtacaagaccgtgcgccgcctgaagctgcgtcaccgccgtgccctgtaa

SEQ ID NO: 32313 - protein, 150 aa, DROSOPHILA
MDTTPIEEAPVEEASQDSAVLAADGYQYKTVRRLKYRQRRDVSEIANEYLPPSEEVVTEAPLEEAPVEEASQDSAVLAADGYQYKTVRRLKYRQRRDVSEIASDYLPPAEETVVADAPVEEVSQDSAILGDEGYRYKTVRRLKLRHRRAL

SEQ ID NO: 32314 - DNA, 2664 bp, DROSOPHILA
ccatccactgtagatcccgtgtgcccatgaaaagcttgccaactgtccaccactttcgcccaacccgcaaccttatccactcacccagcatcccgggcatccttggacttttcccggcgatggtcgagcaatttaatcagacagcagagcgcagaaaagctgataataccgttatgaataatttacccacatacgcacacacattcgctgatgggaagtgaaacgcgttttattattgtttctggacctgtctcttttggttttatttataattaatatagctgcgccagcgtataatataaaaacatcgcataaaagcacttgttgtttgcacttttgctttcgagcctttaagaagctgcgtgtgaaatcgttttaattaggtgcggtaacttgttgcggctgaccagtggaaaacggaaactacaatttgggagcggggaatccccgaatgtcatattcacctcagatatttgccgctgtgccgatgtgctttctgtcaaaatcaatgtacatccccaccgcaaatatcatgaatacaagatgtttgcggtggggactaatatcgaaattttgtcttcgcaggcgaccgcagtaaatgaaacaaccagaaatgaacaatttaccaaccaagtatgtcatttaatggctaccctgatgtatttagttagagagacggttgggataattaaataattggcttaatgaaaatatactttcaagtgaaatcgttttattaatcacacaaggttcttaacttagatggaatatgatatttcaaatatttttttttaacatgtcatgcttcttcaaaaattatgtgcttaaggatgtcaatttataatttgcaattaaaggaggttaatgacatctcagcgcagtctttcttaattatactatactcaaatatgttcggctcttttgtaatggcagattatagcttgggctacaatactttgttcatatgcatttcggactagtttcaatctcagagctaagctcaaactacaggattaggttcctttaagcgctcagctcgtttccccctgcttcttctggagaaccacagcaatctggagcgcctttgagctgtgaccacatcggattccacatggatgcagttccttccgccggacaccttgaccaacttcgtatccaaatccagttcgctggcattgagtatttgtgcgacatgtgcctcgtcgattgtgcctttgaagataaggggatagggccactcgtggcatatcgtgggtccgctatagtcccgcagagcctcgatcatcctgtccaggcgctgcatctcctcgtggtcgtcgttgaattcgcgcacctcatccagcaaagctgccacatcggattcgagcacctgcgaggtgaggtggaaattggattagcgggaaatcgcttattttgctcgatttgcactgcggtatccaatgacacaatgacagtgacggcgttacggtcagtgatagccttactttcccgccggctgagctatccacccatccaggtcgccattccggacccccttattcgcgccattcattcggcgatgttggctcggatttcagctctaatatctttccaaaggcctcgtcactagcgtctctattagtgccaaattagccaagcctaggaacacggccaactaagctcatgttgggtgcatgtttcgaaggggtgaaaagtaaaccctaccccaaacactctacaccaaaaaggtagttatcaaaagttaaaatcaaacgaagaagctgtaaaaatagtttatccatgtattgtagttaaaatacaatagttagggaagttggattgtatatttagttagacaattaataccgggtaatcatcctgtgcggaaataactttatacttattcatctggccatgactgtgccatgcattgcgaaaccgttcgtttgcctatggccgaaccgacattgtctaattagcggtgctagtaatcactgcagtccccaactacccccacgtcgcacccccaaccctctctgacccgtccaacattctaacatttcgttcccaataactggctataattgcattaacatgttccaaatcgctgctgcagctgttaacagagttgccggtcgcgcattgttgaacaacaggtgatagcaggtgaaatggcagcagaaatagcgataacaaattacaatggctaaaaggggttaagagatatagtcggttgaccattgttaagctaaatgctaagagtttgttgacaagctttcattaagaaaagcatgcaaaaatgtgacgttacttttatgaagattacgtatacgactagttgaagacggcatttagtaaaaatggtaagataattttactgctactagcttacttaatgcattacaatttaatttttgtatccaaataaaagagctatttttagaatgaaagccgaaatgaacagaattgtttgtgaaagcacagataatatttcgaaagtgatggagcgataacagaagtggcacaaaggccagataagaaggagattatacagacagaggcacagttgtacatatataccagatatagaatctgtcaatgtgtttgcaacactttaaaccagcaacaaaagtgtaactctgcggccaagtggattacgcttgtgtggtaaaaacaatttggaca

SEQ ID NO: 32315 - DNA, 378 bp, DROSOPHILA
atgagcttagtgctcgaatccgatgtggcagctttgctggatgaggtgcgcgaattcaacgacgaccacgaggagatgcagcgcctggacaggatgatcgaggctctgcgggactatagcggacccacgatatgccacgagtggccctatccccttatcttcaaaggcacaatcgacgaggcacatgtcgcacaaatactcaatgccagcgaactggatttggatacgaagttggtcaaggtgtccggcggaaggaactgcatccatgtggaatccgatgtggtcacagctcaaaggcgctccagattgctgtggttctccagaagaagcagggggaaacgagctgagcgcttaaaggaacctaatcctgtagtttga

SEQ ID NO: 32316 - protein, 125 aa, DROSOPHILA
MSLVLESDVAALLDEVREFNDDHEEMQRLDRMIEALRDYSGPTICHEWPYPLIFKGTIDEAHVAQILNASELDLDTKLVKVSGGRNCIHVESDVVTAQRRSRLLWFSRRSRGKRAERLKEPNPVV

SEQ ID NO: 32317 - DNA, 5983 bp, DROSOPHILA
acttttatgtgaaaggagccacctttaactaccgccatgcacagcaactcagtgtggcaatttccaaaatgcaggggctaacgaattctctcagggtaaggcttaaaactaaatccgttttctaatctcagcttatgcaaaaatattttagcgcacacctaagcatgtcctgcgacatggaaaacagtttgaacgtgcgctggctgcccagatcatcatgctcgcgccaatggctccgcactttgcctccgaactgtggtcaaagtttgtggcgataccaggcaggctaaatcccgccagtcaggagttacagtggagcgaagatgtgcttgctcagcgctggccagacatcgaccccgcctacaatctggaccttagcattaaagtcaatggatttgagaactgtgtaatcaaagtgcagagaacgcatctggataaggtaacgcacagtgatgctctcgacattgccttcaacaccgaatcggtgacatcgtacctaattgacaagaaaattcgcaccaccaattttgtgctttacccgggaatcgaggctattctgaatatctatgtggataaggcgaaaatgaagcaaaagccgccgaccaccgatgatgcagaagctcagcctcaggcgtaggataaggaaaaagtatcgtgaaagtggatagataaagttgagtagtaaaagtttggttgctactttttaggatattcttgcgatcatagttcttaagccgaacggattacggaggagagtgggttcaacctgcccaaatgcatttccggtgttggccagaaaggcgccatcctagattggtactttttaatcatgtttaatgttaaatatttataaaaattggactagttgtaagcagctgctttacaggattggtaaatgcctagaatcataggaatataatggttgctctacctgtgcgcctctatctaaaagccagatcgactaataatttcataaattttcatttgttggaacggcctctcacttcaacagctcgcacatgagattccgcaggtagacatctagctgggcgtaatccagcagcgtatttcggacgatatcaagaagcatacttggccaaagagtttccagtttatgcagcttctccacggcgttgcaagtgttctccagcagaagggcaaagtgctggcgacctcgatctcggacactgggcgccatggcagtgcttcccgcttccgtcccttgatttatattcattgaggtggaagttcctgctccaccaccagcgttcttcttccactggagtgcctcttttcccaccacgagtcgcagggacttgttgtccggccgtaggagccactctttaggagacagtttgctggccgtgcaggtttcatccagacgcagtctcgccaaaagcggttgcagcattacctcgggcatggaccacagaaccaggtcagagagtccaacgtacatggcattcgcagcctccacttccgcttcggttacctcctgaccatttagctgcttcagtccccagtgtgatagcctgtagatggcgtatgctcgccaggtttccttgagcgtaatgccattaccctcggcatcgatcatcaagctgctgagcccctggagctccgccaatccattaagctgacccaaacaggagatgtttgtttcccggaaaacgtagtgctcggcgtgagggaatcgcagcttaatcctgcccagaacacatacgatgctgttgaagttaatgtaactgaagttcagcgtgtgcacgtcattggccttggccggattccactgcttatcgatgaaacggagagctccctggccgtagatgttaaggtaccttccgcatatttcaatcaggtaatcgccaccttgttctctctcccgttcagcggcgctgggcttggacactgttatggctgcgtttggagttgcagctgctcctgcaggtggcgctgctgttgtggagcctcctgttccagctgccgctcctgctgatgattggttgttaccactcgttgccgctttcgtttgagtcgccaccaagtttaatccattgttggtggcctttcctcgacccgcactattggaactgctgctgttactggtgctgctgctcacggtttgcgcacgcaccagactaccagccatgtaccgcttggaggaagcagctgctcctcctctctggttaatctgtaatcccaattgtgtgatgggtgcatgacgggaacgctgtttgctgctggtcggacgacttgcattggaggatgcagtggcgggcacaggcaaggtggaaattatggttgttgatggtgaaggcgacgtggtgccgggcactggagtgcctggggcagctggtggagtcaaggtcagtgcaggcggcgaaggtgaggatgacaccggtgctgacggtgtcactatggctacttcaggagattggcttgcaactgtaactggcgatgatggtggcttttccgtcaagcccaccttgtttgagttttcatcaatctgcggagtctgtggtttatttttagcgccgccgtcctcattgtccgagctataacaactggagcaggagtcaacattgggtcctagactagaggcctcagaggaggcgccatcctcttcgtgtggattccttagatccttcgcaataggcggcagtttaatcagtgcctggagttcatccatcagttccttgggctgctgcgactcctcggattccatttccccctcctcacctgccggaccttcgttggactcattgatcttggctagctcgctggtaaggcggctcttgggacgacccaccactgtctgttgggaacgcagaagttcccagttggtcctggcattggatataacctcttcacgccggatgttgtggtaagcctcggagcttccaggagcagcttgagcctgttccttgtgctggcgccaagcaagagccgcccgacgcacctgctccgtgatgggcatctgactaagggtttgcagcagtggaaggtacgaaaccaagaaggatacgcaatcgccggcgagagagacgggattgttctcgattgtaacttccaggaggcgggtggccctggctatactggccatatcatcaactctgtgcagatcgttgtgacataaccaaagcctttccagagccaccaggtgctggaatccattgatccgccggagcttgttccgcttgaggttcaactccctaaggcagcgcaggccaagaaaatcctgctgatttatctgacgaatttgatttcccgccagattcaatgatttcagttgctgcaggcagttgatgcgactgcccagactggtgagtttattaccatgcagatccaacactcttagtgtatccttcaacgaggacagaccaccaatgtccgtaatcctgttcttgcccagcagtagcaccgaaagcgaaggtagtccatccaggttcgctattctctcgatctggttatcatagagatccagaaataccagctgctgaaagatgctcccataactggcacttaagctcaactgcttgttcttgatgctcagctgctctaaagcagaaatgctggtcatcacactgggagactcctcctcttcaccacacccaccgtacagagagagattgctattgtgcagggcactgccctcatcgcagctctggaggagattgctggcggctccacccggtgcgaccactcctccggctctggttgccttgagcattgcccttcgttggatgagctgttgctgatgcttcattgcctggaggctgctgctcacgaagctcttggatttttccaatccgtagcgcatgcgtaacgccggtggaggcgtcaattgtgcctgtccgtagttgtagcctcgcttggccaacttggagcgccctgcggctgttcctccattgatggccaatgcctgagttgtcagtggactgcctgagcccggactaccgccggacttgggcgataggcgatgggaattgccacctgcattggtcatggcacgggtaagtctgcctggatgatggccacgcaggccagagcgtcctccctccttgtttccattgccgttgctatattctagaggagcaaaagaagaagaatcaattggagatctaagcgctattctttaaattctaaatttctaggatacaaaccacccagcttattattgttactctcccgtggcgtggcgacagcaggaggaggcactggtggaggcggcggtgtcacctccttgggtatgtgaaaagtgttgatcaggttgtgctgcagcgacagcagtcgaagattgggctcctgctcaaagatgggaatcgcagtgagtcctctcttgtcatagttaattcgatcgggcagctcctcgcgctccttgggcaatctctggatccgacagatgccatttggttgcggcgtaacgatggctccactaaccagagttccgccggtgctgcctaccagggtattgggcgttacagccgctgtggctgggcgacagctattggaggccgccgaggaggatgtggacttggaacgctgtcgctggatgccaacgccacgtggtagattccgttgctgttgctgctgctgttggcggatttgagctgcggcggcatagcctcgcttcaactgttgctgctggccaacttggagttccgatggctgttggatttgctgctgctgatgctgctgcggcactggtcgcttggagatgacgttgtggcttaaggtgctatgggagcgaccaataggacgccggcgtagtctttgattaaaactaggaacgaacggttcgattttcagcaaagatgtttgaggtaagtagttctgttgttgttgcagttgttgttgttgtgggtgcggcaagggattcgctgcagccggagtcgcagcaggtgcaggaccgggagcagggcaggctgcttccggcgtgggcgtttcatcgttgagtatggagcgaccgcggcatttggccatggagatcagctggcggcgcctggcatgagttgccgccgatgtcgctggctttgtccttggtggctcctggccttgcacctggactggcacctggccctgcccctggcccgttgccgtgcgtgtggcaccttccaccttcgagtttcataatagttcgatgcgggcaagcgactcctggagagctccggacatagttacggggatttgtgatggtccttgcgcagattacactattttcgttgcataatctgcaatccctatagagatatacatatataagcaggcaataaagtaaataaatagtaatccttcgatagatgataaatttaaattgaatttaaatcataaaagaatttcatgattaaataccaaattgtctgcattctcacagaattacaagagaacaaacctcatatgtataatccaatgggctgaatttaaaaccgaaaaaaggctatttaattacaactgccttgcagtaattgaaatttgctcacccagttctatgtgtaaatcccagaaatgacgaaaacccagtcctggttatctaatttgcaattgcattcagctctctggtcgacggattatggattagtttggttccttttggggacacacaaatagatacagtgggagtgcctcgaatggaattgggagcgactgctccacttgagctgcttttcccttcagttctcgttgatttttggtgatttcttttgtcgattggtgtattcagtcttctgcggtacagagggtatagatatatagatatatagataaaaggtatggtatttgtgtgctcctcgagtgttgttggtcgcctccgtggcagctctgagccaggattcgtggactcgctggctcgggcatgtgggcccattttattagtttgtttattcgggttatacattctcgattttggcctggcgcggttgccatagaacacttatatgcggtgcatttggaagacagttgctgtccctattccgctcgcttgcca

SEQ ID NO: 32318 - DNA, 3906 bp, DROSOPHILA
atggccaaatgccgcggtcgctccatactcaacgatgaaacgcccacgccggaagcagcctgccctgctcccggtcctgcacctgctgcgactccggctgcagcgaatcccttgccgcacccacaacaacaacaactgcaacaacaacagaactacttacctcaaacatctttgctgaaaatcgaaccgttcgttcctagttttaatcaaagactacgccggcgtcctattggtcgctcccatagcaccttaagccacaacgtcatctccaagcgaccagtgccgcagcagcatcagcagcagcaaatccaacagccatcggaactccaagttggccagcagcaacagttgaagcgaggctatgccgccgcagctcaaatccgccaacagcagcagcaacagcaacggaatctaccacgtggcgttggcatccagcgacagcgttccaagtccacatcctcctcggcggcctccaatagctgtcgcccagccacagcggctgtaacgcccaataccctggtaggcagcaccggcggaactctggttagtggagccatcgttacgccgcaaccaaatggcatctgtcggatccagagattgcccaaggagcgcgaggagctgcccgatcgaattaactatgacaagagaggactcactgcgattcccatctttgagcaggagcccaatcttcgactgctgtcgctgcagcacaacctgatcaacacttttcacatacccaaggaggtgacaccgccgcctccaccagtgcctcctcctgctgtcgccacgccacgggagagtaacaataataagctgggtgaatatagcaacggcaatggaaacaaggagggaggacgctctggcctgcgtggccatcatccaggcagacttacccgtgccatgaccaatgcaggtggcaattcccatcgcctatcgcccaagtccggcggtagtccgggctcaggcagtccactgacaactcaggcattggccatcaatggaggaacagccgcagggcgctccaagttggccaagcgaggctacaactacggacaggcacaattgacgcctccaccggcgttacgcatgcgctacggattggaaaaatccaagagcttcgtgagcagcagcctccaggcaatgaagcatcagcaacagctcatccaacgaagggcaatgctcaaggcaaccagagccggaggagtggtcgcaccgggtggagccgccagcaatctcctccagagctgcgatgagggcagtgccctgcacaatagcaatctctctctgtacggtgggtgtggtgaagaggaggagtctcccagtgtgatgaccagcatttctgctttagagcagctgagcatcaagaacaagcagttgagcttaagtgccagttatgggagcatctttcagcagctggtatttctggatctctatgataaccagatcgagagaatagcgaacctggatggactaccttcgctttcggtgctactgctgggcaagaacaggattacggacattggtggtctgtcctcgttgaaggatacactaagagtgttggatctgcatggtaataaactcaccagtctgggcagtcgcatcaactgcctgcagcaactgaaatcattgaatctggcgggaaatcaaattcgtcagataaatcagcaggattttcttggcctgcgctgccttagggagttgaacctcaagcggaacaagctccggcggatcaatggattccagcacctggtggctctggaaaggctttggttatgtcacaacgatctgcacagagttgatgatatggccagtatagccagggccacccgcctcctggaagttacaatcgagaacaatcccgtctctctcgccggcgattgcgtatccttcttggtttcgtaccttccactgctgcaaacccttagtcagatgcccatcacggagcaggtgcgtcgggcggctcttgcttggcgccagcacaaggaacaggctcaagctgctcctggaagctccgaggcttaccacaacatccggcgtgaagaggttatatccaatgccaggaccaactgggaacttctgcgttcccaacagacagtggtgggtcgtcccaagagccgccttaccagcgagctagccaagatcaatgagtccaacgaaggtccggcaggtgaggagggggaaatggaatccgaggagtcgcagcagcccaaggaactgatggatgaactccaggcactgattaaactgccgcctattgcgaaggatctaaggaatccacacgaagaggatggcgcctcctctgaggcctctagtctaggacccaatgttgactcctgctccagttgttatagctcggacaatgaggacggcggcgctaaaaataaaccacagactccgcagattgatgaaaactcaaacaaggtgggcttgacggaaaagccaccatcatcgccagttacagttgcaagccaatctcctgaagtagccatagtgacaccgtcagcaccggtgtcatcctcaccttcgccgcctgcactgaccttgactccaccagctgccccaggcactccagtgcccggcaccacgtcgccttcaccatcaacaaccataatttccaccttgcctgtgcccgccactgcatcctccaatgcaagtcgtccgaccagcagcaaacagcgttcccgtcatgcacccatcacacaattgggattacagattaaccagagaggaggagcagctgcttcctccaagcggtacatggctggtagtctggtgcgtgcgcaaaccgtgagcagcagcaccagtaacagcagcagttccaatagtgcgggtcgaggaaaggccaccaacaatggattaaacttggtggcgactcaaacgaaagcggcaacgagtggtaacaaccaatcatcagcaggagcggcagctggaacaggaggctccacaacagcagcgccacctgcaggagcagctgcaactccaaacgcagccataacagtgtccaagcccagcgccgctgaacgggagagagaacaaggtggcgattacctgattgaaatatgcggaaggtaccttaacatctacggccagggagctctccgtttcatcgataagcagtggaatccggccaaggccaatgacgtgcacacgctgaacttcagttacattaacttcaacagcatcgtatgtgttctgggcaggattaagctgcgattccctcacgccgagcactacgttttccgggaaacaaacatctcctgtttgggtcagcttaatggattggcggagctccaggggctcagcagcttgatgatcgatgccgagggtaatggcattacgctcaaggaaacctggcgagcatacgccatctacaggctatcacactggggactgaagcagctaaatggtcaggaggtaaccgaagcggaagtggaggctgcgaatgccatgtacgttggactctctgacctggttctgtggtccatgcccgaggtaatgctgcaaccgcttttggcgagactgcgtctggatgaaacctgcacggccagcaaactgtctcctaaagagtggctcctacggccggacaacaagtccctgcgactcgtggtgggaaaagaggcactccagtggaagaagaacgctggtggtggagcaggaacttccacctcaatgaatataaatcaagggacggaagcgggaagcactgccatggcgcccagtgtccgagatcgaggtcgccagcactttgcccttctgctggagaacacttgcaacgccgtggagaagctgcataaactggaaactctttggccaagtatgcttcttgatatcgtccgaaatacgctgctggattacgcccagctagatgtctacctgcggaatctcatgtgcgagctgttgaagtga

SEQ ID NO: 32319 - protein, 1301 aa, DROSOPHILA
MAKCRGRSILNDETPTPEAACPAPGPAPAATPAAANPLPHPQQQQLQQQQNYLPQTSLLKIEPFVPSFNQRLRRRPIGRSHSTLSHNVISKRPVPQQHQQQQIQQPSELQVGQQQQLKRGYAAAAQIRQQQQQQQRNLPRGVGIQRQRSKSTSSSAASNSCRPATAAVTPNTLVGSTGGTLVSGAIVTPQPNGICRIQRLPKEREELPDRINYDKRGLTAIPIFEQEPNLRLLSLQHNLINTFHIPKEVTPPPPPVPPPAVATPRESNNNKLGEYSNGNGNKEGGRSGLRGHHPGRLTRAMTNAGGNSHRLSPKSGGSPGSGSPLTTQALAINGGTAAGRSKLAKRGYNYGQAQLTPPPALRMRYGLEKSKSFVSSSLQAMKHQQQLIQRRAMLKATRAGGVVAPGGAASNLLQSCDEGSALHNSNLSLYGGCGEEEESPSVMTSISALEQLSIKNKQLSLSASYGSIFQQLVFLDLYDNQIERIANLDGLPSLSVLLLGKNRITDIGGLSSLKDTLRVLDLHGNKLTSLGSRINCLQQLKSLNLAGNQIRQINQQDFLGLRCLRELNLKRNKLRRINGFQHLVALERLWLCHNDLHRVDDMASIARATRLLEVTIENNPVSLAGDCVSFLVSYLPLLQTLSQMPITEQVRRAALAWRQHKEQAQAAPGSSEAYHNIRREEVISNARTNWELLRSQQTVVGRPKSRLTSELAKINESNEGPAGEEGEMESEESQQPKELMDELQALIKLPPIAKDLRNPHEEDGASSEASSLGPNVDSCSSCYSSDNEDGGAKNKPQTPQIDENSNKVGLTEKPPSSPVTVASQSPEVAIVTPSAPVSSSPSPPALTLTPPAAPGTPVPGTTSPSPSTTIISTLPVPATASSNASRPTSSKQRSRHAPITQLGLQINQRGGAAASSKRYMAGSLVRAQTVSSSTSNSSSSNSAGRGKATNNGLNLVATQTKAATSGNNQSSAGAAAGTGGSTTAAPPAGAAATPNAAITVSKPSAAEREREQGGDYLIEICGRYLNIYGQGALRFIDKQWNPAKANDVHTLNFSYINFNSIVCVLGRIKLRFPHAEHYVFRETNISCLGQLNGLAELQGLSSLMIDAEGNGITLKETWRAYAIYRLSHWGLKQLNGQEVTEAEVEAANAMYVGLSDLVLWSMPEVMLQPLLARLRLDETCTASKLSPKEWLLRPDNKSLRLVVGKEALQWKKNAGGGAGTSTSMNINQGTEAGSTAMAPSVRDRGRQHFALLLENTCNAVEKLHKLETLWPSMLLDIVRNTLLDYAQLDVYLRNLMCELLK

SEQ ID NO: 32320 - DNA, 5903 bp, DROSOPHILA
ttgtgcgggctcttaacccggcaaacgaaaataaaagcccatttacaagcccaatgccacagtcaaggacttgagcttgagcctgagccggctggcaattcaaatgccaggacacgaggacatggcaagcgctgaaaagcaaagcttatcggccgcaacgtaaatcacccaatttaccataaataaagatacgtacatattgtcagccgtttttggggggccctagtggttggcttttcggtggtcttgggtggttacgggtggcatgtgggtggcgatgcggactgcaaccacaagcgtggccaccgtcagaaaccaaaaaccaaaagagccgaaacaaaacaccttatcgcggacaggcacatctttaagtggctgtcaacggaagtggtgagtgtgggtggtggtgtcgccacaaggattgggttgcgtgggtggtgccatgatagtgcgacaaggaccagggcaactacaccatttggccgaacataaatctgcatgaactgaagcgagtgaacaagtgaaggtgctgccggggagataaatacataaatagccattcagtcgatggcaaagaatttcccgaattacgagctataatagcttaagtgctgcataaataaacgcaaataacaataagctaaatttcttaggaaatcgcaaatctcaaattgacaataatgaaaacttcaagtaactcctttcgttgaaagcttactggcaatgcgaaagatttaaagggctttgctgattttaaatctttaaaagctaaattattttaagttaagtttaagcatataatattctatccattaaatcaattttataattgaatttaatattttatttaactcgaactgtttcggttattactaaaagacttaaccaagaaaacatccaaatctggctataagctcatactgatgccaactctggggcactcgttgtctaccgcatttgatccaagccaaatcccctttggctcttggctattactctcatgatcaggcaccagttggatgggaatgtggccgtgggtggggcgacgtggatgtggctgtggaattgggaggccactccgcatcttggccagggcttgccagtcttagatttactttacaaaagcaacattttgccagttgcgacacgccactcaccagtgtcaccatctaaccggcttgccatctactcttttgcaggcacatcaaatggagtgggaggagcaggactaggaccaggaccagcaggggtatctggagaagaagcaccagcaacagcagcggcaacagcagcagcaacccaaaagacgacagcagcaaatcgcgattatgacgatgatgacgagcacaacgacaaggatgagagtcacgacaacaaacccaacgacttggctgaaagggaacaggacagagagggggataaggagcagggtcgggctggtgagctggggatttcgaggcaggagaagaaggatgctggtggaaagcctgcggcaagtcaaaagcgtgcagcacaaacgacacaatcgcgaaatcccatcagacgggcgcacagtgaacggcatttgtcgaccgcgcccctggccgcccacggccacgcctcctccgcctgcgccgctggtagaaactgccactccatcccgatgactccgccagctagtgggccacagaatgtcattttaaattttaaggacacaatggcgctgcgcataaaaagcaaccgcagcgactcgagagatttatttcaaaggcggcccacggagccaccgccacctccgcctcccaaaggagcaggcaaaggattagagccgctgccacatgaaatcaataagtcgcctctatcgccccaaaggacggtggtgcgggtagctccgttcaagccgcagcagcagcaggtgggtggtagtggtgatggcttcacccacgaggtgcatcgcctcaagatctcccacagcgaggaggatgcggatttgggcgtggagctccgccgcaggcccaatctattcctttcgtcacccggcgaagaggatgcggctcccaagaagacctccattctgattagcggcgatgattgctactccacgatgaacctaagtgcaaatgccgcacagccgctgtaccaatcctccgtggtggtgaatagccactcggccacgagtgtttgcataagcgttagcagtgctgaggagcaggagcaggaactgaatcaattgaacacgctgcgcagccagcagatgggaatgggcatagccattataccaattcgaggagccagcgaggtgaaccttcagagatcggtctcctgcatctcctccacttcgagtagctccacctccagcagcagcagctccagtggccggggaagaacccttattcgcttggattacgatagggaaaggaagggatctgccaccagtagtactcccatcaacacgccccctgtcataagttccacaccagctacaccaccgcccacggacttgccaattgaaaacgcaaatcccctggttccccacgagacggagctcttgaagattcttcgcaatcccgtggaggcagtgaaacttaacctggtaccacatgtgtgtggcttgcgagctcctactcgtgaaagtgggaaatccaagaaaattcaggaagaggaagtgtcagggacacccgtcaaggatcccggtttcatagccaagctcctgcaggatccgatgctgggtcaggtggcggagggactggagaccgagactgtggcggaacttattgagaactcactgcagagactacagcaagcccgcaggggaatcgacatgagcggcaccaaagaccatgacgacatgaatcgcctgatcagcgcctcgctacagcgcatccgcctggagagacagccggcgacacctggaattagtgcaaccaaagaggaggaccgcctgtccaatcggggcagcatcagttccgccaacagctttgcctctgcccacaactacgagctcttcgatttcgatggcggagctggtggcaatgagtctgattgctatcagagctgctccagcgaactgactgcctcgggtatcttggaggaggattcagtaagtcctattaaagatcctgaaactgaactggatgcagccacgcgtgccaagttctatcagctcttggtggatgcaactctggcggagatcgagcactcaacgcacatggatcaaactttgggaactgacagtgaacatcactacgagtcgattcggcacagtggagatcccatttacgaggaaatccatgaggttccaccgcccctgccactatcagctccacctctcaatgacgcagagctggaaaagaaggctgctcgatccattttcgagggtgcctctaagtacgatatcctatcttatttggtggatgccaaggagcggggtttggcccgggaagaaagctttgattatggtaacaatccgaagattatagaggaagaagctgctgataccctaagtgacttggataagcggcaggcggaggagcgggagagggatagggacagtggacagagcagcatgagttccttatcgccaccaccccacaattttatatgtggtggagcaggaaagtcatctgggagcgatgtagaacggcaggactcaggagttggctcggaaacaagtaagacatcccgcagcaagtaccaggccactcccactgtactccacttgtgcgaggattgcgatggagccgtggaaatgcaggtgggcgataatggaatcctctatgccccactggtctgcaggaagtgcggcaagaagcgcgtggagcgcaaggagatcattacggagatcgtggagacggaggaaaagtacggcagggatctgcagatcatactggaggagttctgccaccccatgctggtggccggcctgctcacccaggagcagctctctgcgatcttcctgaatacggaagatctgctcgagaacaaccagacgctggccgagcgcatgcgcgacgccctggacatgtccctggagcagggcgacgacgacctgctgacggtgaacatagggcgcatctttctcgacttcacccagatgctgcacgccttcgagagctactgcgtccgccaggcgggcgctagtctgctgctggccaatctcgagaaggagaaggagctgctgcgcatcttcctcaaagtctcgcagatggagaacgccgtgctgcggcgcatgaatctcaactcgtttttgatggtaagtccctttaaaacaactccaaggtgtccaatttaaaagcttaacccccttttgtactaggttcccgttcagcgcgttacgaagtatccccttttactggcccgtctttacaaggtcacaccctcccacctcgaaggtcgtgaactgctgaagcaagcccaggagaagatcgagctgcatctaaaccatatcaaccaggaggccaaggatgtgcctaccaagctttggcgccgcatcagctcatccagtccgaacagacgggcatcctgcgagatcgacatgatcaacatcaagttgcgcaaaatggccatcgatgttttggagtggaatcacgacgaagtgcgattcgccatggaagggcgcctcctgtacactcagcccacggacagcaattggaagaaggcccgcaccatcaagttgaccccggtcaatgcacttttggttacgaatggcaaggtaagtggaggagcttacatatatatttttaacaggttacaaaaagccttagaagcatatcttaaattagtatacagactcttttttcttggcttgactttttctaccttgctcctttttttttgctcggttgagctgctcttgaagcgcctccttcaggtcctttcccctgttttccgctcctattcctccgcccgtctgggccacatttgacaggcatcaagaacgttggctgtttgacacgggccaagatggcaaaaggcgcttgctattgcgatggcgatggcgatgccaaggcaattagcgagaaacgccatccagttgcctccatgcggcggcagctgtccggagctgtctcggcttttccggctgccatggcaacacttttccgtgcaaaagcgataagagatttcaacaaatcagagccgggcccattgaaccggcaccgcatccacatccacattcacattctggctttttctcaaaatgaaaattgcttatcccagcaactatctcgggtccaaaaaacaaaacggttttagctaggaaaatggaaaaaaatgcgagggaaagtggcatcctgccaggggttttcgtatcggaggcgtaatcgtatggcatacggacgcagtgcgtatgtcacaagttttgtttggtttttctgctccgatcggggttttttatgtcctccgagcgccctgctctaaatttctggcccgtcctcgaccgccgacaattgctcaattccagaccggacaccaactactagttcgttggactgttccctttacgtttttccgagcgctgctcctgtggctccagttgctccttggtgccgcttcctgcggcagtttctcgggctgacacgctttgtgcgtctttatctaggatagtccaaagtgcactggaaaaaatcacattagcttactttacagtacacttaaagtttatattttcagtatcttatttattcagtatccatctcatcttttttttacgataaatttaaggaaatttatattaagtttgtaataaggtttttgctgaatctaaatctcatttcaaaaccttttccccaaaatttcgagattgaagactacaatttattctctgctcacttttagatgtaattttgtttagtttcgttttacacaatttacaattttttttcatattcttctgtcttttccattgtcgccgcttttggtccctt

SEQ ID NO: 32321 - DNA, 3705 bp, DROSOPHILA
atgatcaggcaccagttggatgggaatgtggccgtgggtggggcgacgtggatgtggctgtggaattgggaggccactccgcatcttggccagggcttgccagtcttagatttactttacaaaagcaacattttgccagttgcgacacgccactcaccagtgtcaccatctaaccggcttgccatctactcttttgcaggcacatcaaatggagtgggaggagcaggactaggaccaggaccagcaggggtatctggagaagaagcaccagcaacagcagcggcaacagcagcagcaacccaaaagacgacagcagcaaatcgcgattatgacgatgatgacgagcacaacgacaaggatgagagtcacgacaacaaacccaacgacttggctgaaagggaacaggacagagagggggataaggagcagggtcgggctggtgagctggggatttcgaggcaggagaagaaggatgctggtggaaagcctgcggcaagtcaaaagcgtgcagcacaaacgacacaatcgcgaaatcccatcagacgggcgcacagtgaacggcatttgtcgaccgcgcccctggccgcccacggccacgcctcctccgcctgcgccgctggtagaaactgccactccatcccgatgactccgccagctagtgggccacagaatgtcattttaaattttaaggacacaatggcgctgcgcataaaaagcaaccgcagcgactcgagagatttatttcaaaggcggcccacggagccaccgccacctccgcctcccaaaggagcaggcaaaggattagagccgctgccacatgaaatcaataagtcgcctctatcgccccaaaggacggtggtgcgggtagctccgttcaagccgcagcagcagcaggtgggtggtagtggtgatggcttcacccacgaggtgcatcgcctcaagatctcccacagcgaggaggatgcggatttgggcgtggagctccgccgcaggcccaatctattcctttcgtcacccggcgaagaggatgcggctcccaagaagacctccattctgattagcggcgatgattgctactccacgatgaacctaagtgcaaatgccgcacagccgctgtaccaatcctccgtggtggtgaatagccactcggccacgagtgtttgcataagcgttagcagtgctgaggagcaggagcaggaactgaatcaattgaacacgctgcgcagccagcagatgggaatgggcatagccattataccaattcgaggagccagcgaggtgaaccttcagagatcggtctcctgcatctcctccacttcgagtagctccacctccagcagcagcagctccagtggccggggaagaacccttattcgcttggattacgatagggaaaggaagggatctgccaccagtagtactcccatcaacacgccccctgtcataagttccacaccagctacaccaccgcccacggacttgccaattgaaaacgcaaatcccctggttccccacgagacggagctcttgaagattcttcgcaatcccgtggaggcagtgaaacttaacctggtaccacatgtgtgtggcttgcgagctcctactcgtgaaagtgggaaatccaagaaaattcaggaagaggaagtgtcagggacacccgtcaaggatcccggtttcatagccaagctcctgcaggatccgatgctgggtcaggtggcggagggactggagaccgagactgtggcggaacttattgagaactcactgcagagactacagcaagcccgcaggggaatcgacatgagcggcaccaaagaccatgacgacatgaatcgcctgatcagcgcctcgctacagcgcatccgcctggagagacagccggcgacacctggaattagtgcaaccaaagaggaggaccgcctgtccaatcggggcagcatcagttccgccaacagctttgcctctgcccacaactacgagctcttcgatttcgatggcggagctggtggcaatgagtctgattgctatcagagctgctccagcgaactgactgcctcgggtatcttggaggaggattcagtaagtcctattaaagatcctgaaactgaactggatgcagccacgcgtgccaagttctatcagctcttggtggatgcaactctggcggagatcgagcactcaacgcacatggatcaaactttgggaactgacagtgaacatcactacgagtcgattcggcacagtggagatcccatttacgaggaaatccatgaggttccaccgcccctgccactatcagctccacctctcaatgacgcagagctggaaaagaaggctgctcgatccattttcgagggtgcctctaagtacgatatcctatcttatttggtggatgccaaggagcggggtttggcccgggaagaaagctttgattatggtaacaatccgaagattatagaggaagaagctgctgataccctaagtgacttggataagcggcaggcggaggagcgggagagggatagggacagtggacagagcagcatgagttccttatcgccaccaccccacaattttatatgtggtggagcaggaaagtcatctgggagcgatgtagaacggcaggactcaggagttggctcggaaacaagtaagacatcccgcagcaagtaccaggccactcccactgtactccacttgtgcgaggattgcgatggagccgtggaaatgcaggtgggcgataatggaatcctctatgccccactggtctgcaggaagtgcggcaagaagcgcgtggagcgcaaggagatcattacggagatcgtggagacggaggaaaagtacggcagggatctgcagatcatactggaggagttctgccaccccatgctggtggccggcctgctcacccaggagcagctctctgcgatcttcctgaatacggaagatctgctcgagaacaaccagacgctggccgagcgcatgcgcgacgccctggacatgtccctggagcagggcgacgacgacctgctgacggtgaacatagggcgcatctttctcgacttcacccagatgctgcacgccttcgagagctactgcgtccgccaggcgggcgctagtctgctgctggccaatctcgagaaggagaaggagctgctgcgcatcttcctcaaagtctcgcagatggagaacgccgtgctgcggcgcatgaatctcaactcgtttttgatggttcccgttcagcgcgttacgaagtatccccttttactggcccgtctttacaaggtcacaccctcccacctcgaaggtcgtgaactgctgaagcaagcccaggagaagatcgagctgcatctaaaccatatcaaccaggaggccaaggatgtgcctaccaagctttggcgccgcatcagctcatccagtccgaacagacgggcatcctgcgagatcgacatgatcaacatcaagttgcgcaaaatggccatcgatgttttggagtggaatcacgacgaagtgcgattcgccatggaagggcgcctcctgtacactcagcccacggacagcaattggaagaaggcccgcaccatcaagttgaccccggtcaatgcacttttggttacgaatggcaagctgctcttgaagcgcctccttcaggtcctttcccctgttttccgctcctattcctccgcccgtctgggccacatttga

SEQ ID NO: 32322 - protein, 1234 aa, DROSOPHILA
MIRHQLDGNVAVGGATWMWLWNWEATPHLGQGLPVLDLLYKSNILPVATRHSPVSPSNRLAIYSFAGTSNGVGGAGLGPGPAGVSGEEAPATAAATAAATQKTTAANRDYDDDDEHNDKDESHDNKPNDLAEREQDREGDKEQGRAGELGISRQEKKDAGGKPAASQKRAAQTTQSRNPIRRAHSERHLSTAPLAAHGHASSACAAGRNCHSIPMTPPASGPQNVILNFKDTMALRIKSNRSDSRDLFQRRPTEPPPPPPPKGAGKGLEPLPHEINKSPLSPQRTVVRVAPFKPQQQQVGGSGDGFTHEVHRLKISHSEEDADLGVELRRRPNLFLSSPGEEDAAPKKTSILISGDDCYSTMNLSANAAQPLYQSSVVVNSHSATSVCISVSSAEEQEQELNQLNTLRSQQMGMGIAIIPIRGASEVNLQRSVSCISSTSSSSTSSSSSSSGRGRTLIRLDYDRERKGSATSSTPINTPPVISSTPATPPPTDLPIENANPLVPHETELLKILRNPVEAVKLNLVPHVCGLRAPTRESGKSKKIQEEEVSGTPVKDPGFIAKLLQDPMLGQVAEGLETETVAELIENSLQRLQQARRGIDMSGTKDHDDMNRLISASLQRIRLERQPATPGISATKEEDRLSNRGSISSANSFASAHNYELFDFDGGAGGNESDCYQSCSSELTASGILEEDSVSPIKDPETELDAATRAKFYQLLVDATLAEIEHSTHMDQTLGTDSEHHYESIRHSGDPIYEEIHEVPPPLPLSAPPLNDAELEKKAARSIFEGASKYDILSYLVDAKERGLAREESFDYGNNPKIIEEEAADTLSDLDKRQAEERERDRDSGQSSMSSLSPPPHNFICGGAGKSSGSDVERQDSGVGSETSKTSRSKYQATPTVLHLCEDCDGAVEMQVGDNGILYAPLVCRKCGKKRVERKEIITEIVETEEKYGRDLQIILEEFCHPMLVAGLLTQEQLSAIFLNTEDLLENNQTLAERMRDALDMSLEQGDDDLLTVNIGRIFLDFTQMLHAFESYCVRQAGASLLLANLEKEKELLRIFLKVSQMENAVLRRMNLNSFLMVPVQRVTKYPLLLARLYKVTPSHLEGRELLKQAQEKIELHLNHINQEAKDVPTKLWRRISSSSPNRRASCEIDMINIKLRKMAIDVLEWNHDEVRFAMEGRLLYTQPTDSNWKKARTIKLTPVNALLVTNGKLLLKRLLQVLSPVFRSYSSARLGHI

SEQ ID NO: 32323 - DNA, 2789 bp, DROSOPHILA
tcagcgcccacgcacccgcacttgcacccaaatactacagtatactatgataatgaagttttccactcccctccccccccctaccagtccaccggtatatatgtatgtacatgggtatagtccggaatttccccatccgatgcgattggcacggagcgtgtttgtttatctgccgagcgcccaatgcaaattcagccacgaatacaaatagaagcgaaataaaattaaataaattcaggccttgcatcgctgcttaattgtgcgcaactttcagcggctaaattaaacgtaaagattgcaattgtgcaattgcaatgccaaaaaatgcaattatcacatgaatcccatacacatacagactgcaaagcactcagcgcactaataagataacaatatatttatgtttacttccagataaaagaaaaaaccaggcaacagcaacagtaagagaaaaaccattgaaaaacggccaagacaccgagattgaacaggtgagataaggtgcgaatatctcaatattctgcacgtatttgcatggctcgtcgagtcaaatttaatcagttttattgtatttgctcttttgagagacgctttcgtttattttggctattttgtgtgccgcactcaaacagatttggatttacagtccaaatatttatttactccttcccgtcgagggaacgaatcggttcaatagatcggcgaactattttgacggccctctagtgagttgtcttgtttgcttttagttagctttgaacaagttaacttttgggattaaatacttcctgctttgtgggaaaacttttcaaactaattttacatagtaaaagacgattttttataatgttgtcaaattattttattattgtattgtagatggaattgtatgttgtagattgaatatgtatgtagattgtatttcgtatagtttatttgtgaatgccgggaatatgttttaaggtagtagggggtgcccagatacatgtgatgttttcgcttatgcttgtggatagtcggttccaaagagtttgttacaaactaatgcggctactttgcggcgtgcatcttttttggttggcccatcagccttaaactcgcagttgtccacggagacgcccattgagaaaactttacggttttcaccagagctacctaaaaatttgaaggtggtctgggggcgcatttgcatcagaaccatgcaagggtgcatattcttccataatttgggcaactgtccaactgacgacgacgtcttcttgttctttacgtcattatacagggctgcaacatcaatagcgtcgctgttccatttctcagcaagtttgtaaacggcataagaggtcatcttttcgagtatattatcttcatcgcctcccgagctgttttctggctcggccaacagagctttcattttggtggttaggatttctcgcagagccttctcgcaagctgcattccctgcagagttttctgaagaaccctccgcatcgtatttctttgagttaacaacaatgttagccacattcttcccctcgtggtcttgttttatttgcatgttgtcgattatcacgccctttaactctttcaaaaccataagggcatccttggaggtcacggccttgggcaacgggcgaacaagacgatccttggctttttgggaacgtttcaatttctttaccttcttctttttcttcttagggtcgctggttgccatggcagcgtcatcagggatctttgacatagaatcgccatcagtgattacgagagaagattcaccatcgggcatattacaatccattgcagtttccttcaagtcatctagaacggaagtaagcaaataagcaatataagttgtgccctgccttttttattttaaataaaatagggttaaaataaatgctatttcttaaagcgaaaaagtgcttgtcattgtgcactttttttttttgcatgtgtgccttctcaaaccgcctaaatctatatatacatacctgacatacctgcatcctcttggtcagaaacatttacgatcaataggtccttcatatcatcgattgccatctttcctgatccaattggttgtcggttgcacttagatattaaattatttgaaacacaattagatctgcttctccaaaacttttgtactgccaagaatgactttctgacttgaagagaccgtagctaactaaaattataaaggagataatatcgatagctcaaaagcgttaggaaatttctttgacgtttgcagtatcgcttactaagtcctaaaaaaaaatcgctttatatttacaatggaaaactaatgtcatttttatagaaagaaacgcccaacgtcagctaatatgcacaaaatatcagaataatgagcacggaaacacgtatgcaaaatgcataggagatgttatcgataactcaaagacattcgaaaatttctttaacactaattaaccgtggccaaaagaactccactactcttgaccaaactaaacgcgcatctgaagtgcgtggcaacctcgaaagtttgcgatgcggtcagcgaagaaactaagctcgttgtccacacaaataattatcgcttgatagtcgagcggtttgtgggtgggaggggagtggagtgggttggaaagggggaggagcggataccgcaaggccaatcaaagcgtcattgaaacggaaacggaaactgcaagtcaaaaggcattcaggaatggccacaggaaatgaggcgcacaagtgccttttggaagagtgcaaagatggtgaccgcatttgctactcgg

SEQ ID NO: 32324 - DNA, 789 bp, DROSOPHILA
atgcccgatggtgaatcttctctcgtaatcactgatggcgattctatgtcaaagatccctgatgacgctgccatggcaaccagcgaccctaagaagaaaaagaagaaggtaaagaaattgaaacgttcccaaaaagccaaggatcgtcttgttcgcccgttgcccaaggccgtgacctccaaggatgcccttatggttttgaaagagttaaagggcgtgataatcgacaacatgcaaataaaacaagaccacgaggggaagaatgtggctaacattgttgttaactcaaagaaatacgatgcggagggttcttcagaaaactctgcagggaatgcagcttgcgagaaggctctgcgagaaatcctaaccaccaaaatgaaagctctgttggccgagccagaaaacagctcgggaggcgatgaagataatatactcgaaaagatgacctcttatgccgtttacaaacttgctgagaaatggaacagcgacgctattgatgttgcagccctgtataatgacgtaaagaacaagaagacgtcgtcgtcagttggacagttgcccaaattatggaagaatatgcacccttgcatggttctgatgcaaatgcgcccccagaccaccttcaaatttttaggtagctctggtgaaaaccgtaaagttttctcaatgggcgtctccgtggacaactgcgagtttaaggctgatgggccaaccaaaaaagatgcacgccgcaaagtagccgcattagtttgtaacaaactctttggaaccgactatccacaagcataa

SEQ ID NO: 32325 - protein, 262 aa, DROSOPHILA
MPDGESSLVITDGDSMSKIPDDAAMATSDPKKKKKKVKKLKRSQKAKDRLVRPLPKAVTSKDALMVLKELKGVIIDNMQIKQDHEGKNVANIVVNSKKYDAEGSSENSAGNAACEKALREILTTKMKALLAEPENSSGGDEDNILEKMTSYAVYKLAEKWNSDAIDVAALYNDVKNKKTSSSVGQLPKLWKNMHPCMVLMQMRPQTTFKFLGSSGENRKVFSMGVSVDNCEFKADGPTKKDARRKVAALVCNKLFGTDYPQA

SEQ ID NO: 32326 - DNA, 4220 bp, DROSOPHILA
agtggtcacgatgatgacaaaaattcactgccggcgaaatggaaacaaagttgttcgcctttcagccagtgtgtaggtgctaccaactcactctctctcgtttcaatctccactcttcagtgaaagcagcatgaatagaactttcccaaaaaccagaaaaaaaaatcaagaagaaaagtggcagagccttgaatgcggtttatattcttttgactggtttatttgatttggcagccaaggagtaggaatgagttgaagctgaagaattatgagcaattgctagggacttgtgtggggcaaattgagtttcgagcatggatgcgattggagctgcaaaaggcacagctgaaaatatttaatcactttgggcgaaattaattaaggtaaacaaggaatacgttttttttgtgcggatcaattttctgcctaatcctgggctattttttaggacctcttttcattagcaaactcaaaagcaaaacacaaacattagatgaaacctaacccttttcgccctgcctgcacataatcgcattttaaactttttcaataataaaacttttctaaacggatttcccgctggacgcgttgcgctttaataattttttcactttttatctctttcattccaggcagcaggcggttttcagctgatgagcaacaaaggacagagtgcatcggagccattaatttaaattgggtattatgagcgcactagcaacacgaacaaaaaggttcgacccgacattgtcatttaaaatgcagtttaaaaatgtttatcaaatgaatctcctcttaattcttatacgtttttcatacctaataacccattaatcattatcgcacaacatgattaatagttaattcttaacatgataagagcattttatttataaatattttttgacgcagtagagttatttgattttattgtttaattactaactatttttaagctgttggtattatatcttaataatttttttttcctctacagctcatgtacgacaagtcaaagaaatcgtggagtcagcggctcaagacgctcggcagcggtgacagcgtggacaagaacgcttctctagccgccgtcagcggcatgcaggccatgcagcagttgcagctgcacatgcagcagcaacaccagcaactgcagcagcaccagcagcagctccaacagcagcagcaacaacaacagcagcagcaacacatggcccaccatggccatccccagatgttgaccgcctaccaactgccgccggttcccgccgccgagttcctgcccagcgccctctcacgttcgatgaagtacgcggagccgtggatctacggaactgttcgtggtatcccggcccgcccatcctacggatatcatccacatgctgctgccattttcgcagcaacggagggagtgccgggaaccacagctctggccgtggtgatctgctcctgtgccgagtatctgaatggcacgaaacgtgacgtgaagaaggcgagtgtgtgcaagaagtgcaagggttcgcgactgccactggccaccattggtggcacgggtggcacagtgcgtctgccggctgtcagcggttcgagcagctcgcgtcgccccatggcggccaccatgcgtgtggtgagtgcgacgaaaaaatcacgtccctccattctggatccgcagaaggatccctacgacctgatgcgacgcacgcgactcctgtccccggagccaagctccaaggaagcggacagcaagtcacgtagtcgcagtgaaacggtggcaaatcagccgaggggtcgcactcgcaccagggcacctcccccaccggcccccatacagaaatctccagcagtggcagtgccaacagcagttcccgatcccacggactgctggctcatggaggataatgaatccctgctgcagagcagcggcctagcctcgagggctaacagccggcgatccatactccgctgccatgtcaatccctatgatctgatctcaagcgaaaacggcaagctccatagtaacctaaggaagcccaacgaccactttgatgtggccgatgcccagctgaacgacgacgagctgggcgagcgaaagagcaagggcaccagcaagttctacagcggcaatgtggcggccatagctggccagcgtattagcctgggcgataagtccggcgacagctccgatccaggtgacagctatgagcgaattattatggtttctggaggagagtcgacggcgtctaatggaccacgacgaccgccacgcaataaaaaagcggatgagccagcggaaatgcccgcagcagcaggcgcagcaggcgcagcaggcgcagcagcaacatcacctcctgcagctgcagtaactgcagcaacagcagtcaagcccaaggctgtgactctagccaaagtggagaaaatagagaaggacaatgagtcagcttacacagtgctcactgtaacgcccacttcgccagccatcaagtccatattgaagcgccccacgactctcgaattgcctggagtgggaatgtctcctttaccacttcctccggttaacaattctggattggtaacgcccgcgggcaagtcacagttctatataccgacgccaacggggacagctgccacgcccacgtcctccagcacgcccatggccacatcaacacctacacccaatgcctccatcacagcgacaacagcggcagccggagcagcaatcacgccgggttcacgcaaaaaagtgcaatttatggtcgaggataaaatcatagccacgactgcgacagcagcgacaactgatgacagcgatgccagtgctgtagcaacgaaaacaaactacgaatactacaatcgcaagcgaaatgctgcaacagcaacagcagcagcagccacagcagcatcagcagcagcagcatcaccgccgacagcagcaacatcaacggatcagcaggaggcaacgctgtttgcggctgacattgatgatgagcataactttacaacttccggcgaggcagctccgccgttcataaaaccggatagtttgcattatgaagatgttctgccaggaccccaaatatttgacagcagcgagtcctctgccaaattatcactgccagcggatgggtcgccgcatgtcactacgagtcctgtcagcgttttacccactggtgagtactccgattctggaatcccgtcatgccataaaacagttgacttttaattatgagctgcccgttcgggctattgcaaaggccagcactttttcagccaagtttctttcattagttaactcacttgaatcacagcaaaaaataagtgaagttcgttaaatttaaaaactataagaaaagtaattaaatgctgaaatctactttcgaaataagctgtagctttcgttagaatctaaaattagttgaatatttaaatgtagatattcaacagttcctttctctgtgtattactcacaaatggcatatttattcccaaggggaagtgactcctattcgctgtctactattttattcccgttttaactatctgtctgtctgtcatttatacactcactcactggactctgtttgcttttgagtaaaaatgaaaatgctggcattgtttgctaattgctcatcatcacggcacggtctacggagtttgccacattgcacattacgtatacgcaaagttggcggcgacactttatgcattatacaaattccctaacaagcatgaaaactgttttggccaagggttgtgcgagagccaattgaaatgctgacatttgaatgggaataaaggtggggaatacagaattagaggatagggggtcacacctggtgcaagttcacgcaggggttaacaccataatcaagcatcagacgtagccgcagtcaggccctttgacacagtctcccctgtcaacggcacacgctctgccgcccacccaccaccgagccacccactgaaccacccacagaatcacccactgaacaccacccccttgaaccacccacagcacgtagctgagcggcaaacaaaacgacagttccaactacaacggaaacgactagcaggccaagtcgacgtgacatttgcacccacaaatggcagcgacgcacggcgatatgccagcaaactattcacattcacatatgcagtacgcttacgccaggtacacggaaagagggggcgttggctgaggggggcgtggcacacatgttcga

SEQ ID NO: 32327 - DNA, 2220 bp, DROSOPHILA
atgtacgacaagtcaaagaaatcgtggagtcagcggctcaagacgctcggcagcggtgacagcgtggacaagaacgcttctctagccgccgtcagcggcatgcaggccatgcagcagttgcagctgcacatgcagcagcaacaccagcaactgcagcagcaccagcagcagctccaacagcagcagcaacaacaacagcagcagcaacacatggcccaccatggccatccccagatgttgaccgcctaccaactgccgccggttcccgccgccgagttcctgcccagcgccctctcacgttcgatgaagtacgcggagccgtggatctacggaactgttcgtggtatcccggcccgcccatcctacggatatcatccacatgctgctgccattttcgcagcaacggagggagtgccgggaaccacagctctggccgtggtgatctgctcctgtgccgagtatctgaatggcacgaaacgtgacgtgaagaaggcgagtgtgtgcaagaagtgcaagggttcgcgactgccactggccaccattggtggcacgggtggcacagtgcgtctgccggctgtcagcggttcgagcagctcgcgtcgccccatggcggccaccatgcgtgtggtgagtgcgacgaaaaaatcacgtccctccattctggatccgcagaaggatccctacgacctgatgcgacgcacgcgactcctgtccccggagccaagctccaaggaagcggacagcaagtcacgtagtcgcagtgaaacggtggcaaatcagccgaggggtcgcactcgcaccagggcacctcccccaccggcccccatacagaaatctccagcagtggcagtgccaacagcagttcccgatcccacggactgctggctcatggaggataatgaatccctgctgcagagcagcggcctagcctcgagggctaacagccggcgatccatactccgctgccatgtcaatccctatgatctgatctcaagcgaaaacggcaagctccatagtaacctaaggaagcccaacgaccactttgatgtggccgatgcccagctgaacgacgacgagctgggcgagcgaaagagcaagggcaccagcaagttctacagcggcaatgtggcggccatagctggccagcgtattagcctgggcgataagtccggcgacagctccgatccaggtgacagctatgagcgaattattatggtttctggaggagagtcgacggcgtctaatggaccacgacgaccgccacgcaataaaaaagcggatgagccagcggaaatgcccgcagcagcaggcgcagcaggcgcagcaggcgcagcagcaacatcacctcctgcagctgcagtaactgcagcaacagcagtcaagcccaaggctgtgactctagccaaagtggagaaaatagagaaggacaatgagtcagcttacacagtgctcactgtaacgcccacttcgccagccatcaagtccatattgaagcgccccacgactctcgaattgcctggagtgggaatgtctcctttaccacttcctccggttaacaattctggattggtaacgcccgcgggcaagtcacagttctatataccgacgccaacggggacagctgccacgcccacgtcctccagcacgcccatggccacatcaacacctacacccaatgcctccatcacagcgacaacagcggcagccggagcagcaatcacgccgggttcacgcaaaaaagtgcaatttatggtcgaggataaaatcatagccacgactgcgacagcagcgacaactgatgacagcgatgccagtgctgtagcaacgaaaacaaactacgaatactacaatcgcaagcgaaatgctgcaacagcaacagcagcagcagccacagcagcatcagcagcagcagcatcaccgccgacagcagcaacatcaacggatcagcaggaggcaacgctgtttgcggctgacattgatgatgagcataactttacaacttccggcgaggcagctccgccgttcataaaaccggatagtttgcattatgaagatgttctgccaggaccccaaatatttgacagcagcgagtcctctgccaaattatcactgccagcggatgggtcgccgcatgtcactacgagtcctgtcagcgttttacccactggtgagtactccgattctggaatcccgtcatgccataaaacagttgacttttaa

SEQ ID NO: 32328 - protein, 739 aa, DROSOPHILA
MYDKSKKSWSQRLKTLGSGDSVDKNASLAAVSGMQAMQQLQLHMQQQHQQLQQHQQQLQQQQQQQQQQQHMAHHGHPQMLTAYQLPPVPAAEFLPSALSRSMKYAEPWIYGTVRGIPARPSYGYHPHAAAIFAATEGVPGTTALAVVICSCAEYLNGTKRDVKKASVCKKCKGSRLPLATIGGTGGTVRLPAVSGSSSSRRPMAATMRVVSATKKSRPSILDPQKDPYDLMRRTRLLSPEPSSKEADSKSRSRSETVANQPRGRTRTRAPPPPAPIQKSPAVAVPTAVPDPTDCWLMEDNESLLQSSGLASRANSRRSILRCHVNPYDLISSENGKLHSNLRKPNDHFDVADAQLNDDELGERKSKGTSKFYSGNVAAIAGQRISLGDKSGDSSDPGDSYERIIMVSGGESTASNGPRRPPRNKKADEPAEMPAAAGAAGAAGAAATSPPAAAVTAATAVKPKAVTLAKVEKIEKDNESAYTVLTVTPTSPAIKSILKRPTTLELPGVGMSPLPLPPVNNSGLVTPAGKSQFYIPTPTGTAATPTSSSTPMATSTPTPNASITATTAAAGAAITPGSRKKVQFMVEDKIIATTATAATTDDSDASAVATKTNYEYYNRKRNAATATAAAATAASAAAASPPTAATSTDQQEATLFAADIDDEHNFTTSGEAAPPFIKPDSLHYEDVLPGPQIFDSSESSAKLSLPADGSPHVTTSPVSVLPTGEYSDSGIPSCHKTVDF

SEQ ID NO: 32329 - DNA, 2384 bp, DROSOPHILA
taaaaaaaagtgccctccaatccaggcgacatttttccgttccattttctcctgactacactttgcactgacaatgcagttatgtaacttgagctcggcgattttgaacttccaaagtcattctctcaacacaaataatgcaaaatgtgataccgccgactctaaatttttatatagtttaatgtgattaccaaggattggaattgattgaagatatagagaagtatttctattaagagtagaatcaaaattcaaattttaagacgttttagaaaagtgttatagagaccaatttttctcagttattgctgtcattatgcatattgatcactttagccatctttcttagagatcattaataaattcttaaaggccttgcagctgtctcccgtcgctaatccagttcggcacttatcctttgcatccttctctgcaatttacccttttccgcagcaggaaaatgcatgttcatccggcagtggcttgcgaatttcagctgcttgggaaaatacgttgtgtaatgtcacttaatctttttatacgcgccagttgagatatattttttgttgtaaattgcccgggcggccgcgagggcggattactgaaacggattaagaatgaaaatgtttgcaaaatactaaaactttacgacgggcagcagattaagaatgaattgttttttattacgccaaccgaaaggggcataagtcaaaagtgcaggtaaaggacaggtaactttttgtcgatggtcaagggtttaaaaaaagtcgggactccgaaagttcaggtaaacacaggcagcaggatgtggctagctgggatgtataaaaactagcctgattgttgaaaggacatcaaacgctctgaaaacgttggacaagcagcatcggatatttttacttgcaactgcaacgaatattgctgagataccacctagagaatctgctaaggaaatcagcaccggactttgtgttttataccgagacttatcgattataaaatgccgcgctaccagaaactcatcaacgaatgcgacagcaagcctgcgaaaaatgcgggacaacaagagcaacaacaacattgctatcagcagcagccaaaagggacgcccaatgtgggatatcacctgtatctgtaccgccagcaactttctcagaagaatgtggagtacatgaggttgtccaaggccaagtactttatcaccgacacactgctggccaaaacggttcggaatttgaaaggatacagcgccgacgagttgaagactgttaaccatcagatcgtctttcggcataaacttcgtcgccagattcagcggcttcgcaagttaagaagtctgggcatcaagaatgccaatcccaaaatggagagtacggaattgtgatagtgataaatatacacaggatcgtcggaggaaagactattttaccgcatagtacaaaaaatatctctaatacctcttacgtttttggaaatctctaaaagatattactttgtgtaaattattcaagagattgtaacgtatattttgtcatttgcttaagtgaagggatgcataaatttataaaattgtatggcccaaaaaacatatcaataagcactgattataattagtgtgtatttggtctgcactaataacattattgattaattaatttaatgacgtttgtgagcacagtgaagataattaagaaaagcacaataatttgattaaattgtaatgaaataaactcccacggtgttagtaatcaaagcttttatatcaatgcattcattttaaattacgtctttaaaagcgcctgccataatattttgacctttcgaggtcatgtatttggacgccagttgtaaccaatatttttggcaatcacccaattgtctaaacagctgttgccacctactcaagtttagacaacggtatggatgtggacagaagcaaccttaatgtgactatcaagtgaggccaatttgtggcagccactaattgagttctctgagccacaacctgacacgtgtcaagacaaatcatttgagctgttgggccttatctcttgaccgcaagtcttttggaatttatgaccccttcgggtgcattaaactcgaatgctattatcgattggaaaaggcgtttttaactgggcacgcaaatattgaatgaatgatttggtactttttgggccagcattttttaattggaaaataatattcacaaagtgctttacacttaactgaacaccaacatcattattttcgctcaaataataataataaatggcaaccgaaccccgctagcccgtaataaataaatggcgcacataatgcggccagcaagtcaattttattattgaaatgagtcgcgatgttcaaacagaaacctcagccca

SEQ ID NO: 32330 - DNA, 384 bp, DROSOPHILA
atgccgcgctaccagaaactcatcaacgaatgcgacagcaagcctgcgaaaaatgcgggacaacaagagcaacaacaacattgctatcagcagcagccaaaagggacgcccaatgtgggatatcacctgtatctgtaccgccagcaactttctcagaagaatgtggagtacatgaggttgtccaaggccaagtactttatcaccgacacactgctggccaaaacggttcggaatttgaaaggatacagcgccgacgagttgaagactgttaaccatcagatcgtctttcggcataaacttcgtcgccagattcagcggcttcgcaagttaagaagtctgggcatcaagaatgccaatcccaaaatggagagtacggaattgtga

SEQ ID NO: 32331 - protein, 127 aa, DROSOPHILA
MPRYQKLINECDSKPAKNAGQQEQQQHCYQQQPKGTPNVGYHLYLYRQQLSQKNVEYMRLSKAKYFITDTLLAKTVRNLKGYSADELKTVNHQIVFRHKLRRQIQRLRKLRSLGIKNANPKMESTEL

SEQ ID NO: 32332 - DNA, 2186 bp, DROSOPHILA
cgcttttggccgttacacttacatctgtgtatatgcgatacatcttatggtatctgtatctgacaagcgcaaacccaaaaaccagaccttgtgccactttacgatgtgtgtaagccggagaatatacgatatacctatagatatatctttatgtagatatatattgaggcaactggcaaattgattaacgctaatcgacgccattttcgtgcaagtagcggtcactgagcgtcacatgagatggcttaaatgtggtatttatatatttttgttttcttttatttttggtaacaactttttggttcattggctcgaaaaaaaaaacgctggattatttcgatggaaagatttcggggagcggtcgagcaactgtaaattgcagcggcgacaactcacaaaaatctcgtttgcctaatagccgagttcaagttgaacggctcaatttctcaatctatcagtcggcgtcgaatcagcgtcatcgtcgattttttaattaagagtcacataaattgaaaaatacccgaattgacagacacttcaacaacagtaacaatgcagccggtccaaaaatagctggctaactccgtggggaaccctcgtaaagtactgcaacttacggtccagagaaaactggtttgtaatccaaaaagaaggaatatcttttcgaaaaaagccaagcaatctgggtaattaatcaaaatgatcttggctttcgtttaaatattccagatattcccgttcgccgtttatttagaatctaactgggatgatctgtgtcgcgtactttggtagcccaaaaaaaactcccataaaacgacaaaccaaatcccacataaaggcagaataaatctctcattcctcacttaaattcacataaatgtttttcggctaccgaaacacttaaagtcgctcatcccaaagtgagaacatttaaaaggccgaatcgaccgaaagaaaatatcgtataaaatgaggcaaagttcatgaactcaagaaggcgatgaatttctcacacagccatggcaacggcgtcaattacacggcaatggacggagatgaaaacgggcagatggagcttgagttggagctgaagatggaggtggagctggagctggagctggagatccgagatggccacggctacttaggagaaccagccagaaccagggagcagcttaacttttaaccgcacagaagtcgacatcgatgcgccacggccacttgagttggttacggccaagccgaaccgagccaagtaattaaaacgagtcgagaaaaatcagcccaaaaagaaaatgggaatgggctgggaatcggtgagggaaaatgggaatgggaacgggagtgggaatgggaatgggaaatgctgcgccacgtaactgaaacttcagagtcaaagtggcgctcggacattgctcatttcgtcgtttcgtaattaattagtcttaaaagttaaatagcccaaatgattttggacaggctacaaaggcgctggctaatagaaaacgttgcaaggaatgtggcgggaaagcgagtgggtccgtgcggcaggggaaaagaacgaagatccagctgagaattttcagtccagttcggtggggttcggtttagttcagcaaatgaagataagatacgtctttgacaggagcgcgacagcaggggggatggggcaatgacagggcagtgcatatttgtgtaaatttagttttatacacagagagaaacgggcagagagaaccaagaacaactaataataagctcgcatatctttgaacatttttaaataagcttaatccgtgggcattgatttcgaaagacaaagaaccagagatttcacatttcgatttatttatagtgggctgttttctttctgtaagtcataaggtaatgacatattctttccagtgcacgtagggattgtggccataggaaagccagttggattctgtcagtttgtgtacgcattgaattgcaggaagaatttatctaacgccggcagcaaatggtggaaatgctgggaatgaactggtgagctggcaagcgtgtgttcgagtatctggcggatacgtgtgaatgctgcagctccgcccgtttctgccatattgattgagacagaatttattggccaagctagtgccctggtccgcatgtatgaatgtgtgagtgtgtgcctgcgttgtgaattt

SEQ ID NO: 32333 - DNA, 186 bp, DROSOPHILA
atgaatttctcacacagccatggcaacggcgtcaattacacggcaatggacggagatgaaaacgggcagatggagcttgagttggagctgaagatggaggtggagctggagctggagctggagatccgagatggccacggctacttaggagaaccagccagaaccagggagcagcttaacttttaa

SEQ ID NO: 32334 - protein, 61 aa, DROSOPHILA
MNFSHSHGNGVNYTAMDGDENGQMELELELKMEVELELELEIRDGHGYLGEPARTREQLNF

SEQ ID NO: 32335 - DNA, 2354 bp, DROSOPHILA
gcagcgacgcatgcgctcgaattacacacatggatatggacactaaacgcagggctttgcctctatatcggccataaaagcataacggcgttcattaatcatgccggtcacgtcggcccaagaaaaaaaaatgaactacactaacataaattgtctaaaagcgagaatgtgctctagtaagcgcagaactaattgtgaatagttaatgaggcttggagaccaaacagacaacaagccttgaaaacacagaaaatctgatttcttacgaaatgattctatttcgggaaattaagtggtttcccattgtcatgcttaattgaaaattgtagttctataaagatcgtttagaatactaaatacctttcgcaatttcgctataaaatactacccgtactacaaataagtttaagttaatcgtaaaagaagtttacgcattgtattgtgttggaatccaaaaagggaataattgaattgaagtcttttttatgtggaactcatcccgatctatctttatgtcgtctagggcctagatttttcgctaactgcaccgaagctagaggtaacgtcgtgtggcagcaaaagaacagtagcatcgacaactgttgccaattagcggcaacatgcaaagcgcatttgcatttgcattgaacctggagctctctattttgcgattctgcctgctggcgacgacaccggagccaccgatggcaccaacaaccgagctggaaaacgtaatcagttcaagtcgcggcacggcattagggttcagttatcgggggcaggtataggtatcctaattgagtccttcaaatataatgtacggcaataaacccaggatttttgcatacctggtaaaccgggaaatcgcgaggaaaccaacatcgcatcgaaccatatacctgagtggctttaaagtcgcccgcacacgcactgattgcatcatttggcctcaaaccagtgaggagaacgtttcgatttgcatagtatatacaagaggaaaatgtcagactattccagctacagcaactgcagtggcaactcccagaggagagagcaatccgtgagctatgccctctacctccaccgtagggagttgggtcgtcccaggcgcaagatgatgcgaatcgctagcaccaagttgcagctgacaaacgagctcatccagctgcagcagcgtcgccaatgggagtcggcctttgaactcgagttcgacgcggaggccagttcccagcagatgagtgccctcgatagggaacgggaatatagggacagattgcgaaccaatatgcagcggcaactcgagaagcagcagaaacgcaagcgaaagtatctcgaggaaatcggcaagctgtagtgctgacaactacgagcataatgcggaaggcaataattaattaattaattgagcaccatattaagtaaattaaagagtaatgataactcttattgacaaactagaaaatcaagattttcaagctataggtttattatttctgactaaggaaagcaggaacgtgaaacagggaactcagaaaaagattttgtgatataaaaagacaacttttaccaacatttacaaatattatttagttttacggcattacagccttatatgaattattatataaatctagcattagaacagaagaatatcgctcaataaaatagttgcataacaattacataaggccttctttactgagactataaaacgaactacaataatttcgaaatgtgccaaaagatttgtgattagctatctatcgtttatcttcgctcgtttgcagaattgattttccttctttctaggccacggactctaagctggccttagccaagccaaaaaagtatcataaattacgaaaaaaaactgcgactttctgtgtgacttccacaactcaagagatcggggctgagacaagcaaaagtgtttgacttttgacactctttcctaggcggttaaggtggcaacgtctgtcaagtgcaggaaaaactgaaaaactacaagcaaataactgctaaacgaatacctggcactgtacaacattttaactagcaaacaccaattgaatgctaattgaacttctgtcaaaaaaatgttattgtatcgtaaaatacaattgcagttttttttgtgtatagttttacctggaaaataatttggaatttttcgtttcttctaaagtgcaactttctactatgtgttgggtctgcagaatataccccaaactacgcgactacctcgtggaaaagacaagcgccaagaacaggcaaggaaatgcaacagaagccgaccaaaggtgagcgcgcggtaagtttttttcaatttcctgctgccattacgccgcgcgtcg

SEQ ID NO: 32336 - DNA, 354 bp, DROSOPHILA
atgtcagactattccagctacagcaactgcagtggcaactcccagaggagagagcaatccgtgagctatgccctctacctccaccgtagggagttgggtcgtcccaggcgcaagatgatgcgaatcgctagcaccaagttgcagctgacaaacgagctcatccagctgcagcagcgtcgccaatgggagtcggcctttgaactcgagttcgacgcggaggccagttcccagcagatgagtgccctcgatagggaacgggaatatagggacagattgcgaaccaatatgcagcggcaactcgagaagcagcagaaacgcaagcgaaagtatctcgaggaaatcggcaagctgtag

SEQ ID NO: 32337 - protein, 117 aa, DROSOPHILA
MSDYSSYSNCSGNSQRREQSVSYALYLHRRELGRPRRKMMRIASTKLQLTNELIQLQQRRQWESAFELEFDAEASSQQMSALDREREYRDRLRTNMQRQLEKQQKRKRKYLEEIGKL

SEQ ID NO: 32338 - DNA, 2417 bp, DROSOPHILA
gttcataaataaatatttaacacgcagtccttcacaagtgggttggttgtcgggcacaaaaaaaaaacaggagtaagagtagacgagtgccactttgggattatatttatcacttcatggcaactcattaaatataaatgattttcatttgccgagagttgagagggaatttatttagttgcagtgggattggacttaaaaggcaaactttcgtacaatttgagcgtaatccttaagcaataaaaacaagcatgtgacttcagaaaagttattacatttcatagagtaaattaattttttacaatttattattcgtaaatgaattaaaaaatcaaaatgatatatttcatttaattgttaatgaaacaacatatgaaaatatctttaaacttcataaccactttaacataaatattttaattttaaatatttttgtgggtttttacttaaatttcattcagctgcatttctgctaccttaaattttatttatttcattgataacttttccaccagttatctaatctaagcttaaaacgatttgaacgcaatcctcagacacttagtcaccgttttaatcttttccttatccccatatttattcagcgccagctcaactgaaatatcttaaagcaaaaggtcaagccataaaccatttccaccccagcaaatgccgcgcaaggtgagcactacccacatgtgtgcaaggaagatgtacagtatctttggcctgagatgtcaacttggcaagggatcaaaaaagggaggaaggatctctggttttaccggagcacttcaggtaattacgcgactcgtacaagtcagcaggtcagtcggcgggtcaacaggtagctaagcgccccagatataaataatcctggtaaaccacgtagggacatcattcacagctcaagctgccaagcagtcacagcttgtcctgtcgcagccagcattttgaagtctatacaaaaaaaaacaacaaaggagctattctatctgaaatggaagcccaacgtaacaacgccaaccaccgacgcggagctcgtccgagcgtgggctatctactttttcagtaccagagcgagctgacccgccgtcatgcggaacccacgcggctgtcccgcaccaagattcacataatcgatggactggtgtcccgcaccatccgccacatgaagcactgcagcatggaggatctgagggcctgcaagagggagctcgtctacaaggagcagctgcgcgatcagctcaagaacatgcgacgcaaacgctcctcctccgtcaacaaagtcgatgctagtgccaacacatccgcccccgttgtgagtgtcaaggcgccatgcactccaccgaaacctcgatcctccacaggagagttctccaagatggacatcttcggaccggagatcttcgtttaagtttaacttaatctattgcaattttaaatttactagtttccttaattgttgacgattaaaaatcattgaacatgaagatttcttaagaaaattattcaataaataaatatataaaagcaaaatgccaaatgttttattatttacttaatatgttttccaatggctattaacaatgcatttaaatatgtaaattgctaaatttgaactaagcccgacgaattcactattaaaaggcaataatctgcgaaaattcgaaaaaaaaaaccaaaattacaacaacaaatgtggcaattacacaaaaatgtcaattgtccgcggatttgttgtaggagtggaaattcctgttctgtaagcctgtttttggctctgtttttgctagctagccagggctaaaatgtgtgccgcaaaatgccaggcccgaactctggggctcaagagtcaagagttcccacggagcgaggcagcatcgatccattgaaaattggccaccactcaccgatctgtgatagatgcgtccgaccgagagagccaagaaaaacagaaaaccaggcagcagacgggccaagaatgcggtttaaagttcaatcgtgcagcaagtgttatttaggggttcgcagtgaggcaggaatatcgatctattcggcggtgaaaaacgtgagatgcgatgatctaaccgaagctttcttagccagccaaaacagaagcagaagttatgaacctgcgaccgaagacaactgatatgcaaatcgtcagcgggagaaatgtatactaatgaatatattaaccaaatcaagttctaagcagttcagatgttttcacaatttacctcattagctttatgctcattgggggggataatatctatagtttgttggcattatattattttctcgtttattagaatgcatttgccttacctttttgggtttcttcggggcccaaattaaacgttgaaatattccacttgctgtacaaatttgttgctttctatttgcatatc

SEQ ID NO: 32339 - DNA, 417 bp, DROSOPHILA
atggaagcccaacgtaacaacgccaaccaccgacgcggagctcgtccgagcgtgggctatctactttttcagtaccagagcgagctgacccgccgtcatgcggaacccacgcggctgtcccgcaccaagattcacataatcgatggactggtgtcccgcaccatccgccacatgaagcactgcagcatggaggatctgagggcctgcaagagggagctcgtctacaaggagcagctgcgcgatcagctcaagaacatgcgacgcaaacgctcctcctccgtcaacaaagtcgatgctagtgccaacacatccgcccccgttgtgagtgtcaaggcgccatgcactccaccgaaacctcgatcctccacaggagagttctccaagatggacatcttcggaccggagatcttcgtttaa

SEQ ID NO: 32340 - protein, 138 aa, DROSOPHILA
MEAQRNNANHRRGARPSVGYLLFQYQSELTRRHAEPTRLSRTKIHIIDGLVSRTIRHMKHCSMEDLRACKRELVYKEQLRDQLKNMRRKRSSSVNKVDASANTSAPVVSVKAPCTPPKPRSSTGEFSKMDIFGPEIFV

SEQ ID NO: 32341 - DNA, 2300 bp, DROSOPHILA
cgatctatgaactgggcttgttttattacaacatctcggaggagccgtggactcacataaattgaacaatgtcacgaaataaatttgtctagagctcggaaactcggaaattcggacctcggcggagaggaaacccatagagaaacaaaggcaaaactgtttcagccaacgtctgttaacgttggctgatttttatttatttcgctgacttttagcaagttgctaactttttgtttcttctcattttactgctgttgctcccacactcccataaccacccccttcacttgacttaactcaactctttgactttgttgccgctgcctttttgttaatttatgcaacgaaccagttttatttggtttccatcgcgttcgctcagtgtcagccagtctttgtatatctttatagcgccacacatacgtatgcatgggtactctatactatatatatatatatcgaattaaaattttattaaaaaattggcatttggccgtttgccttttgttaattgcatttgcaatttctaattaagttggcggggtaaaaacaaaacgtcaagaagataaaacaaaagcagcgatcataaagtttccaactggtttgggtcagcgcttgtcagaggtcttttttcgagcggatctctggtgacttggctttgccgttaatttgtacacagagagaaaatttcgagagatattatgttaacttcttgactggactgaatgccacagttcatacgaaagcctataggtctcaaactaacatgtttcatatttcaatatccacctaatatatatgcaggtttttgttgcagtgtacgcacagttcaatgcaaacgagaagctcttagctgaatcagctaccagtttttttctcccccttggaccattaaaacgaacaagtttcaaaagcgttttcaatgcaaaaaagtcttatcaaaagtatttatttacacaggctatatacaataaatcaaagcgctctgattgattcgacactaatcctgtttcgctgagttgtcttggttctcttggcgctgctgccgcatgccctcctttttcagcttggacacgttgctccgcagtttccgcttgaacagtagctcccggttgaccgccttcaggtcgtccaagctgcacgtcttcagattgcgcaccgtattggatatgagctcgtccgtgatctcgattttggtgcgggaaagccgcagctgccgggcattccgacgggccaactcgacacggtacaggaacagatgataggtgacagtgggcttcagcatcttttcctgctccatggtagttttgtggttagagatgatatattctggatgaaagtaactagttcttttcgcgttgacttcgcgtcgaagagtgatatcctcgaaacccaaaagcggttcttatatatttatctgaaccttcgatcggttacctgttggtaactacctgtgatccaatcggccaggtcaaaacaggtcaagtgccgcttgtctaccctgtaaatatttgtgccaaaatatttcacaacctaatccgttctaatccccattttggatcttaagccctcgctggttgaccagacattattacacattatgccagggaaagggtaggtaaaggtgattccaggattaaataaatgaaatactgcaaagcaactcgcatgaacttgtccaaaacattcaacagaatattctggaacaggatttagaggaagtggcttaaggatctaccagagagggttaacccaaatagtatgcctatcttacgacacgaatagtataagtataacttctcatattttaaatctatgcatgtatagttatttaataattggtacaaatatgtgttaacaagatgcttaaggtaatttattataacaaagaatgttctgtgagctttgtaatagcgcttcccatcgcttttcccatgcattccgacaaattcctagtataactcccaagaagttgtgtttcgctgtttgttcgttgcattttacccaaagtagacctttcaccggccaccgttccacggaattcttggggaacctcaatgaaccgccagcgtagaagctctgagcactaaaaaccatttccacgtaagacagcaaacagaattttctgactcagcacctgagtgacatcaacgtaaagtacgtcaatttacacatgtgtcgtagaggaaggagcgtatgtaaatggaaatcattagcataactgcagttcccgaaagaccagggagtttttgcaacagacttaactacttccaggtaattcataactaaagtggatgctc

SEQ ID NO: 32342 - DNA, 300 bp, DROSOPHILA
atggagcaggaaaagatgctgaagcccactgtcacctatcatctgttcctgtaccgtgtcgagttggcccgtcggaatgcccggcagctgcggctttcccgcaccaaaatcgagatcacggacgagctcatatccaatacggtgcgcaatctgaagacgtgcagcttggacgacctgaaggcggtcaaccgggagctactgttcaagcggaaactgcggagcaacgtgtccaagctgaaaaaggagggcatgcggcagcagcgccaagagaaccaagacaactcagcgaaacaggattag

SEQ ID NO: 32343 - protein, 99 aa, DROSOPHILA
MEQEKMLKPTVTYHLFLYRVELARRNARQLRLSRTKIEITDELISNTVRNLKTCSLDDLKAVNRELLFKRKLRSNVSKLKKEGMRQQRQENQDNSAKQD

SEQ ID NO: 32344 - DNA, 2267 bp, DROSOPHILA
cgactatcaaaatgtcagacatctgtcatttaatttaatttgacttcactttgctttcatttgcccacccccttttttcgcccagccttgtgcgctttcttttttgccaaagtctccttcggaacgtatatagaagtatatatacatacatatatatttatgcaaagctataaggcgaaggggcgtcgatgttgggaacaaaacgtgtaatttagcgggtggtgtttttggtgggggtgggcggggttaaagggtattgcctcaggctgctgttattacatagttgttgtactagttgtttttgttgcaatttttctattgttgttgttgttgttgttgttcttggtgtgcaacgtacgcgagctcaatttaaatcgctttgcgtttgctgtgaaaacggtaaaaagcgaggcggaaatggcagaagggcgggaaaagtgcgaaaagtttcgcggaaaatgcatcgatcaatgaatacccttaatggggttagtaaaatattgcaagagtttaaataaattgctgagtggttgctcgaaatagtgagtgattgaattaaggaaattctaccgggagcttattgctatcggaatgttgataaatggcatgcactttcaataaaattggaaaggaatataggttaaatactgattgaatcaacaattcaatagaaagtcaaataaaattgaaggtaaatgcttgcgtctttgataagcaattaaataaattgttaagtatttcttgtcacaagcactcataaagcccaaatcataaatagagcttatacttttctcaaaatccaatccaaccaaacctccccacttgtacaccccaaattttgagagggcatctccaaagacaactttactcgatttgcataggaaattttatttctttgagctaaaactaacttaactacggaagagcacacatcatttgcgctaaactaaaactaattaaagtggcaacccccaggcaagtcgaaatatcctttttcgactcaaccccttctctccttctgcttggcaatcgctttcaactgcttgctgcggtgcttgagtttctgctggagctgccgtttgaactgggtctccctgttgaggatctgcagatcctcgggcgagcagttggctaggcgttgcctttgctcggctataagctccttggtcaacaggatcttggtcttggacaccttgacgtagagcatttggcgacgccgcagctcctggcggtgcaaaaataaagcgtaggcgactgatgcttccatgctggcggcttactggcgaatgagtgtcaggtcggagtttgtcgtggtttttaaaggacctcatcccaaggatccttccgtatgtgcatgcctggtcttgtttatctggcgttttttgcctgtcctgcggtttttctgatttctcgctgccaatccgttgggtcgctgttttacctgtgagccgttttaccggactctctaatcgccttcccgcacaggtaacagatggtttatcggtccaagttttcttttccttcgtgctcgtacgctggtccgttaatgcactttcggccaaaatcctccgcatatggccggcaggcagtgggtttccttgcgggtccttcagcaaaattaggtaaacttttgctattcgccaagcccctcgaaaagcgagggatttgcggggtggcacatggacacattcggcaaacttcttggtcatgcagcttcgcaggcaaaatccaatgcaatgtttgggccatccatctaaaggacagtgcagctcgcctggacccaacgaacgacaggatggcacgcacgtcctggaaaggccggcatatgcatcaataatttttgcgagcatgcgaatgcactgcggaaaaaaccatacttcgtatgaataagtctgtgaaatatataaagatattataagttcagaaaacggatataagtcaagttaccaaagtaataaaaatgattttcggagttttaatgaacttggtaaacatcttttgattttatccttgcaaccttacatcttttttcccactctttttctctgtgttgacccgggctaagatccgtcctcggatcccagaacacccgatccgtaaacggacccgtgtctaatgccacaccaacactttgaggtttattaattcgcatgaacttcgtccggctgctcgaccctgcaactcatttttcatgctgcccgggcaacgaaagccacaattaaaaattgcttatgaacggaaatggcagacaaaaaaagggaaaataa

SEQ ID NO: 32345 - DNA, 267 bp, DROSOPHILA
atggaagcatcagtcgcctacgctttatttttgcaccgccaggagctgcggcgtcgccaaatgctctacgtcaaggtgtccaagaccaagatcctgttgaccaaggagcttatagccgagcaaaggcaacgcctagccaactgctcgcccgaggatctgcagatcctcaacagggagacccagttcaaacggcagctccagcagaaactcaagcaccgcagcaagcagttgaaagcgattgccaagcagaaggagagaaggggttga

SEQ ID NO: 32346 - protein, 88 aa, DROSOPHILA
MEASVAYALFLHRQELRRRQMLYVKVSKTKILLTKELIAEQRQRLANCSPEDLQILNRETQFKRQLQQKLKHRSKQLKAIAKQKERRG

SEQ ID NO: 32347 - DNA, 2312 bp, DROSOPHILA
tcattttggcctgccgcaaacgcagcacgcacttaactttgccagctaccacaatgctgcggtgaaactcattacgagcttagaatgcaaaaacgaaccccaagcccccacaaaatgcagcagcagcagcagcagcagcaaagcaaaagcaacatgcccaaaaagcacacacatggtggttccagcataaagattttgttctgtttactcaagtttcatataaaacttaatgaaggcaaagaagtcaagctaagctaatgatgtgtaaattaaacgcagaccgcaatttaataaataaataggaaaaggtggatgattagagattaaactttcaaagcacgagaaatatttcaactgatttattgtgctcattaattatttttaacccaagaaaacatgaaatgtttggaattttttaacagtcgatagaatttgaagtgaaatttcgctgcaattaaaattgtattgactgggtaagaagcatattcaatgctttcactctgcttttcaagcacaaaacaatgactttaaaagcgaacaatagaggtaaaacacaatgagcttggctttcgggtgctgcgactcaaatttcactcttgaatgagtccataattctggtaatatttttttttgcaaccttgtctgaaaagggacaatgaaaaattggtgaatttcaattgattgctgcagcatcaaatatgcaaatatcgcataactaacaagtgagctttacgaatttccttcgcgcatgttaattaacaaaaaaaaaaaaaatgaaaaaagtccaataaaatccagcatgaaggtatggcaacgaatggcatgaacaaaactaatcacacagagttttttttaagcggaatgtatctataaagccaagagctgcatgcgaaatattaaaatataactaaaacaccaacccgagatgagagagtcgaaaaaaagtttttaataaaaagcaatacgaaacatttgtgcactttgacagcagcagcatgaaatgcaaaagcagctgccgccgcaacgacaactgtctcaacgtggagttggaatccagcagcagacgagctccaagcgaaggaagccagtaggaagtggtggagccggaggtgcaactgtagttggaccggccacagtgcggcgacaagtttcttgggggccgccaatcgtggccgaaacggatgtggatttggccaacaacagcagcggcaatggcaacggcaatgggaatggaaatggaaatcgcaaagcgggcggcaaacaaaatggataccatggcgtcaatagacgggccaccaccaccaggaattgaagcttgcaaactgtcgcaaaaaacttgtcacagcgagacgaatgccaaaatggctccggaaaatatgtataaaagcataaatatttaggcgaattgatggcaagaaaacaaaaaatacgtacaaaaataaacatggcacaaagacagcaaacgagagagcgagaaaaacaaaagcaatttgtataaataaaagcgagtcaaaagtgacagagacagagacaaagccaaaacaaatattataaattgaaaagagccaagtccttggattgctgtgtataaagaaaactgtctgcccatcgaatttgaatattcctcaaaaaaatacagaatggcatcaactttttgcatcaaatgttgattcgaaactggcaaagaatttaagactttgacttaaaataaatttgaacaaagacaaaaggatttcgtactatagaaaaacgaactatttccagaattaaatctaataaatctaagaaagctttggaatcttttgtaattgttaatatgctcatttgtttaggagttattttgtaactttggtgtagttaatatcaagcgcacacttagccataaccacttcaaactcataaacttacatgtaaattacctttaaataccttttagatttaagcacaaaattacctttgctgcaacgcaaagttgcctccattaagttttaagaagtgcacaactttttgttttcggtttttgtaaattccattctgtactgtgtgatatacgaatgtaataaaagttcttcggccaggaaatgagaacacaactttaacttctttcatattaaacgatgagaaattacgcaaaatgactcgcccatacatcaattcatttaaatgcgcttattaaaaaactttcgcacagcaaaaatgctgacagcgacaacaacaacaaaatataaaggaggaggacgtcgtcgagattgatacaacaacaaggactcatggagtcggaaaagatggaaaaagtgaagcacacataatgg

SEQ ID NO: 32348 - DNA, 312 bp, DROSOPHILA
atgcaaaagcagctgccgccgcaacgacaactgtctcaacgtggagttggaatccagcagcagacgagctccaagcgaaggaagccagtaggaagtggtggagccggaggtgcaactgtagttggaccggccacagtgcggcgacaagtttcttgggggccgccaatcgtggccgaaacggatgtggatttggccaacaacagcagcggcaatggcaacggcaatgggaatggaaatggaaatcgcaaagcgggcggcaaacaaaatggataccatggcgtcaatagacgggccaccaccaccaggaattga

SEQ ID NO: 32349 - protein, 103 aa, DROSOPHILA
MQKQLPPQRQLSQRGVGIQQQTSSKRRKPVGSGGAGGATVVGPATVRRQVSWGPPIVAETDVDLANNSSGNGNGNGNGNGNRKAGGKQNGYHGVNRRATTTRN

SEQ ID NO: 32350 - DNA, 2354 bp, DROSOPHILA
aatgcgatggaataagcagtagctgcctcatcaaaagtggcaacaacatcaacagcaggcaagtcaatgtaatgagtttatatcgtccttttggcccgaagcataaaatttatgaaaaagcaacattgcggaggcacagtggaataaatcggttgcaattatctaaatcagttaccagatgtggcaggctactctggcttgaagaagttatagaattggctttaaccactttgaaaatgtttaatatatgcatatagcatagtttaaatgggatatatttacaagcatttcgttcaaaaaaaaatccattccgctccactgtccactgcgatgaataataaaaagaagttgcggttctggccggcgatcaaagtcaaatatttggtttggatgtttacaaattgggtcagctggtcatttggcctggcctccagccgcaccacgtctggtattcactcccttcgctgtgaattttccagaaataaaggccgtggatctcagctgtcgcatcattatgacgctaattgccaggacatgccggccaaaggattagcaacacgtaaaccgagtagcatagcattcgatgagaccgcaaaaaccaggacgagatagagcatgagagaactccatgaagagtcgctagactcataaacattttagttagacttaatccggttatacacacatatatccagattagcgaccatgagtgcaacgaaggtgtattttttttcgctactcccgagaactttacgacactttttaggtaatgaatgggattacattttttttaatccaccaccacccgctggctgtaaaaaaattaatgccaaaaaaaaaaaaaaaacagcgcattcaggtcagttttcggtctgggaaaccgattgacctgcggccaatgggtcttatgaatgggcaggtcaggaaaaagattgcatataaaataagccgaccactctgatgcaaccagcaaacggagtcaagcaaccgcacagtcaagatgtgtctcatagagcaaaacaaggaagttaaggttaactccaaggagaatccttcccagaactcaccaccaaagtcaccaaccgccgcatacgcaatgtttttgcaccgcgaagagctgagaaggagaaaacttcatgtctctcgggtttcagttaccaaaattcacctaaccagcgaactaatcgctcaaaccaagcagaatatacggcagtgtagcttcgaggatctggagattctggccagggagacgctattcaagaagaatctgcaaagaaatctttactatcgacgcatgcacatacatcaactgatgataagcaaaaagaagcagcaggccaaggacaagaagtgaaaattaaaaaagttatttagtataagaacagcaaaagtgatttttacaattataaatattataaacttatattaagacaataaaacatttcgcaaaattgcaaatgccttaataaaggataaatgtttctaaagaaacattttaacaatgctctattcacccgaacatcctttgaattcataaatatattgctttccactttaagtaaacgacctcaaccattacaatcaagaatatctgagatcctgtcaaaaagatagagtttaacccaaactaaaacctaaattaaacttcagtcatttgtaaaagccaaagtgaaggggcaaatccttctcacattcacatcttatctttgctccggcaaaagtgcaattttccatttaaatatttgattatgtatacgtattcgcccagtcgtaattgtcagagagcaaaagtgtcggcgtcgacctgcacttgtaatgggtgtaaaaacaaatttgcacatgattaccaaaaaaaaaaaaaactgcgaacatttaatacaactcaaacaaaatggagagttgcataaatttgaacaggccaaagggggtgtagaaaaattcttgcctttttagactacataaattttaattaaatgtcactcatacgccacgtacgccagccatcgtgtgtgtgtgcgtgtgtgtgcgtgtgagtgtctgcctgcaacggagtggtgttgctgcgttagtgtgagtgctgtgtctgtgagtggtgcgacaaatgaatgcacatgaaagtggcgcacgaattacactttattgaacagcagcaggagccaggatgatgggggtacacaggacgaaggacaatggcgtcgagagtggagctcatctaaagcgaagcgtaaaacaaagcaggacaccaaggagtccgaaaagggtgttcgccgctccgcagctgtgcgtttttcgcaattttccgcaaatttattttctggctgctgccaaatagttgcacaaaaataaactctttt

SEQ ID NO: 32351 - DNA, 354 bp, DROSOPHILA
atgtgtctcatagagcaaaacaaggaagttaaggttaactccaaggagaatccttcccagaactcaccaccaaagtcaccaaccgccgcatacgcaatgtttttgcaccgcgaagagctgagaaggagaaaacttcatgtctctcgggtttcagttaccaaaattcacctaaccagcgaactaatcgctcaaaccaagcagaatatacggcagtgtagcttcgaggatctggagattctggccagggagacgctattcaagaagaatctgcaaagaaatctttactatcgacgcatgcacatacatcaactgatgataagcaaaaagaagcagcaggccaaggacaagaagtga

SEQ ID NO: 32352 - protein, 117 aa, DROSOPHILA
MCLIEQNKEVKVNSKENPSQNSPPKSPTAAYAMFLHREELRRRKLHVSRVSVTKIHLTSELIAQTKQNIRQCSFEDLEILARETLFKKNLQRNLYYRRMHIHQLMISKKKQQAKDKK

SEQ ID NO: 32353 - DNA, 2387 bp, DROSOPHILA
ttgctaacttccttcactgggaggcgacagcgatgcattgacatggccaacacatttgcacttgactgaaacgcgttggccgtctgccttgttgtcgattttcggctgatgctggcgatgccacgccccttgagaataggaaaatagggggggctgccatagaaagtcccgtgaagtgactggcgggtttcgtgttaccaagacaccattcgggctcctgacgtggcgccttttgttggccggagccttggggtcgggcttatggggcagcaaaatggattttcgacggtttccgccatacggaatgcaatacaggagatgcacacacaaggcgtgcacttagagaaaagggaatattcaaatgattattaaaatacatttttagttgcttaatagacagcttgattaaagaagttacctctataaatgtgctttataactctactcttacattaaagcaacttttatttcgtgatttatactaattaattgtgtacgaacgcatctttgcctcttattttgcatatcaagtcgaaataaaaaataaaatcataaatcatatagtcccttagatgttctatgtgcacaccttcatgtcagtttagtgcatttattaacaacacaaagtgccaaatcacgacagttgccaaaatctcgtaaaagacaaaaaaaaactgaaataaacttttgccagctgaaaatgcagcttgaataaccgtcatccccccccctcgctatccactctgtctatctttcaaagcctttaaataattataaaactttatctcttctctggacacacgcaaacatgaacccctacactatcgtccatgtccattgaacgtcactttgactaaagccaaatagaattaaaccctgaaaaatatttgatctaaattcctgaattcccaccccgccgccaccgccaccgcccaccgttttttccggacacgccacacaccaaatccagcatcccatccaacctcctgatgccattttcatgcccaatctcccccagaaagcgcagcagcggcagccgcaggaacacaaatcccgccacaaagcgaccgatgacacagaggctccaaagcagcagcagcagcagcagcagcagcagcagtcctttgatgtagccacaaatgccaatgggtcctctctgccagcgagtcgggtgaaaaatccggaggagccgggaggaaaatccccattggtgccgatgcgacagcatcactcgaaagtgacgcgcccacccccgccgccgacgcttttcctggaaaactcactgctgcagcgccagttcgcgaatccaattagttacttgggtggaccgcgtctgcagccgcgcagtaatcgcaccagcatcgactcgatattatcgctggattagcaccgcagccagtttccagttctccgcccactgcaatccgtggaaaacctcgccgactagtcacaaactgtcaactggtgggcgggaaaacccccagtggatccttttctcccccccaaatgccacaatctcctcaacttagaaactcaaagttaaaatcttaaaaattgttagctagtcctagttaaaatacaaataaattgttacaaattatcgtttagtttgttactaagaaacctaaatgtggaaacgtaagtattttgctaaaaatgggaaatcgaatacttccaaaagaaaatatttaaaagatagcagctcaattaattttccattaaaattaaaatcaataaatgtataaatatttttatttgattaaattagtttctgcgttattcgccacattggatcgcttgtaagtatgcattcactttttgcttagctatacactttcgatcttaaaataaattgtgtttccgcccactgattactgatttatccccctttgggaatattcccactgaaaaaaaggagccgatcgcagtgggaccttgtgtaggggcgtgtagaaaaagccctggacatggctacggggcgtgttggtgaaggggggcgcgggaatgagacgacactaggtgaaatccggtggcttgtacttcggcggtcgcttaattggcttctataaccaattgcggccgccacgtcaaatgttgttctccttggcgcccttggccccggcaccggaacctgatcccgaaccggatccggcattagctgtcgctccggcatcattatcgctcttgttgttactgttgttgttgctattggtattagacgccgtcgattcctcgccatcagctccgtcgcctgaaaacagcataatggtttagttagtagggtttaaatacaaattacaagtggtcagtagaaccaattaaaatgactaatggttaatcactcacccttttccttttcgtccttgatctcgctggacgtctctgag

SEQ ID NO: 32354 - DNA, 387 bp, DROSOPHILA
atgcccaatctcccccagaaagcgcagcagcggcagccgcaggaacacaaatcccgccacaaagcgaccgatgacacagaggctccaaagcagcagcagcagcagcagcagcagcagcagtcctttgatgtagccacaaatgccaatgggtcctctctgccagcgagtcgggtgaaaaatccggaggagccgggaggaaaatccccattggtgccgatgcgacagcatcactcgaaagtgacgcgcccacccccgccgccgacgcttttcctggaaaactcactgctgcagcgccagttcgcgaatccaattagttacttgggtggaccgcgtctgcagccgcgcagtaatcgcaccagcatcgactcgatattatcgctggattag

SEQ ID NO: 32355 - protein, 128 aa, DROSOPHILA
MPNLPQKAQQRQPQEHKSRHKATDDTEAPKQQQQQQQQQQSFDVATNANGSSLPASRVKNPEEPGGKSPLVPMRQHHSKVTRPPPPPTLFLENSLLQRQFANPISYLGGPRLQPRSNRTSIDSILSLD

SEQ ID NO: 32356 - DNA, 3337 bp, DROSOPHILA
aaaagcgacgctggaaaaaggaaaactttgatgggcgaatcctagggcctggtctaagccaacaagctgccaaacattctgggcaattcctcaccaccttcaaactcttcgcatcgcatcgcaccgcagcaaacttttattgaaattgatttcagaataattgcgatttgaatgtgccactggcacaggagtgccaagagttttgcgccgagatgaaaggatttcaggatctgaggatttatttgtaacgcctaaggctggtgaccgcaaacctaatagatttatagccaaattgctttagtcaaaatgataaaatgatgaaggaagagccggaaaaaatgtggcactgaaattgtaattaggtgaatggggacttctggccttaattgcatcaccttaagccaggttttaagcgggtcttaattgaatttgcacacagttaccaaggcttggcttttagccaaaggttttttttaaatttagaatataattttaataatatatttagttgttgctccagtgatagggtgaaaatcaatgatctcttatttaaagaattaaaaataaaagacttgatgtagataaccttattcgtttcatgaggaatgtatctcaaatacctttaaatagctaatttaattatcaattgtcaattatctttagaaccagtcgttttttccattagttaccttccacccactgacacttttaatcaataaaccccgaattcaatattttatcaagtcaccacttttgttaccgacaaacgaaagctgataattattcgagtgctgctcggttaaaaagcacttatttggcctccttttcgactgcgggttgtttggtttctgttattccattcgtgttgaccccaacaaacacagaaaaaagagctgaatttaccttaatgtacaatctcggagaacaatgtgtggtcataattttttaatgaccagccaacggctgtccagctgctcgccgttatccaccaccaccccctttaagccgcccagctcgctccgcccaccgctcccacgccccctccctcgcaccacatcaacgcatacgtcagagcgccagcccctggcaaaaagctttgctcgggaaataggtcagcttgatgtttctgctgttcatgatgatgttgctgctgctgttgtggtgttgctgctgctgctgctggaggttctggcgtaagttaaagcaatttctgattgaattttgcatttcaaatgctggagagaccgaactctttttcccgggcctaatgaagcgattagcatgcatgtgaaatgtcttcatcgggctatatatacgagatagacacgtatgtacagtgtacgcctaacctgattaagcacagatacacaaaaataagaggaaacgattgatacaaaaatccgaattgtgatttgtggcgtctctaatcaaattttgatgtggcaaatgcaaatgcaaaagcgaattgggtgggtctttggagaccgagcaacaagtttagccaggcggctacagtgcacactctctaaaagagccacctgcaacatcagctcacctcttcgcgcctcggctcgatggatggcctgctgctgttgcgattgctgcattagggcatgatggctgtgtggcagttgctgctgcggctgctgcatctgctgctgctgctgtggttgctgcatcatctgctgctgctgctgctgctgctgttggtggtgttcgcgttcccttaactgtggttgctgcaactgcgtcagtggttgctgctgctgttgttgctgtggctgctgttggtgcaactgtatggaggcagtcactggcagtggtgatgaggccacattattggactgatggtggtgcaggtggtggtcccgttccctgtcccgatcacgatcccgttcctccgactgactccccgccggggcgggtggcgcaaatgtgctggtgctggccgtcagacggggaggctgatggtggtgcgactgctgctgttggcggtgcagctggtggtcccgatgctccatgtccatcatcgaatcgggcatcaagccgcgctcgcaaaacgaagccagtgcggcggctgttcctggctgctcctggtcaatcagagtggcgtctttagtccgttaagtcttgtcctagtcctagtcctgcatcctggcactagctctgttcttttcttcaacgcacacgcacacactctcacactagcacagccactactgcgggctcacacacacactaggctgagctagttttctcagcactgtgtccatttcccttcggtggttcgggctctcctggttgagctgctgttgttagtgctgctgctgcctcgttcggaatccaactgaaagtgcgccagcagccagcatccttttatatcctcgcagcacatatccctgccgagccaaagctcgctcactctcaactttgttatcagccagcgaccaggatcaaagagctttttcgccgctctccctgctgcagattgcaggtggtgcagcatcaacgccagccagccaaagtagagattcaactttcacctttttcccaacttgcactgaccttgcgcactccccgaaacattggtcccggcttgaacttcaggaacaaagctttcttctctcttcccaagctttcgagtcctggctggggaaatgcgcaacagagatggaacgatgccatttagtacccccccccctccacacagcgaggaagagagagagagagagtgtgtactaaaacaggacattcccctacctcaaaaaaaaaaaacaaaaggcagagaaaccgaactcgtgtgtgtgtacaggtgacaaacctaatttatgacaccttcgacatacacacacaaccacctgcttcgccactcgcatccattgtagtcagacaagagtgctctgtaccttctgtgtttgttaactggcatggaatgatatgtgcgagcatgagcaccgggtccggtgccagtgccacaccatcatcctggccagaaaaaaacacatcctgacaccgcctgccacgcttcactgcgaatttctaatgaacccacctccgaacccaaagcctgtcgaactgtcgaatattttaggtcacctgcagctcctgagctttgcttttgagctgtcaattaccgtttacgcttcattaagcgccaaaaggggggtgtcgcgggggtattattgctggtggcgctgcacatagagaaaatgtcaatcttcagctttgaaatagcatcccatcccataactctcgcaaatcaatttatgaatcgacttgcacagttgtcttcttgtaaaaagttgtcttcgctgcttggcctaaaagtttgtgaaag

SEQ ID NO: 32357 - DNA, 970 bp, DROSOPHILA
aacgaggcagcagcagcactaacaacagcagctcaaccaggagagcccgaaccaccgaagggaaatggacacagtgctgagaaaactagctcagcctagtgtgtgtgtgagcccgcagtagtggctgtgctagtgtgagagtgtgtgcgtgtgcgttgaagaaaagaacagagctagtgccaggatgcaggactaggactaggacaagacttaacggactaaagacgccactctgattgaccaggagcagccaggaacagccgccgcactggcttcgttttgcgagcgcggcttgatgcccgattcgatgatggacatggagcatcgggaccaccagctgcaccgccaacagcagcagtcgcaccaccatcagcctccccgtctgacggccagcaccagcacatttgcgccacccgccccggcggggagtcagtcggaggaacgggatcgtgatcgggacagggaacgggaccaccacctgcaccaccatcagtccaataatgtggcctcatcaccactgccagtgactgcctccatacagttgcaccaacagcagccacagcaacaacagcagcagcaaccactgacgcagttgcagcaaccacagttaagggaacgcgaacaccaccaacagcagcagcagcagcagcagcagatgatgcagcaaccacagcagcagcagcagatgcagcagccgcagcagcaactgccacacagccatcatgccctaatgcagcaatcgcaacagcagcaggccatccatcgagccgaggcgcgaagagaacctccagcagcagcagcagcaacaccacaacagcagcagcaacatcatcatgaacagcagaaacatcaagctgacctatttcccgagcaaagctttttgccaggggctggcgctctgacgtatgcgttgatgtggtgcgagggagggggcgtgggagcggtgggcggagcgagctgggcggcttaa

SEQ ID NO: 32358 - protein, 224 aa, DROSOPHILA
MPDSMMDMEHRDHQLHRQQQQSHHHQPPRLTASTSTFAPPAPAGSQSEERDRDRDRERDHHLHHHQSNNVASSPLPVTASIQLHQQQPQQQQQQQPLTQLQQPQLREREHHQQQQQQQQQMMQQPQQQQQMQQPQQQLPHSHHALMQQSQQQQAIHRAEARREPPAAAAATPQQQQQHHHEQQKHQADLFPEQSFLPGAGALTYALMWCEGGGVGAVGGASWAA

SEQ ID NO: 32359 - DNA, 2279 bp, DROSOPHILA
gagtggcttacgcaaaaccagaaggataaaggattgaggggcatgggtgcgactgtcgtggctgcaaacagccaaaagctgataacgtgaccaacttggaaatcaattaaagtgcagcagggaccgactggcgatgcggattctctggtctgtggtcgagtgtcctgggcacacggggtgtttgctccctggctggtaaaacttaattatggcgtccggatgtggagctccagggaagcggaagtgtgtgtgtgcctgcatatgtgccacgcccacacactgctctcatccgcccaccccatcctccgtgtccactgcactccactccacttcactcccatttccccttgacgctgtgcggaacacgcctcggcaatttttcgaacatatttctgctgagttacacccacttctcaatggatttccctttttccggaaaaatgtcgccacagcatttcaaggatttaattaaaagcccagcaacttaaaggtgcgcctcacagaggattataaattatagttggaattatggagctgcgtctaggataattatgctggaggaagtcataaatttcgttccagcaaggtgaacacggcgcttgagaagggggaaatatcaagatgaaactaagtaatcactttttgaacgatctttactggggaaaatttaaaatagttcgaaagcaactaatagtaatttgattgtgctcagaactttttgcataaattattcatttacgctctcataaaataatttttatgtggcttcatgaaaagtaaacaaattccatattcagaatatgtttctaaaatgtattgtttcaaactatatctctagagcatagtacattttttccaattattcagattaaagtagccattgttcagtcgagccttgaaacttttaacaggatatttcccgaaggacatttgacattgttttccttgtgcccgatcagaaaaagatatgggccataaatctgttgaatttgctgattattcagccccgatggtgcttaccccgatcgaaaccgaatccggtggtggatcccgaggcggtggtgtcgagtgccacacggcggggcgagacgctcgtctcccgctggctactatggttgctgcccagcatggtttgcctgccggtggagcgcggtgtttggttcaagtggttctggtggtgcagtgcccactggttctggtgctggtggtgctgattgtgctggctgtgttggtgctgtggtgcaggtcgaccgtgccgctgaggtggtggctgttgcatgctggtggcagtcacttgccacaggctgtccgtgcggtccgatattttgatgctttgcaaaagacctttgttgattgaaattgaagtttctgccacttgctaattgccacacacacacacacacaaacagagaaactgctcgtccaacttttggttgagtttgccaccgctttcgtttatttaatttcccctttaagcagcacgcagcactcaaccaagaactctgttaaaaagttttcgggcacaaagtttccgagcggctggttggcccgtttccagaacctgggctcttgcccacagtttcctcacttaaattaggacgaccacaaaggaaaagccacaacatcaacaaagtgcggtgcagcaactgcgattgtcaagtgagccgtacgtaagatggcgttcctgctgctgagactcatcgcggttagtagtccgtgatccttaatccagagtttttaatacgctatccttaatccgtagtccaccaaccggaacacgagcacgaagcactgagaatcgaacacggaaacacggaaaactaatttaataacaacacaattcctgggggcatgcaacgtgctggctgtccgctatccgctattcgtttgccacaagtccgttacagtttatagaccaaagcgaactgaacgagggttttaaaattatttacgtatttatcgagtatattttgctgcccccttttgcttgcgcttagacaacaattgatggcggtcaagagtgggtcgcaatttatgctaattgccattgacagtggacaagttaatagctcacaaactactgttcgccgttctccactttccgcttacgttttcagctcaaggatgcaggatgtggactgccggatgccagatgtcagatggaacggagaccattcgctttggtgcagcgcatcctttgttggtgacaacctcgaactagtttacatgcaacatagaagcagccccgaaatatatattacaataaatgcactcggaaa

SEQ ID NO: 32360 - DNA, 279 bp, DROSOPHILA
atgcaacagccaccacctcagcggcacggtcgacctgcaccacagcaccaacacagccagcacaatcagcaccaccagcaccagaaccagtgggcactgcaccaccagaaccacttgaaccaaacaccgcgctccaccggcaggcaaaccatgctgggcagcaaccatagtagccagcgggagacgagcgtctcgccccgccgtgtggcactcgacaccaccgcctcgggatccaccaccggattcggtttcgatcggggtaagcaccatcggggctga

SEQ ID NO: 32361 - protein, 92 aa, DROSOPHILA
MQQPPPQRHGRPAPQHQHSQHNQHHQHQNQWALHHQNHLNQTPRSTGRQTMLGSNHSSQRETSVSPRRVALDTTASGSTTGFGFDRGKHHRG

SEQ ID NO: 32362 - DNA, 3464 bp, DROSOPHILA
tgcatgaccgactactaattacaatgctttgggccaaccaatgtttgtttgcctgtttttctcttaccacccaccgcccactccgccaccaattcagcccgctggctgcgatcagtggggtcaatgtcgcaatgggcagtgcccctcttcttttctttaaaggccagaaattcatttgcttacataatgtagaccgatttctctactcttcgctatcgatccactctaatttatcgctcgtcccgccaacacaccaaataataatcataaaaaacccaacacacgctctataaattaaataattctttgtcaaagtggccggacaacattctaatcccataaaaaaaacgacgcccaaaaacttcagacttggtagcgaaaaaaaaaaaaaaaacgattgtggaaatgaaaatgttccaagaatccccgcaaaactattacgtagatcagaaaccaaaacaagtattatctgaatgagagatccgacagatctacatatttcccgtgtaagagaggtcaggtcagattttcttccgcttcatctgagccactcaatttccatgtacctgcctaattgccgaaaatcttctcacaactttgcatgtctggcggggtcagggcttgggacaatgcgtttcgcacgtttggcagcttggattcaagctcggggctaattgccagctagggcttatctaaattgccgcattagccaagaacttgtgacttgagagttgggagttgttgtaattagcggagctaaatgcttggttggccaccaagaatccgccagagatgtagctttggaggagttgaggcgaagagttgcagggttaataagttaactacttgttaataacttaataattatataagttgcatttaattaaaactaacgtaaatgccatttagaaattttcatttctaactccgttgcagtaataatactttattctttgtaaataaataagtaacaactagcttaaaactttaagagcaatgtctactccaagtccaatgtggacacactttgattttgattgggcatgtcggggaatcgatgaaatagggacgacgagggtttagtttgactatccagtcgggtctcaaagatccctccctctgagtttatcaagtaccaactgggcgttggcgtagctcgctgcagctcctccttgttgagaccactaatgggagccacagtgggtagctttttggccaaatcatccagctgcttgagataaacgtccaaggtgcgatagtccgtattgttggccacctcgtcaggtgcaataaaccttggtcccgccaactgatcgtgctcctgccacaagttgcgtatatttgtcattacatccgcatagagtatggagtcatcgttgcggccccagttgctattgcggttgttatttggcgatttggatttggatttgcgtgaattcaccaggcgactggccagcggagttgcggaagtttccgcaagtgaattggcacttgaaaacactgatttgccagtggttgttgttgtcgtcgttgtcgccttggttgttgctgctgttgtggttgttgcctctttattccggaagttgcgccgcctctcctttaatttttcccgctctgctgacttgtcgtgctgtttgaaaagtctttggcgacgtcgccgattgtcgcagttggttgcattgctgcaaattgatgacctcttcacctcattggtgacgccctcgtcgggtagatattgtgttgcatttttcagtagatccccaatgtgggccaccaacttcaggcccttttgtacatcataaggttcctttgactttacaggcacatcccttcggtttcttttacttctcttaagctcctgattgcgacttaacagtgcttttagtctttgctgctggcttcgatggtaaagttgctgttccagggccttttgagctatcaacgtgtgactttgtcgctggatatgtcgttgtcttaccagcggaaactttgccttttgtctttgccgctgcaatagacgctctgttttccgcacagaggccaagatttccacgggtatttgtagctgattaggaccattttgaatctgggtttcttgcgtgaggaggtctccttgtggcatgattttcaacctattggtggccaatttccgtggttgctcccaaaccacaggtggattggaaggttgccgttgacgcagacgtttcagctgctgaaagtgctgaggaggctcaataatcctgatcacatctcccgcatcatcatcgacgtaaccaggacgtatgtcctgcaaatgcggtggaaccctgttctccggtttcttgtgctcgggcttcgatactctataaagaggaggacttggagtgctactggaatctccttccttgctcccactatccacttttatcgcctggcttagttgtaaatagaagaggagcaaaaagtatgtccttagcacagccattgcacttttactctctctatcccaaggtcgggggaaatgcaacttttcactttcgcgttcgacggccaaccgacaactgtgcagtaagtgtgctatcattgtggctttataacatttcctcgccgtttttccaattttccagtttgatcaccgcgccacgagcctttctttctttctttctttcgtgacgagatagatgtttttgaagtcgtcatcgtcgtcgtcatcggccgtttgttagcttcggccgcaaatgaaagcgaatctggccagccgaagtgacgttgcaagtagctgccagatgcaagttgcaacgttcaacgtccaatgttataactggtcaaagtcggggctcaagccgtgtttcgctttagaaacccactttgcatacgccacaacggtggcttggcacattgcaactttctggttgctgtgcagaaactagtttctgtcttgaattcagttttcgatcgtgtgggtaagtgtttttattttcgcagtctcgaatctcattagtgcccgccacttgaccctcaacttgaacttcgccgaaagccactgatttggtatttgtgtcatttgggcgaaaggcagagcgaacggtgaattaatttatgcactgtccatttaatttgggtgttttaaaaatatggggaataatgcggtctttagatgggaatgatttatgcggactttgatattctatgggaatatctaataggaataaatatattcatgagattttttgtgagtggaaaaaaaatttttgtttctgtttgtaattttaataaattctttgactcttcaaggtacgtaattaattgaatttttaagtaaacttttcattgcaaataattgtatttaaatcttcttccaaacatctacatttgattaagctgcaaactattaaatactacaaatgtctatattagtcacgttttaaattaaaaagcaccataattaacattgaattgtaggactttatttaattgccttgtac

SEQ ID NO: 32363 - DNA, 1464 bp, DROSOPHILA
atggctgtgctaaggacatactttttgctcctcttctatttacaactaagccaggcgataaaagtggatagtgggagcaaggaaggagattccagtagcactccaagtcctcctctttatagagtatcgaagcccgagcacaagaaaccggagaacagggttccaccgcatttgcaggacatacgtcctggttacgtcgatgatgatgcgggagatgtgatcaggattattgagcctcctcagcactttcagcagctgaaacgtctgcgtcaacggcaaccttccaatccacctgtggtttgggagcaaccacggaaattggccaccaataggttgaaaatcatgccacaaggagacctcctcacgcaagaaacccagattcaaaatggtcctaatcagctacaaatacccgtggaaatcttggcctctgtgcggaaaacagagcgtctattgcagcggcaaagacaaaaggcaaagtttccgctggtaagacaacgacatatccagcgacaaagtcacacgttgatagctcaaaaggccctggaacagcaactttaccatcgaagccagcagcaaagactaaaagcactgttaagtcgcaatcaggagcttaagagaagtaaaagaaaccgaagggatgtgcctgtaaagtcaaaggaaccttatgatgtacaaaagggcctgaagttggtggcccacattggggatctactgaaaaatgcaacacaatatctacccgacgagggcgtcaccaatgaggtgaagaggtcatcaatttgcagcaatgcaaccaactgcgacaatcggcgacgtcgccaaagacttttcaaacagcacgacaagtcagcagagcgggaaaaattaaaggagaggcggcgcaacttccggaataaagaggcaacaaccacaacagcagcaacaaccaaggcgacaacgacgacaacaacaaccactggcaaatcagtgttttcaagtgccaattcacttgcggaaacttccgcaactccgctggccagtcgcctggtgaattcacgcaaatccaaatccaaatcgccaaataacaaccgcaatagcaactggggccgcaacgatgactccatactctatgcggatgtaatgacaaatatacgcaacttgtggcaggagcacgatcagttggcgggaccaaggtttattgcacctgacgaggtggccaacaatacggactatcgcaccttggacgtttatctcaagcagctggatgatttggccaaaaagctacccactgtggctcccattagtggtctcaacaaggaggagctgcagcgagctacgccaacgcccagttggtacttgataaactcagagggagggatctttgagacccgactggatagtcaaactaaaccctcgtcgtccctatttcatcgattccccgacatgcccaatcaaaatcaaagtgtgtccacattggacttggagtag

SEQ ID NO: 32364 - protein, 487 aa, DROSOPHILA
MAVLRTYFLLLFYLQLSQAIKVDSGSKEGDSSSTPSPPLYRVSKPEHKKPENRVPPHLQDIRPGYVDDDAGDVIRIIEPPQHFQQLKRLRQRQPSNPPVVWEQPRKLATNRLKIMPQGDLLTQETQIQNGPNQLQIPVEILASVRKTERLLQRQRQKAKFPLVRQRHIQRQSHTLIAQKALEQQLYHRSQQQRLKALLSRNQELKRSKRNRRDVPVKSKEPYDVQKGLKLVAHIGDLLKNATQYLPDEGVTNEVKRSSICSNATNCDNRRRRQRLFKQHDKSAEREKLKERRRNFRNKEATTTTAATTKATTTTTTTTGKSVFSSANSLAETSATPLASRLVNSRKSKSKSPNNNRNSNWGRNDDSILYADVMTNIRNLWQEHDQLAGPRFIAPDEVANNTDYRTLDVYLKQLDDLAKKLPTVAPISGLNKEELQRATPTPSWYLINSEGGIFETRLDSQTKPSSSLFHRFPDMPNQNQSVSTLDLE

SEQ ID NO: 32365 - DNA, 2451 bp, DROSOPHILA
gaaacgttcttgattttgacgtttgtaagccacgaagaaaagtgtcaatgcacagaggtcaaacggagagtttcgtttctcggctaccgattgaccttagatcaactgaataaaatgtatgctaaagtttctctgtgaaatcaaacgattattgtcgcaccatcgccgccgtctgccggccgttaatcttagatgtccattgtccgtcgcttccgtgacctttcggacttgatgtctgacttccaatatccgattgttgcctgtcaaaatccgatcaagacaaatagtcttgggcagcaccgttcggcgagtttattttgagaatctgagacacttggcttacacaatgctcgctcgccttaagagatttatggtattccactcacaaattacgcatacgccgaggggtacaacaggaatcaaataaccgaagattacttgtacttttctgtcgtttgttaccaaacttttacgtctaacgtccgcttaagttcttgccaatttgtacagttaatttgcttctgaaataaaacccctattaattagattaggctaacgatatggagccaatttttgtttagctccatttgaattgcaaattagctgttcgcttcatgaggtttttacgatggcataaaataaagagctaggagtaaaattaaaacaatcaacagtagccatcaagcacgcaggcattaatttgtacaaagtataacatttatttatgtaatatttagttggttgtactcttttttttgtgattttatgctttattgaagcaattatcctcgcccaaggggcagtgcagttaatctgttcgctatccggtcaagaacgcatcgtctggctattgagtctagtgctggctattaatggctattctctgtcggcttctattactaaatgtactattttttctagtgctgatagatgtctggtgctgatagagttctactgaggctgtaaaagtatttatttctggttgggttaagaacccttcctagaagtagtgtccatagtgcccatggtgatgatgcaatccgtagtaacctccatagtatggataacctgcgagtaagtaagttcaaagattatacccgttttgatctttatcaaaattagaacataatcctccatgtcacgaatttcccgaatttccgaacgaaatatttttactctattcttcttataatcttaccaattccgtagtaactgccgctgtaatgtggccaatatccgccgtagtagccacccaagtagggtgacgagtagtatccgtatccaaaggatgcagctccctccagatccttctcctcagcctctacattcgcctcctgatcgccgccctcctcacgaccctcctgtgggcgtggcagggcctcagatccgacaaagaacatggccaaaaggctgagggcgagcagcaggcaaacggttctggcttggaacattttggtgagtatttcggcggattttctttgggcaaacaacaaagtattggaaatggaaatgccactcggggcttacaaaaactgactgactgacgctggaaacgtgcactgtgcttttataatggccaaaaagcgattcttgcaacgccgcattgccatcaatgcgcagcgacaaaacaattgtctaagcgaaaaacggttcccccttcaatttgggcgactccagctgcgtgtgcttctaacaattcaaagaaaaccccctccgaaacatcaatgaattggccaagaggggggttggtgggaggcttctatttcttgcatgaccgactactaattacaatgctttgggccaaccaatgtttgtttgcctgtttttctcttaccacccaccgcccactccgccaccaattcagcccgctggctgcgatcagtggggtcaatgtcgcaatgggcagtgcccctcttcttttctttaaaggccagaaattcatttgcttacataatgtagaccgatttctctactcttcgctatcgatccactctaatttatcgctcgtcccgccaacacaccaaataataatcataaaaaacccaacacacgctctataaattaaataattctttgtcaaagtggccggacaacattctaatcccataaaaaaaacgacgcccaaaaacttcagacttggtagcgaaaaaaaaaaaaaaaacgattgtggaaatgaaaatgttccaagaatccccgcaaaactattacgtagatcagaaaccaaaacaagtattatctgaatgagagatccgacagatctacatatttcccgtgtaagagaggtcaggtcagattttcttccgcttcatctgagccactcaatttccatgtacctgcctaattgccgaaaatcttctcacaactttgcatgtctggcggggtcagggcttgggacaatgcgtttcgcacgtttggcagcttggattcaagctcggggctaattgccagcta

SEQ ID NO: 32366 - DNA, 321 bp, DROSOPHILA
atgttccaagccagaaccgtttgcctgctgctcgccctcagccttttggccatgttctttgtcggatctgaggccctgccacgcccacaggagggtcgtgaggagggcggcgatcaggaggcgaatgtagaggctgaggagaaggatctggagggagctgcatcctttggatacggatactactcgtcaccctacttgggtggctactacggcggatattggccacattacagcggcagttactacggaattggttatccatactatggaggttactacggattgcatcatcaccatgggcactatggacactacttctag

SEQ ID NO: 32367 - protein, 106 aa, DROSOPHILA
MFQARTVCLLLALSLLAMFFVGSEALPRPQEGREEGGDQEANVEAEEKDLEGAASFGYGYYSSPYLGGYYGGYWPHYSGSYYGIGYPYYGGYYGLHHHHGHYGHYF

SEQ ID NO: 32368 - DNA, 4605 bp, DROSOPHILA
ttaatcgactaacaggaaaccccattgacgggagcccccttatttgcctaacaataatattgcataatagaataagaagttttggccactaaagccaatgattatcaggcattaataccgagctgtcgtcaagcggagacgatacagcaactgaaaaaactagttcaaatcgagatgcggaaactcgtttaatgcttcgaaattaattttttgttcagcaagtgcattgtcatctgaagcttcaagttcaaagtcaaccataagaaaattcgaggcatactttttggcctttgtaagatttatatggatgtagtaagcatatagtaagtgtatatttatgtagtaagtccctcgcggcagactacagagttaaaaaaaacccagtgaattatggatctattttgtaaggcagacttattaaaaaatttatcttagtaatataaaaagcctcaatgtatagcattatatccgtatcacagaaagacttttgttattccggctaaaaaatagcaggttgaatgattccaatgctatcgcgttaccgaagtttgagcagaattattaatttcttgttgcccaaatgtactctacttttcggcaagccagcactataaactgcgatgtctaaaagtatgtgattcgaccgaatttttagtttattctagatgggatctgctgtttcactctaagactagacgtcttacccttcgacacactgaaagaaaacagtaagaacataacattcacattgtcatttttaattcggcagcattgcgtaatcgttaaaacataagttttaaaaacatattttaatgactaagttcgattggagattccgcaggcaagatccccggtaaatcattaataatagttattaaataaaatattacagtagactacaattattcaatttcgtacgttcctaaggatcactatgcgcacacagaggcaattgtgtcatttaatcagtgatgagagggccaatcgacggatgagttattcaaaagtcgaatgcgatggccggcttcgggtaggaatagcccgccgacttgggagcgggtgggggaaatggaatgactggcttagggtagtcgtaaccctgcttcacctgagggggtggaaggtacttgggagtgggcgggctggttggcacaacgggtggaatgtacttctgggggggattcgtgggtggggggaatggaatggcgggcttgggatagtcatagccctgcttaacttgaggtggaggaaggtacttggatgtgggaggaggtggaggtggtgcttgtgttgtggtcactggtggcaagtacttctgcggtggggcagtgggtggcgggaatggaatggcgggcttgggatagtcatagccctgcttaacttgaggtggaggaaggtacttggatgtgggaggaggtggaggtggtgcttgtgttgtggtcactggtggcaagtacttctgcggtggggcagtgggtggcgggaatggaatggcgggcttgggatagtcgtaaccctgcttcacctgcaccggaggcaagtactggggcgttggtgggtttgtaggtggcagatattttggtactggtggtgaagtgggaattaccggtggtggcaggtacttttgaggtgggttagtaggtgctgggaatggaatggcgggcttcgggtaatcatagcctgacttaggctgtgggggtggcagatacttcggctgcggtgggtttgttggcttaggaggtggcaagtacttgggctgtggtggagacgtgggcacaacaggtggcaagtatttctgtggtgggtttgttggtggtgggaatggaatggcgggttttgggtaatcatagccggacttaggctgtgggggtggcagatacttgggctgcggtgggtttgttggctttggaggtggcaagtacttcggctgtggtggagtcgtaggcacaacaggcggcagatatttctgtggtgggttagtgggaggtgggaaagggacggcgggttttgggtaatcataaccttgcttcacttgtggtggaggaagatatttgacagtaggtggtggtggaggagctttcgtggtggtaacaggtggcaaatatttttgtggcggagcagttggtggagggaatggaatagcaggcttgggatagtcgtatccctgcttcacctgaggtggcggcaggtacttgggcggtggaggaggtggtgcttgggttgtggtcacaggaggcagatacttttgcggaggagcagtgggtggtgggaatggaatggcgggcttgggatagtcatatccttgcttctttggtggtggtggaatgtaggtaggtgtaggtgggggaacgtattttggcacaggagggctggttggcacaacgggaggcaggtatttctgtggtgggttggtgggtggtgggaatggaattgctggcttaggataatcgtaaccctgcttaacctgagggggtggcaggtacttcttagtcggcggtggtggtggaggtggagcaggagtggtggtcaccggcggaagatacttttgtggcggagcagtaggcggtgggaatggaatggcaggctttggatagtcgtatccctgtttaacttgaggaggtggcgcttgagttgtggttacaggtggcaagtacttttgtgttggaacagctggtggtgggaacggaactgccggcttggggtaatcgtatccttgttttggctggggaaaaggtaccgacggcgtgggataggcgtatccctctgcgaccggtggtgatgtcaccctgatctgtggtggctgcgttggtggcgggaatgggaccactggctttggataagagtacccactgaccagctttggttcctgcggaatgatctgctgcactggtggcgtgtacttcggttgtgctggcgggaagggaacgactggctttgggtaggagtagccactggactccaccactttcgggagtggtggtgggaacggaatggccggctttggatacgaatacccatcggtgaaggacaccttcggaattggatagtcatagccctggaaacgattcaattagttaagtacgcttacattaatcagatatcatcgacttacctgggccgcagtaaagtagctctggcttagggcgatcaaagccaggctaaatacacgaatttgctgcaagaaaaataataagaatacaaatatagttaagtgtcgaaaccattaatgatcttaaatccaagtctttgacatttatatttatatttagccgaagtgactgacaacaactacgtgggcctcgaccgtttatggccattttcagtggcgtcagagcatcgaaaatttccgcatataattaaggtttgaccatttggcaaattgaccattgtcagcttttgacaccatcggtttttggctaagaattcgacactgcgcttacaatccaattaggtcacgttcatcgatgactctatacgcacattaatgattaacaagtcgaaagccaaattaaacgcatttttgtgcgctaattgcccatgcgttgattgattattggcaggggcggtatagaccgggcctacgccaagcccgcatgtggttgcattaaaaaaaaaatatatatatatatataatagaaaaataaaaactggtagctgccgcgagcgatactcagagtcaaggtcgtagcatctgccacattgaccattagtttatcgaaccgatctggaccgcctagaaatgttctaaataccaggcgtgtgtgaataacctcgtggatagtcggacaaaaacactagcacttgatggcaaagtcacgccgaccggttcgataaacccgagtagatgctaaaatcaaattagatggaaatcccaccactcgctccgatttatgtaaatacaaaactagcaatttggcgagcactaattaagccatagataacagactttgagagaggcagtgaaaacctttatctgctgagcaaaacaatctttgaaacccggaattccatttctcaaattaaagcacataaatttgcccaaaataaaactaaaaataaacttaaacggcttctatgagtgcgcttcaagtcagagtcgttaaagactggccattaaaacagaaaccttaattgaatcaagacaatagcatcaaaaaaattcaacaaaaaaaaccatgttatataaaaatggaacaaaagtcgcgtcgaacagcgagatcatctcaatcaaatggaaatagtttaaggcatcccacgcaatgttcttatggatttatgattatgtttttttttttttctctttacctctttgataaattgttatggaaaaatgccacttgtgagatactcaagcggcttgtcagctgtcgggccttaaattctagcggatttgccaatcttctttcaacttgtggcatgaatcacaggcacctcaagaaactagttctaaccgccgtataatttggtttctgttgcgttattagttgacaactcgcgttgatatgtgtatgtccattaaagtcagaacccaattaagttttgggttgaaatatatttttttatggcagtaacgcacacaggtgtcgcataacatgaataatgctc

SEQ ID NO: 32369 - DNA, 2124 bp, DROSOPHILA
atgcaaccacatgcgggcttggccctggctttgatcgccctaagccagagctactttactgcggcccagggctatgactatccaattccgaaggtgtccttcaccgatgggtattcgtatccaaagccggccattccgttcccaccaccactcccgaaagtggtggagtccagtggctactcctacccaaagccagtcgttcccttcccgccagcacaaccgaagtacacgccaccagtgcagcagatcattccgcaggaaccaaagctggtcagtgggtactcttatccaaagccagtggtcccattcccgccaccaacgcagccaccacagatcagggtgacatcaccaccggtcgcagagggatacgcctatcccacgccgtcggtaccttttccccagccaaaacaaggatacgattaccccaagccggcagttccgttcccaccaccagctgttccaacacaaaagtacttgccacctgtaaccacaactcaagcgccacctcctcaagttaaacagggatacgactatccaaagcctgccattccattcccaccgcctactgctccgccacaaaagtatcttccgccggtgaccaccactcctgctccacctccaccaccaccgccgactaagaagtacctgccaccccctcaggttaagcagggttacgattatcctaagccagcaattccattcccaccacccaccaacccaccacagaaatacctgcctcccgttgtgccaaccagccctcctgtgccaaaatacgttcccccacctacacctacctacattccaccaccaccaaagaagcaaggatatgactatcccaagcccgccattccattcccaccacccactgctcctccgcaaaagtatctgcctcctgtgaccacaacccaagcaccacctcctccaccgcccaagtacctgccgccacctcaggtgaagcagggatacgactatcccaagcctgctattccattccctccaccaactgctccgccacaaaaatatttgccacctgttaccaccacgaaagctcctccaccaccacctactgtcaaatatcttcctccaccacaagtgaagcaaggttatgattacccaaaacccgccgtccctttcccacctcccactaacccaccacagaaatatctgccgcctgttgtgcctacgactccaccacagccgaagtacttgccacctccaaagccaacaaacccaccgcagcccaagtatctgccacccccacagcctaagtccggctatgattacccaaaacccgccattccattcccaccaccaacaaacccaccacagaaatacttgccacctgttgtgcccacgtctccaccacagcccaagtacttgccacctcctaagccaacaaacccaccgcagccgaagtatctgccacccccacagcctaagtcaggctatgattacccgaagcccgccattccattcccagcacctactaacccacctcaaaagtacctgccaccaccggtaattcccacttcaccaccagtaccaaaatatctgccacctacaaacccaccaacgccccagtacttgcctccggtgcaggtgaagcagggttacgactatcccaagcccgccattccattcccgccacccactgccccaccgcagaagtacttgccaccagtgaccacaacacaagcaccacctccacctcctcccacatccaagtaccttcctccacctcaagttaagcagggctatgactatcccaagcccgccattccattcccgccacccactgccccaccgcagaagtacttgccaccagtgaccacaacacaagcaccacctccacctcctcccacatccaagtaccttcctccacctcaagttaagcagggctatgactatcccaagcccgccattccattccccccacccacgaatcccccccagaagtacattccacccgttgtgccaaccagcccgcccactcccaagtaccttccaccccctcaggtgaagcagggttacgactaccctaagccagtcattccatttcccccacccgctcccaagtcggcgggctattcctacccgaagccggccatcgcattcgacttttga

SEQ ID NO: 32370 - protein, 707 aa, DROSOPHILA
MQPHAGLALALIALSQSYFTAAQGYDYPIPKVSFTDGYSYPKPAIPFPPPLPKVVESSGYSYPKPVVPFPPAQPKYTPPVQQIIPQEPKLVSGYSYPKPVVPFPPPTQPPQIRVTSPPVAEGYAYPTPSVPFPQPKQGYDYPKPAVPFPPPAVPTQKYLPPVTTTQAPPPQVKQGYDYPKPAIPFPPPTAPPQKYLPPVTTTPAPPPPPPPTKKYLPPPQVKQGYDYPKPAIPFPPPTNPPQKYLPPVVPTSPPVPKYVPPPTPTYIPPPPKKQGYDYPKPAIPFPPPTAPPQKYLPPVTTTQAPPPPPPKYLPPPQVKQGYDYPKPAIPFPPPTAPPQKYLPPVTTTKAPPPPPTVKYLPPPQVKQGYDYPKPAVPFPPPTNPPQKYLPPVVPTTPPQPKYLPPPKPTNPPQPKYLPPPQPKSGYDYPKPAIPFPPPTNPPQKYLPPVVPTSPPQPKYLPPPKPTNPPQPKYLPPPQPKSGYDYPKPAIPFPAPTNPPQKYLPPPVIPTSPPVPKYLPPTNPPTPQYLPPVQVKQGYDYPKPAIPFPPPTAPPQKYLPPVTTTQAPPPPPPTSKYLPPPQVKQGYDYPKPAIPFPPPTAPPQKYLPPVTTTQAPPPPPPTSKYLPPPQVKQGYDYPKPAIPFPPPTNPPQKYIPPVVPTSPPTPKYLPPPQVKQGYDYPKPVIPFPPPAPKSAGYSYPKPAIAFDF

SEQ ID NO: 32371 - DNA, 2333 bp, DROSOPHILA
tgttgaaatatgcgacgaaacgcggagtatcctcgccgtgtcccgaaatgccaaaaaccaaggaatgaaaaaaaaaaccaaaacaaaacaaaagcagccgaactgctcggcgttttatttgcacttcaattttgccctcgacgacgaccggcggcgcactttatggcgattgcaatcccagctgcactcgcctaactgcactgcagtgcagtctcaaagtcctggagtctccgagtcctgcagtccaaggactgctcgtccctcgccttcgtcctcgtcgctgacgcccggactcccggactccttgccactcggcagacaagtgctacttacggctattttatgttgcaaaatgtcctttggagcttatcagcgtttaacatcggacagaagtcagcccaaaaataatgggcacaaaaagcaagctgcaggtaaaatgcacgtctagcggaacgaagcgaaacgatacgacacgaaataaaatcatgtgacactttgtggttaataatgcccggttatacatgtagatgcatacatacgtacatacgtacatacgtacatacatgaggcactgtgctccattgtctcgaccggcgaacaaaccccgaaaaaccaggacagctcacacaaccaattggtttgggggtggcggtgatttaaatgcaaatttatcgccgtgcagctgtaaaaagggagccaaaaaatcataaacgaccgcccacaaaatataaataaatggacacacacgcaaaacgcaaccaaaaaaaaaaaaaaaaaaaaaccaagaaaaaatatgtggaaaaaagcagcaaaaatgaggatgtaataataatatttacaaaatgtctgtttgcgcgacttctgatgagagaacattttaatttttcgccatttgcatttacattttgattaaacgatttgcatattgccgctccaccagcgcccatttagtgccatactgattaatttattgcaagcaattcggggattaatcagatcactacttcaactcacccaccagctgccttctgtacaggtcgaacaggaatctcgtgcgtttcgaggcgctataatatacgcaatactgtcgccaaatcagaaccatggccatccaggagtagtagattaccagggtcagtatcagaatcagtgccgcggcgcagctatacaccaatgagatcctctcccaggacaagtccatctggtagatcctgtgccgcacctgccacagtacaacgcagtaggacatcgaaaagagtgacacgtagaagtagatcgcgtggtagaagttcgccaggcagttcagcaacaagttcgtgtagtccagactcatggtctccggatgcacttgctcgaaatcgaaaatataaatacaatatcgatttttcggagtacagcattatcgatctggaagttaccgaagtgccaactgggttgggaaacttggcaagctataaatatttatcaaaaactattgtgtatttaacaaagtgttttaataagtatgagaccaatacgtaatgcataatttgtttaaattttctatttaatgaagatcacatcttgttctagttctagttttatttaaatcgattccattacataatctcgcatccaaaaacattacacgtacacaatttgaaagtactattatttacgcatttattgaaaaatgtagggtgtatgtaaatgctcgtccttgtgtgcactcaaatccttcatgtcgttcttcgcttttctaaaccattctgccgagtggaattgttgtttaagtttgccatttttcaacaactcatcaatctgttcgatccgctctgccatagtttgcctgccagactcagttccagctccgccctgccagctcccccttcgtccttcgtccttcgtcctgctgctgccggttaacgtttctaacttatgcgaggcacgcactctcaccgcaaatgcagcagcatcagtcttcgtctgcaaagcgaacacatacaccgatttgcactgaaattaaaattattttattaataaataagtatatatataacatattcacatatatattatagttaatatcatgttgtcttttcattaaatattttattgatattttaaaaacttgaaagcttagtttatccatattataaataaatctaatatgaattacaaataatacatactctattaatacataatgtagtaataaataaaatgcaagttgttttcatcttttgcttgacgcaaatacaacaggaaaagctaaacaattttttccagtgcatgaacaaatatggctggctgatttgaagcgaaagaagccgctgatgggcctcgaagtggca

SEQ ID NO: 32372 - DNA, 333 bp, DROSOPHILA
atgagtctggactacacgaacttgttgctgaactgcctggcgaacttctaccacgcgatctacttctacgtgtcactcttttcgatgtcctactgcgttgtactgtggcaggtgcggcacaggatctaccagatggacttgtcctgggagaggatctcattggtgtatagctgcgccgcggcactgattctgatactgaccctggtaatctactactcctggatggccatggttctgatttggcgacagtattgcgtatattatagcgcctcgaaacgcacgagattcctgttcgacctgtacagaaggcagctggtgggtgagttgaagtag

SEQ ID NO: 32373 - protein, 110 aa, DROSOPHILA
MSLDYTNLLLNCLANFYHAIYFYVSLFSMSYCVVLWQVRHRIYQMDLSWERISLVYSCAAALILILTLVIYYSWMAMVLIWRQYCVYYSASKRTRFLFDLYRRQLVGELK

SEQ ID NO: 32374 - DNA, 3653 bp, DROSOPHILA
atttttcgtttagggtttcaaaattataaagtttgtagtcggctgaacacttccttccattcaatccaaatggctaagattcctttaagctggagcagagttcttcggctgattcggttgcatcatctggcggtgggcaacatcgccgtgctctgccttattgtgttgagtatcatggactacgggatattagatctcttctgttggtttgaaacggttgaggaggagaatattccgctgaccgttttgatgtacatcggtggattaaaggtggctattatcctgtttctcgcactgtggtgctggactagagaagaagctgaaaagaatcaggagggcaatatggacatgcccatctcttacgttcgtaagcggtactgtcgttttcttgtgatgaacctgttggcgtccgtagaccggctgatccaccaccactcacacattgatgacttcctgcaaagtcgcaaggactgcggcgaggcagtggaacagtttcgctggagagctcgaaggctctttgagcgcacggatctgcaactttgtgttccactccacgaagtcctttctgtggatgatccgcaggagaaggaactcctccgcttgggttacggcgataaattggcacagttgcgagagctggacgtctacaagatgatctacagcgactaattaacttcacaaacgtgttaatttgaatgcgccatacgcatgtgaggttataaagttggcagagtggaaggtccttttcccctattacttttctggaggttgttcggatcattataagcttttaagatcatatttattgtaagcatttcgacttttaggtgtatttaccgctaaatcaattacaaatataaatctttcgtaaaaattagaagtcgcttaccatttactactattcaattttacttcttatattatatttaaattagtttcccctaagatttctactatacatcgaaagatttatatacagttcgaacataaatccgtgttgctatcgcaggaagattccaggctggtccgaatgatcatagcgaagagccttgtgctgttcaggtagcaaaggattataacgactcatgggtggtgggcccctgggtggtgcagcttgcattggttgtgtgtgctgaaatggtcgaggcatctgtgtctcaggactatctccttctctgcgccagtgacccactggacgaagcttcaccggcggagcagagcggaccggaccctgctggtaaaagtgcttgtgaatggtcaccggacgcagggccagcttaagcttctcctcctgtttttgggccagccacctcttgcgatcgaaggcgttcacatttcgcttgaccccaaacaccagatgcaggaagggcttgaccagcacactgagagctacaaagccaaagaatccaaagacggcgggggagatcagggtgaaaaggaaaacgcccaaggtaaagggattgaggactgtgaagaaggccacgaactttacaaacggatacagcacctggccgacgtggctgaggtactcctttttcttcttcttgaaaatgctgttgtgtctcaggagatacttgatcttgctgaagggacgatgggtggtggtcaccgtatgtggtttcttggtagtcaaggcggacaataatgctgtgggtatagtctgaacctgcatctggttaaccggaggatatggataatcgtgcggatggtggtgatagtacggttgcttagtgggattggcgaagatcacttgaccgggctggaaaatcgagtgctgatcgtggtcttccggcttttgctgcttcttccgcttccgcttccgattgcccttcttcttcttcttcttttcgcccttgtacttcttcttcttcttcttatttcgcttcttcttcctcctctttcgtcgacgtcggcgagtccgttttcggcggcggcgaattcgttttcttcggcggcgaatgcgtttccgtttcctcttttgactttcctttgcccgggattgcggttttaactcggctttgtgctcagctaggggttccgtagattttatcggcttctcagtcagatacccatcattcagatccttttttattaaatcctccactagggttcccagaatatgaaaaggtttaactgtggtggtgtgtttatccgccttgatcaggtccttttcaagtttttgcagcacatgaaagggctttgtggtggtggtctttcgttcataagccttttgatccttgtacaattcttccaggatatcaaaactagcgtttgagtgggttttaagtcggtgagcctcctgctcctgctcccaatccaagtgctggagaatgctaaatggcttcactgtagttgtgcgccgccatttcgcctcgaagtcctgctgcagttgatcgaaaacatggaatatgggcttcccccgcaccagttcacgccctttgacctcccggcgaggcgtggccggcagcagttgcgcacacaaagtttggtatatttttgcaaaattaaaaacaggggtagcccggccgctaaactccaactttgctaatccatcacgcccgtggctgcgtgcctggccacagttttgtgcgaacaaaatcaacagaaatatggcaaagttgctaacacttttggcacttcgtccctgccccatttcgattcattttgccggcgaagaagtccttttcccttcttggctttgctattgagtttgatgtttgatttaatttcagcttccactccaacgctggccaactacaactgaagtccggctcatggccactgccacttcatcagctcggaaagtcggcagctcggatggtcgggagtttccaactcgctaacttggccaacttgttgagctgttgtcgacggggtcaaaaggggaacagggcccatttcacttttcgccgactcttgatttctgaattctggtttctgttctggtttgttttcgcttctccccagagtttctttgcttgtggttctcgcataaaagtaaaatttattactacttagtacattatcaacgggctctgctactctgggctttccggacttttctcccccatccacgttatgacaaatgccccccaaacagccgaaacaacttgcaaagcacttaattatgttttgggcacaaaaaccgaaaactgctgcccaccaagaaccgaaaaccgaaaaccggggaaaaacgaggccgagactatcacaacacgaattatgtgaactgccatgcaaaagactttggaaagtacttggtggccaattgcagttcccattttgttgccgctttttgggactgccaaacttttgctgggccaacatgcacactcacatgcagatttataggtactcttgtgggtcaaagaccccttaaaaacactcttcgactttgggagtcgcaaatagtaatcggtttacaaactagcagctaaaaactttattttaaaactttaatcaaataaatttagtgatttccctctatgtatttgatatagaattgcttaaatgtttatcactttttataacaattatggcgtttaatatattataaggactccagtgctgattaaataggtatattttacagcagctgttacaataccctctataaggctataaaaattgctcattttcatgagtgttgacag

SEQ ID NO: 32375 - DNA, 1653 bp, DROSOPHILA
atggggcagggacgaagtgccaaaagtgttagcaactttgccatatttctgttgattttgttcgcacaaaactgtggccaggcacgcagccacgggcgtgatggattagcaaagttggagtttagcggccgggctacccctgtttttaattttgcaaaaatataccaaactttgtgtgcgcaactgctgccggccacgcctcgccgggaggtcaaagggcgtgaactggtgcgggggaagcccatattccatgttttcgatcaactgcagcaggacttcgaggcgaaatggcggcgcacaactacagtgaagccatttagcattctccagcacttggattgggagcaggagcaggaggctcaccgacttaaaacccactcaaacgctagttttgatatcctggaagaattgtacaaggatcaaaaggcttatgaacgaaagaccaccaccacaaagccctttcatgtgctgcaaaaacttgaaaaggacctgatcaaggcggataaacacaccaccacagttaaaccttttcatattctgggaaccctagtggaggatttaataaaaaaggatctgaatgatgggtatctgactgagaagccgataaaatctacggaacccctagctgagcacaaagccgagttaaaaccgcaatcccgggcaaaggaaagtcaaaagaggaaacggaaacgcattcgccgccgaagaaaacgaattcgccgccgccgaaaacggactcgccgacgtcgacgaaagaggaggaagaagaagcgaaataagaagaagaagaagaagtacaagggcgaaaagaagaagaagaagaagggcaatcggaagcggaagcggaagaagcagcaaaagccggaagaccacgatcagcactcgattttccagcccggtcaagtgatcttcgccaatcccactaagcaaccgtactatcaccaccatccgcacgattatccatatcctccggttaaccagatgcaggttcagactatacccacagcattattgtccgccttgactaccaagaaaccacatacggtgaccaccacccatcgtcccttcagcaagatcaagtatctcctgagacacaacagcattttcaagaagaagaaaaaggagtacctcagccacgtcggccaggtgctgtatccgtttgtaaagttcgtggccttcttcacagtcctcaatccctttaccttgggcgttttccttttcaccctgatctcccccgccgtctttggattctttggctttgtagctctcagtgtgctggtcaagcccttcctgcatctggtgtttggggtcaagcgaaatgtgaacgccttcgatcgcaagaggtggctggcccaaaaacaggaggagaagcttaagctggccctgcgtccggtgaccattcacaagcacttttaccagcagggtccggtccgctctgctccgccggtgaagcttcgtccagtgggtcactggcgcagagaaggagatagtcctgagacacagatgcctcgaccatttcagcacacacaaccaatgcaagctgcaccacccaggggcccaccacccatgagtcgttataatcctttgctacctgaacagcacaaggctcttcgctatgatcattcggaccagcctggaatcttcctgcgatag

SEQ ID NO: 32376 - protein, 550 aa, DROSOPHILA
MGQGRSAKSVSNFAIFLLILFAQNCGQARSHGRDGLAKLEFSGRATPVFNFAKIYQTLCAQLLPATPRREVKGRELVRGKPIFHVFDQLQQDFEAKWRRTTTVKPFSILQHLDWEQEQEAHRLKTHSNASFDILEELYKDQKAYERKTTTTKPFHVLQKLEKDLIKADKHTTTVKPFHILGTLVEDLIKKDLNDGYLTEKPIKSTEPLAEHKAELKPQSRAKESQKRKRKRIRRRRKRIRRRRKRTRRRRRKRRKKKRNKKKKKKYKGEKKKKKKGNRKRKRKKQQKPEDHDQHSIFQPGQVIFANPTKQPYYHHHPHDYPYPPVNQMQVQTIPTALLSALTTKKPHTVTTTHRPFSKIKYLLRHNSIFKKKKKEYLSHVGQVLYPFVKFVAFFTVLNPFTLGVFLFTLISPAVFGFFGFVALSVLVKPFLHLVFGVKRNVNAFDRKRWLAQKQEEKLKLALRPVTIHKHFYQQGPVRSAPPVKLRPVGHWRREGDSPETQMPRPFQHTQPMQAAPPRGPPPMSRYNPLLPEQHKALRYDHSDQPGIFLR

SEQ ID NO: 32377 - DNA, 2600 bp, DROSOPHILA
gcaaaatccttatgaattggctacaattttatttattattacttgttctatttgctgcctggcactccgagtactccgagtgttgcactgtgaggaaatattgaaatcccgctctgatactgtgggctactactacaagagtttgattggctattctaatattgttttctatctgcattcgaatgcgggttcttttcaccctccacaagccctgactcttcatccctccaactccctccaatacatatttccaatcttctccagcgtcttcacaatggagtgcagttccaccgacgaacgacttgttttgagccaaacaaaatgacgttcccaaggcgattccattatgatggcctgcaaaatgttggcaaattgcaaaggcgcaattgatattggctctgagtattgtgtgaagaaagtgccaatgccaatgccaataccaataccgtcggccagagcaacaagataaaaaacaggagtccaatgccaattggataagtgctgagaatgaacaaacttgcgatataatttgaatggtcaactaataattggttcatcgctgcaaagtaaaattataaaaatccataacaaagctaagtgtatttatgacacgattattagccagcttactggtaaaattgcattaaaatatattcaatagttgatacaaattccaacagttatttgtacaatctggcacgaagttgaagaaatttgttgggtaacatttatattataaggaaaccagttacagagtagttggctaaacaaatgtatactactatatatacgacccttggttcaaattcattgaaaaatagtaataatattatttttcaattaaattcaaataactaagaaagccttttactttcatttacatttttaggatcattctagttctagtttgctcgaggtaaaagtattgtctatttttcgtttagggtttcaaaattataaagtttgtagtcggctgaacacttccttccattcaatccaaatggctaagattcctttaagctggagcagagttcttcggctgattcggttgcatcatctggcggtgggcaacatcgccgtgctctgccttattgtgttgagtatcatggactacgggatattagatctcttctgttggtttgaaacggttgaggaggagaatattccgctgaccgttttgatgtacatcggtggattaaaggtggctattatcctgtttctcgcactgtggtgctggactagagaagaagctgaaaagaatcaggagggcaatatggacatgcccatctcttacgttcgtaagcggtactgtcgttttcttgtgatgaacctgttggcgtccgtagaccggctgatccaccaccactcacacattgatgacttcctgcaaagtcgcaaggactgcggcgaggcagtggaacagtttcgctggagagctcgaaggctctttgagcgcacggatctgcaactttgtgttccactccacgaagtcctttctgtggatgatccgcaggagaaggaactcctccgcttgggttacggcgataaattggcacagttgcgagagctggacgtctacaagatgatctacagcgactaattaacttcacaaacgtgttaatttgaatgcgccatacgcatgtgaggttataaagttggcagagtggaaggtccttttcccctattacttttctggaggttgttcggatcattataagcttttaagatcatatttattgtaagcatttcgacttttaggtgtatttaccgctaaatcaattacaaatataaatctttcgtaaaaattagaagtcgcttaccatttactactattcaattttacttcttatattatatttaaattagtttcccctaagatttctactatacatcgaaagatttatatacagttcgaacataaatccgtgttgctatcgcaggaagattccaggctggtccgaatgatcatagcgaagagccttgtgctgttcaggtagcaaaggattataacgactcatgggtggtgggcccctgggtggtgcagcttgcattggttgtgtgtgctgaaatggtcgaggcatctgtgtctcaggactatctccttctctgcgccagtgacccactggacgaagcttcaccggcggagcagagcggaccggaccctgctggtaaaagtgcttgtgaatggtcaccggacgcagggccagcttaagcttctcctcctgtttttgggccagccacctcttgcgatcgaaggcgttcacatttcgcttgaccccaaacaccagatgcaggaagggcttgaccagcacactgagagctacaaagccaaagaatccaaagacggcgggggagatcagggtgaaaaggaaaacgcccaaggtaaagggattgaggactgtgaagaaggccacgaactttacaaacggatacagcacctggccgacgtggctgaggtactcctttttcttcttcttgaaaatgctgttgtgtctcaggagatacttgatcttgctgaagggacgatgggtggtggtcaccgtatgtggtttcttggtagtcaaggcggacaataatgctgtgggtatagtctgaacctg

SEQ ID NO: 32378 - DNA, 600 bp, DROSOPHILA
atggctaagattcctttaagctggagcagagttcttcggctgattcggttgcatcatctggcggtgggcaacatcgccgtgctctgccttattgtgttgagtatcatggactacgggatattagatctcttctgttggtttgaaacggttgaggaggagaatattccgctgaccgttttgatgtacatcggtggattaaaggtggctattatcctgtttctcgcactgtggtgctggactagagaagaagctgaaaagaatcaggagggcaatatggacatgcccatctcttacgttcgtaagcggtactgtcgttttcttgtgatgaacctgttggcgtccgtagaccggctgatccaccaccactcacacattgatgacttcctgcaaagtcgcaaggactgcggcgaggcagtggaacagtttcgctggagagctcgaaggctctttgagcgcacggatctgcaactttgtgttccactccacgaagtcctttctgtggatgatccgcaggagaaggaactcctccgcttgggttacggcgataaattggcacagttgcgagagctggacgtctacaagatgatctacagcgactaa

SEQ ID NO: 32379 - protein, 199 aa, DROSOPHILA
MAKIPLSWSRVLRLIRLHHLAVGNIAVLCLIVLSIMDYGILDLFCWFETVEEENIPLTVLMYIGGLKVAIILFLALWCWTREEAEKNQEGNMDMPISYVRKRYCRFLVMNLLASVDRLIHHHSHIDDFLQSRKDCGEAVEQFRWRARRLFERTDLQLCVPLHEVLSVDDPQEKELLRLGYGDKLAQLRELDVYKMIYSD

SEQ ID NO: 32380 - DNA, 3437 bp, DROSOPHILA
atccgcatcctgtgtcggtccctcgagactggcgttcgccttgacttggccctcggttatccgcttagatcactcaactaaaaaactcaatttgcatattaatattatttgggtttttttccctgttgtttggcctttcctcagcccttcatccttttatcaaacaagaagaacaacaacgggcggagaatcaacagtagtgaattgaatttgctctgctccgacgccttttcggtcgtcctttgatttggccaggatccggggcatactcacacatgagcagctgctcccaggtgcatacttgaaggcagtcctgaggagggaaagcgaaggtcctggagccttgaatcctgccttcttccaggtgaacggggcacaaaggccgagctgtcagtcagtgtgccagggcaattttgggttttattggaattatgtcagtgttattttggcataatcataaaaatgattgtttgcggctgtccgccgagacgaatgtgcaatgatgcgagtggattttcggaatgattggagtttaaagtcgaaaccacccttgagactattagctattgcccttaattaactgcttgtttaaatcggtaattgaaatcaattaaattatgaatgatacttaatagtaagaaatgattgtatttgaacttatggtaaaattaagtaaattaaaacagctttaaaatgttataagtgttgatttaatcaaatgaaggggtgactttaaagtggaacccataccaaaagcttcaataatcacgtgtcaattaactacgagctttgccagttgattggaattcaaaagcaaatcagcaatggggttggttttctgacggattttggtttggtttcgatttcgggtttattttgacaaacgcaaatgaatctgaataatttatgattgggccatgaatttaatatttcatcaggccggcggcaattaaaattagaatataaatgggcgtccatccagtgagacgaccaaccagtcatgtcgttccatcgctacagaccccgtctccccggcggagaattggctccgatgccgtggccggtgtccttgtaccgtgtcctgaatcacgtcgcctggcccctggaggcggagtcggggcgctggaccgttttcctggacaggttgatgatttttctcggattcctggtcttctgcgagcacaacgaagtggactttcattacctgatagccaatcggcaggacatggacaacatgctgacgggcttgcccacgtatctgatcctggtcgagatgcagatacgctgcttccagttggcctggcacaaggatcgcttccgggccctgttgcagcgcttctatgcggaaatctacgtcagcgaggagatggaaccccacttgtttgccagcattcaaaggcaaatgctggccactcgggtcaattcgaccgtctatctgctggccttgttaaatttctttctggttccggtgacgaatgtcatctaccatcgtcgagaaatgctttacaagcaggtgtaccctttcgacaacacccagttgcacttctttattccgctcctggtgctcaacttctgggtgggcttcatcatcaccagcatgttgtttggcgagctaaatgtcatgggcgagctgatgatgcatttaaatgctcgatatatccagcttggccaggatctccgtcgctcagcacagatgctgctgaagaagagtagctccttaaacgtggccatcgcttaccggttaaatttgacccacatcctgcgaaggaacgcagctctgagggattttggccagcgtgtggagaaggagttcaccctcagaatattcgtcatgttcgcttttagcgccggactgctatgtgctctgttcttcaaggcatttacggttggtaattctatctaaatgtgtacaactactaattcctatgaaatacgtttaccactagatttcaaaagggaaaaatgatgcaactaagaataattacgttttttacagaatccctggggaaatgtggcctacattgtgtggttcctggcaaagtttatggagttactggcactaggaatgctcggctcaattctgcttaaaacagtgggtgtttctactgcactcttcgctatcaaattttttaatattcacttgcagacagatgaactgggtatgatgtactacaccgctgactgggagcaggtgattcatcagtcggacaacgttggcgagaatgtcaagttgatgaaactggtgaccctggccatccaactgaactcgagacccttcttcatcactggccttaattattttcgagttagtctcactgctgtgctgaaagtgagtagctcttaacttcatttcgattgattaactactgattcaacaatttcacagatcattcagggcgccttttcctacttcacgttcctaaattcgatgcgatgagatagctgactcggattgctggaataattgcgttgccaatcatttggaaggtatgcgatacctggaatcatttgtggcctgacccgtggccatttgtccgcccccaaaaacaggatgcataacttcctatccacagccactccctcttacctttgtatgctggatattcgctgacaacaatggagctttcgagcgcattcaaggatattaacacgtgcatgactgtgatttatgcaccccccactgcagcagcagcaaccactgcaaatgcaactgcaactgcatgtgccagtcggagcatcatcaatccagtggttctccactctcgactcctaagcagcgagcagcacatttggaacgggcgaaatttgctgctgcgttgacagctgcaatccgaagacgttacccggcacatatccatatcgatatccatatagccataactgtcagccatgacggagtggcagcaattggcaggggagagcggcggccggagatatcgtggtactatatatatatataggaatctccgaggattggaaggcggactacatccactcatccactggcaatggcacaatgcaacatattccagggaatacagcgatgttcaaacaagtagatgtaattgcgagcctttgacaaataaatagattccaagaatctttaataaacatacttgtgtacataagtcgcacgcttggtaggataaaacacagtcttaatcgaagtcttagtgaaaggcaatttgatacagtaaaaatattttacgcaaatgtaatgtaatggttaaagttaatccttatccactatgtactatattatgatttaaaaataaattaattttattcaaattaagtagatacagtatctatagatttttccacatcctacgctacaaacttcaaaacatttttcaaagaagaaatgctagtatcttgagcactgatgccagaatgcataatccgtctgtgtggatatgtgtggatacataaatcgg

SEQ ID NO: 32381 - DNA, 1215 bp, DROSOPHILA
atgtcgttccatcgctacagaccccgtctccccggcggagaattggctccgatgccgtggccggtgtccttgtaccgtgtcctgaatcacgtcgcctggcccctggaggcggagtcggggcgctggaccgttttcctggacaggttgatgatttttctcggattcctggtcttctgcgagcacaacgaagtggactttcattacctgatagccaatcggcaggacatggacaacatgctgacgggcttgcccacgtatctgatcctggtcgagatgcagatacgctgcttccagttggcctggcacaaggatcgcttccgggccctgttgcagcgcttctatgcggaaatctacgtcagcgaggagatggaaccccacttgtttgccagcattcaaaggcaaatgctggccactcgggtcaattcgaccgtctatctgctggccttgttaaatttctttctggttccggtgacgaatgtcatctaccatcgtcgagaaatgctttacaagcaggtgtaccctttcgacaacacccagttgcacttctttattccgctcctggtgctcaacttctgggtgggcttcatcatcaccagcatgttgtttggcgagctaaatgtcatgggcgagctgatgatgcatttaaatgctcgatatatccagcttggccaggatctccgtcgctcagcacagatgctgctgaagaagagtagctccttaaacgtggccatcgcttaccggttaaatttgacccacatcctgcgaaggaacgcagctctgagggattttggccagcgtgtggagaaggagttcaccctcagaatattcgtcatgttcgcttttagcgccggactgctatgtgctctgttcttcaaggcatttacgaatccctggggaaatgtggcctacattgtgtggttcctggcaaagtttatggagttactggcactaggaatgctcggctcaattctgcttaaaacaacagatgaactgggtatgatgtactacaccgctgactgggagcaggtgattcatcagtcggacaacgttggcgagaatgtcaagttgatgaaactggtgaccctggccatccaactgaactcgagacccttcttcatcactggccttaattattttcgagttagtctcactgctgtgctgaaaatcattcagggcgccttttcctacttcacgttcctaaattcgatgcgatga

SEQ ID NO: 32382 - protein, 404 aa, DROSOPHILA
MSFHRYRPRLPGGELAPMPWPVSLYRVLNHVAWPLEAESGRWTVFLDRLMIFLGFLVFCEHNEVDFHYLIANRQDMDNMLTGLPTYLILVEMQIRCFQLAWHKDRFRALLQRFYAEIYVSEEMEPHLFASIQRQMLATRVNSTVYLLALLNFFLVPVTNVIYHRREMLYKQVYPFDNTQLHFFIPLLVLNFWVGFIITSMLFGELNVMGELMMHLNARYIQLGQDLRRSAQMLLKKSSSLNVAIAYRLNLTHILRRNAALRDFGQRVEKEFTLRIFVMFAFSAGLLCALFFKAFTNPWGNVAYIVWFLAKFMELLALGMLGSILLKTTDELGMMYYTADWEQVIHQSDNVGENVKLMKLVTLAIQLNSRPFFITGLNYFRVSLTAVLKIIQGAFSYFTFLNSMR

SEQ ID NO: 32383 - DNA, 3038 bp, DROSOPHILA
ctgatggctatcctgaacctccaggttgagatcctcgagcgaatggtattgggcgacaaagatggcaaactgcccacaccacctgcatccgactccgatcccgacgacatgccggaaatgtatcggaagcgccgttgatgatcgccgtgatcgaatggcaagttgataaccacaaaggcttttcatattcacgaactttgctatgtattattaactactttgttttatgccgcacggcattaataaatgcgttccagtctaagaaagacatcaacttggtttttgattgtctgagaaagtctctgcttccagtgatataaaaattgagtacacaagcattgggtttaaaaggttattattatttaaattttttcatcggatgataatgaccatatattctagtaagagaaagaaagagcagttctagcaacactttccatcattttctataggttgtgctttctattgcactaaatgtgacttttccggccccctgcgacctcacttcaccaccgatcattccccttcgctgagcagcgcgactttagaaataagcagcgataaatgatttaattaaaacacagattgggacttttgttttcttttgccgagggcgcgaataactccactaatttctgggtgctcacctgtcgcgggggctatggatttctgggtgcgcacgctttatttcaataatccaagagaggcacaaattggcaactacatgctcgttgctgcctccgcctgatataatgcctgatgaaagagtgtggaaagagccgcgtggccaaatcttgaaggggctccaagctggcggcactaatcgctcccgaaacgcactgcagacgtctcaatgccagcagccaagcggcgacggtttgaaattgtcggactgcaatttgtcgccagcgcttgtaatggcacccactccagatgacgacatggcgacaccgggacccatataaaatccgccggtctgcaggcgtcgcactcagttaacatgttcgcgtcccaagggaagttacttttggcctttggcctttgcctcggtctccttctaaccatagcgcacgcatccgcacagaacgcgtccaaggaatcagagtcctggcagcccatgcagccgcggaaacgacaggctatcgtgaaactggaccccgtgggctccgcagtagccaagagctacgatcctcccccggagttctaccgcggaccgggctcatcgtcatccaagttggatagcactgcagctggcttcatatccaagcccattggtgcgctgccgccttttggaggagctcatggctcccaagctagtgacctaaatgataaccttagccaggcctatgataagtggaaactaggtgggaatatacacgatcgaataagcgtgggtgagttcaaagattactcaatctatatattctacaaagataaactcaaacttaaaatgattaatatttgaaattgatgactgttgtttattgtagatttcattaaaaatatatttaatactatttaagggcattatggcagcagtggaagtgctggcaaaagttacgcctatgacagtcaaccttatcagtatgactacggaccatccaacggacatggctatgagccaggacctgctcctgggcacacctactcctccagcggagaggcaggggtgccataccacgtttatcgacctcgacccgaacatggccactacccggggccagcagtggattactcctacagctcctaccccatcgactcccacgagatagtctcccacaagggatcgccagagatctcaccaaaggccttgctggccaaaagcttcctgattccgctggccagtgccaccgttctgggcatcgccgccgccctggtcagtaatcctctcctgctgcaactagctcctgttccggggatcggtgtgggagtgggtgtcggacctacagtcgttggcaaacgaagaaggagaagaagggcagtgaagcgggctttacgatcagggaatactgatgcaaaactgaatagctctatctaagtaccgtcctctcgaaaatgtattaaatcaggaaacaatatataagatattatttttaatatatcatatagttacaagcgtgttttttatttaaagtcagtgatggcatttaaataattttaataatttaaataatttaaattaagggtctaatgctacgagagcctaataattagttgtctatatggagagaataagataacgtaattttaagtgacttgtggaaccttttgtaatggctatatgtaagttttttttttacattagattgcgtaattagtcgactgaggttcaaaccggctcgttggtctagaggtatgattctcgcttcgggtgcgagaggtcccgggttcaattcccggacgagccccagtcatcccagtgcgctaaggaatgtataatttttaaacaaaaaagttatattttataaatatttattttaaaatatttttaagttattgagaatacacatttagttgcatgtgtacacaattatatacaatttacttagggaatgaaataaattaaaagttattttatatcattaaaaacaaactaaattaaattaaattaaggaattttttagcgtcctcataaatgttgcaaaattgttgagtcttcggttttgtacggcttatgtcataatatattgaagatagagaaaaaatttgtttaaaaaacagctaattttataactactctaaaaaatattataaaacactgcatttaaatgataaattaaaagttgctgataagtaatacgtttagagtgggtgaatagctttaaacattcggataaacaaaaaatcattttaaaaatcataaaaataattttagttctattaaaaaatatgatatcatggatattgatccataccaaagaaaacatcgccgataggtgtgtgtcttcgctagggaaagtgtctccgctaaggtatcttgagccaacaaagtacataacgcgtttcattccaaacggtatttattttttgaccttgtg

SEQ ID NO: 32384 - DNA, 909 bp, DROSOPHILA
atgttcgcgtcccaagggaagttacttttggcctttggcctttgcctcggtctccttctaaccatagcgcacgcatccgcacagaacgcgtccaaggaatcagagtcctggcagcccatgcagccgcggaaacgacaggctatcgtgaaactggaccccgtgggctccgcagtagccaagagctacgatcctcccccggagttctaccgcggaccgggctcatcgtcatccaagttggatagcactgcagctggcttcatatccaagcccattggtgcgctgccgccttttggaggagctcatggctcccaagctagtgacctaaatgataaccttagccaggcctatgataagtggaaactaggtgggaatatacacgatcgaataagcgtggggcattatggcagcagtggaagtgctggcaaaagttacgcctatgacagtcaaccttatcagtatgactacggaccatccaacggacatggctatgagccaggacctgctcctgggcacacctactcctccagcggagaggcaggggtgccataccacgtttatcgacctcgacccgaacatggccactacccggggccagcagtggattactcctacagctcctaccccatcgactcccacgagatagtctcccacaagggatcgccagagatctcaccaaaggccttgctggccaaaagcttcctgattccgctggccagtgccaccgttctgggcatcgccgccgccctggtcagtaatcctctcctgctgcaactagctcctgttccggggatcggtgtgggagtgggtgtcggacctacagtcgttggcaaacgaagaaggagaagaagggcagtgaagcgggctttacgatcagggaatactgatgcaaaactgaatagctctatctaa

SEQ ID NO: 32385 - protein, 302 aa, DROSOPHILA
MFASQGKLLLAFGLCLGLLLTIAHASAQNASKESESWQPMQPRKRQAIVKLDPVGSAVAKSYDPPPEFYRGPGSSSSKLDSTAAGFISKPIGALPPFGGAHGSQASDLNDNLSQAYDKWKLGGNIHDRISVGHYGSSGSAGKSYAYDSQPYQYDYGPSNGHGYEPGPAPGHTYSSSGEAGVPYHVYRPRPEHGHYPGPAVDYSYSSYPIDSHEIVSHKGSPEISPKALLAKSFLIPLASATVLGIAAALVSNPLLLQLAPVPGIGVGVGVGPTVVGKRRRRRRAVKRALRSGNTDAKLNSSI

SEQ ID NO: 32386 - DNA, 4428 bp, DROSOPHILA
cgggcctggaagagcatgaacgtcgcttggggaaagaggaggcaggcgcagggctggaacaagttcaggggcgcctggggtaagcgcgaacccacatggaacaacctgaagggcatgtggggcaaacgcgaccagtggcagaagctccacggcggctggggcaagcgctcccagttgcccagcaactaatctcgcagagaatcgccgtagcacaggaaaacttaaccagactaactaatccacctgtatctaaccgtatatagcatgtgtgtttcctccgcgatgggtttccgttcttagtgtccatgtcgcactaggttgtccggagtttctcccggtcccgtgccactgaaagtcaattccgaaaatgtatgaaagcgctcgccagtcaccggatcctgatgaccggcgatccgtatcgccgcctcgatcatccagtattatacgcattacatacatatatgtcggtatgtctagtcaactatgtatctactctagcacctagtctccacgtatacaagaggaactttcggaagaatatcgctttaatttagaaacgttaactaagttaatgaattgtgcatatatctttatacttaaatatacatcaatacataccaaatggcaactattaatacgaaatacaaatacgttgaaagtattcgaaatgagtatcgattttatggcttgtttgggttggataattgaaattaaaatcattttataaaatcagtctgatttgcatgcttaatctcaggcggatggacaaactgaaggacaatgccataccctttcattctaagggcataaaactagttactatatgaacgtgtgtttcaatttcatggacttataaaatcaaaagcagcaagcgtggattttatatctactgagttttaattcaagcttgcagcaatttcaaagaacgccagttaaaatgaatctctcaagtattagccggaaggacttgacgtgtttcggagtgaccacatgtgtcgttatggtgtgcttcgttctggtctcaatcttctcgggattcatgcacgagccccagagattcaagacgatgttggtaaccatcgtcctggtcttctttttccaatatcttatcctggagcccattcgtttcttcattcagagcatcgattatgccacctggccgcaggaggatccgccctatagagcggaggagggagggcccactatggaccacattggctacttgaagatccggctacgcagtctgcgctccgagctcctgatctctgagggccacacgaacgagatgctaaaccagaaatacaagcacattgccggggacctgttgctctatggttcctactttattgccctgatgctgatggtggtgttgcaggaggatcatactaactactacaataccaacaacatgcagcgcctcttctgggacaatacctcggtcaccttcggcctgtcgcaagtgtactttatataccaggcaagaaatgtgttttgttactaattatgtacttaaacgttcgaaagaaatggcaatcgaattgtccaaaataatccgtatgctatatgacctatatacataaaacttccaagaaaggtcctaacctaagtcatccgttaggtacacagctatatgaagatcaccctagtcgaggctttctacgcgcagaaaaccaacggctacgagggctggtgggccatggaacagtggcagaagatcggtgtggttcgccttcgccaaatgcgcccagtggactgccatattggactgggcaagcccgagtgggacaagaaaacgtatgcgcccgagtggcgtcttccttatcaccggatgcattatacggagaagttctggcgtatctacgacccctttgtaccggccgagttcgagcccagttttctgaatggcctgctactcaactacgatcattatggctatttgctcaactacccggaagtggccggctacgtagtgctcatgatgagcacaaaggtttggataacactaggagatactcttaaatattttttaaattttaaatgctgctagataaactgcttgaagcagatcgaatacctgagagactacagctggctggataaaaatacttcggctttgtttatcgacttgacgatgtacaacgccgatgccaaccttttcacgttgatcactctgcgtgtggagaacagcccattcgggatccagttgccccgtgtgcatgtggattctgtgtcaatgctgggaaatgtggagacgagaagcaactctgagcttctcatactgttcgtgtacacagtcttggtcatcttgttcgcccgcggtgtgttcacgaagatctggcaccatccggccgccgcccacgaggcttggactatggtggatctggccatatatatactgaacgtcttcctgaccgttctggcaataatgcgcgacatcgagacggatgccctgctgcagattatcgagacggccaccaaggggcagtatctcgacttccagcgtccactgcgcctccaccaaatgctgttcatcgtgaagggcttcctggtgtgcatcaccactctgcggctgtggaaggtgctccagtttgcctccgtcttccagcacttcacgcagaccctcttctctgcctggcgggcagtggccagtctgggtgtaattattctggtagtcctcatggccattggcattactttggcggtgccgaatggaaacaacgcagtggtcttcagtcacatggttcagtccgtggtcacctgcatgtggtgcgtatccctaaacatggcaactctatttgctagctatcaagtcattaggttcaaccatgaactaatctaatttatccaggtactcaatgggttttaacggtgacattcatcctgcggatttcttccacggaggtcgtattctagggatcttgctctacctagcactggtcttcctcctggcgattatcttgatgaacgtcttcgcctccgttatctatgactacttcaacgagacgagcaggatcctaaaggagcattcgaatcggtcgtctatcaccttcctggaatttctgcacgtggagtatgcggatctttttggcgatgcctttcgatgcctgcgaaagacgtacgaatcccgtggacatactgttgccgagaatgtggaactagagctaaataggcgggaactgattaagttcaaaagggacctcataaagagcccgcaggagttgaaaagggcactcctgacggaagagcagcgaagtgccgactaccgtttgcgcggagagaagttgttcaagctgatggctatcctgaacctccaggttgagatcctcgagcgaatggtattgggcgacaaagatggcaaactgcccacaccacctgcatccgactccgatcccgacgacatgccggaaatgtatcggaagcgccgttgatgatcgccgtgatcgaatggcaagttgataaccacaaaggcttttcatattcacgaactttgctatgtattattaactactttgttttatgccgcacggcattaataaatgcgttccagtctaagaaagacatcaacttggtttttgattgtctgagaaagtctctgcttccagtgatataaaaattgagtacacaagcattgggtttaaaaggttattattatttaaattttttcatcggatgataatgaccatatattctagtaagagaaagaaagagcagttctagcaacactttccatcattttctataggttgtgctttctattgcactaaatgtgacttttccggccccctgcgacctcacttcaccaccgatcattccccttcgctgagcagcgcgactttagaaataagcagcgataaatgatttaattaaaacacagattgggacttttgttttcttttgccgagggcgcgaataactccactaatttctgggtgctcacctgtcgcgggggctatggatttctgggtgcgcacgctttatttcaataatccaagagaggcacaaattggcaactacatgctcgttgctgcctccgcctgatataatgcctgatgaaagagtgtggaaagagccgcgtggccaaatcttgaaggggctccaagctggcggcactaatcgctcccgaaacgcactgcagacgtctcaatgccagcagccaagcggcgacggtttgaaattgtcggactgcaatttgtcgccagcgcttgtaatggcacccactccagatgacgacatggcgacaccgggacccatataaaatccgccggtctgcaggcgtcgcactcagttaacatgttcgcgtcccaagggaagttacttttggcctttggcctttgcctcggtctccttctaaccatagcgcacgcatccgcacagaacgcgtccaaggaatcagagtcctggcagcccatgcagccgcggaaacgacag

SEQ ID NO: 32387 - DNA, 2124 bp, DROSOPHILA
atggtgtgcttcgttctggtctcaatcttctcgggattcatgcacgagccccagagattcaagacgatgttggtaaccatcgtcctggtcttctttttccaatatcttatcctggagcccattcgtttcttcattcagagcatcgattatgccacctggccgcaggaggatccgccctatagagcggaggagggagggcccactatggaccacattggctacttgaagatccggctacgcagtctgcgctccgagctcctgatctctgagggccacacgaacgagatgctaaaccagaaatacaagcacattgccggggacctgttgctctatggttcctactttattgccctgatgctgatggtggtgttgcaggaggatcatactaactactacaataccaacaacatgcagcgcctcttctgggacaatacctcggtcaccttcggcctgtcgcaagtctatatgaagatcaccctagtcgaggctttctacgcgcagaaaaccaacggctacgagggctggtgggccatggaacagtggcagaagatcggtgtggttcgccttcgccaaatgcgcccagtggactgccatattggactgggcaagcccgagtgggacaagaaaacgtatgcgcccgagtggcgtcttccttatcaccggatgcattatacggagaagttctggcgtatctacgacccctttgtaccggccgagttcgagcccagttttctgaatggcctgctactcaactacgatcattatggctatttgctcaactacccggaagtggccggctacgtagtgctcatgatgagcacaaagataaactgcttgaagcagatcgaatacctgagagactacagctggctggataaaaatacttcggctttgtttatcgacttgacgatgtacaacgccgatgccaaccttttcacgttgatcactctgcgtgtggagaacagcccattcgggatccagttgccccgtgtgcatgtggattctgtgtcaatgctgggaaatgtggagacgagaagcaactctgagcttctcatactgttcgtgtacacagtcttggtcatcttgttcgcccgcggtgtgttcacgaagatctggcaccatccggccgccgcccacgaggcttggactatggtggatctggccatatatatactgaacgtcttcctgaccgttctggcaataatgcgcgacatcgagacggatgccctgctgcagattatcgagacggccaccaaggggcagtatctcgacttccagcgtccactgcgcctccaccaaatgctgttcatcgtgaagggcttcctggtgtgcatcaccactctgcggctgtggaaggtgctccagtttgcctccgtcttccagcacttcacgcagaccctcttctctgcctggcgggcagtggccagtctgggtgtaattattctggtagtcctcatggccattggcattactttggcggtgccgaatggaaacaacgcagtggtcttcagtcacatggttcagtccgtggtcacctgcatgtggtactcaatgggttttaacggtgacattcatcctgcggatttcttccacggaggtcgtattctagggatcttgctctacctagcactggtcttcctcctggcgattatcttgatgaacgtcttcgcctccgttatctatgactacttcaacgagacgagcaggatcctaaaggagcattcgaatcggtcgtctatcaccttcctggaatttctgcacgtggagtatgcggatctttttggcgatgcctttcgatgcctgcgaaagacgtacgaatcccgtggacatactgttgccgagaatgtggaactagagctaaataggcgggaactgattaagttcaaaagggacctcataaagagcccgcaggagttgaaaagggcactcctgacggaagagcagcgaagtgccgactaccgtttgcgcggagagaagttgttcaagctgatggctatcctgaacctccaggttgagatcctcgagcgaatggtattgggcgacaaagatggcaaactgcccacaccacctgcatccgactccgatcccgacgacatgccggaaatgtatcggaagcgccgttga

SEQ ID NO: 32388 - protein, 707 aa, DROSOPHILA
MVCFVLVSIFSGFMHEPQRFKTMLVTIVLVFFFQYLILEPIRFFIQSIDYATWPQEDPPYRAEEGGPTMDHIGYLKIRLRSLRSELLISEGHTNEMLNQKYKHIAGDLLLYGSYFIALMLMVVLQEDHTNYYNTNNMQRLFWDNTSVTFGLSQVYMKITLVEAFYAQKTNGYEGWWAMEQWQKIGVVRLRQMRPVDCHIGLGKPEWDKKTYAPEWRLPYHRMHYTEKFWRIYDPFVPAEFEPSFLNGLLLNYDHYGYLLNYPEVAGYVVLMMSTKINCLKQIEYLRDYSWLDKNTSALFIDLTMYNADANLFTLITLRVENSPFGIQLPRVHVDSVSMLGNVETRSNSELLILFVYTVLVILFARGVFTKIWHHPAAAHEAWTMVDLAIYILNVFLTVLAIMRDIETDALLQIIETATKGQYLDFQRPLRLHQMLFIVKGFLVCITTLRLWKVLQFASVFQHFTQTLFSAWRAVASLGVIILVVLMAIGITLAVPNGNNAVVFSHMVQSVVTCMWYSMGFNGDIHPADFFHGGRILGILLYLALVFLLAIILMNVFASVIYDYFNETSRILKEHSNRSSITFLEFLHVEYADLFGDAFRCLRKTYESRGHTVAENVELELNRRELIKFKRDLIKSPQELKRALLTEEQRSADYRLRGEKLFKLMAILNLQVEILERMVLGDKDGKLPTPPASDSDPDDMPEMYRKRR

SEQ ID NO: 32389 - DNA, 4605 bp, DROSOPHILA
tgctatgttctatcactattctacaatcgatgggcggccgtcgtctgtgacggacgccagctcaagactatatagctctatattacgattaaataaacttttaattcggatcgctgaaacctgaacaataaaataagtttttcgaatatttacaagcatttttttcatctgtttttgggaagcggaaattacatgcggtcctgttatgttatgtgcgatgtttgaaacccaaacaataataacatattttctttttcactcctaaccgggaaatgggatcaagccatgtccgggagattttgtggtctggttggtctcgtgggttcctcctcttttgggagttatcttaaaagtcggttttaacgactatgcaaaggagatcgttgcttgcaagtcataaagcgcccaaagtgcaggttaggcagttaaccttgacctccacttctggtctctactaatttaagttatggatgtgaaacacgttagcttagttaataggtttgaaaagttcgtatgagtaggtatttaaatacatgtatgtttactatgagcgatgtatattttcatgaaatatgaaataatttaaccttaggttataattaaatgtcaaatttgagatatagttaaaatgtgatttgaacttatgacttttaaaatattgaatcgatttttttaatataattattgattatcactaaatgttatcatttccctttttaaaaagtatttcacttatatacaaaattagagctatggctagtcagctccttcgtgagtgcataaccacttcggtttcatcacgccccgaagatatttctagttacttcgcagctatcttcagattttcatggtcaatgcgttttttaatatctctttcttttccacttgcctgggagcacgaattcgcctgagcaattaatttatttatctgtctgtagcttgctgttttgctttcgcagccaaactctattaaactttctaattaagctgttgcacttgggccgatataaccgacgctttttaggcgccgccagctcccagttgcaatcagtcatcgttgcgatccgcgatgaggcagaagctcaggcccacattcatcaagcgataggcaagccgagtggttcgagcagcagatcccggaaagatgttcatgcagtcggcagtcggtcaaggacaacgggacactcgaacgcgactggatccttgctggactaaaggcaggcggtggattatgggcctgatcctggtgtacacaatagtgagttgaggattcgaacctcttatacaaaagggttttttttttattacgcagtacagtgtaattggacaatttttgtttgttgtttacatattttgagtaacaattacgcgaaaatctagacatgaggaaagggggccgtaattgtacatctcccaattatctcttatctttgatttcattttgtgtgtacccgcagatgtctctcatggtagtgaaggtcgcctccgcagccactctttatcagcagcaccagcagcagcaatctctgaacgacattgagtcctcagcagacgagccatcccaggccaccacggagatcgagccctcggacagcgacagcgacatcgagaagatgcgggccaagctgcagcaactgcagcacgagcagcagcaacagtacctgcgccagcagcaacagcaactgcagctgcatctgcaacagatgcaggcgacgcagggagctgctggggaaaccgcctacttattggagcgtgccgatagcaacattgcacccatctacgggacgtggcgcacgaaagcgcaacggcagcaacacgcaacatcttcgcacgaaacggacgacgcccatgtttacgagcgcctgcccaagcgatcggcgaccatgacgccactgagggggttgctgcgagatcagatgccacgccccccgcgcctcaccacccaggatatgcaattgtccctgggctcaccctctccgccaccggcgcccacaaagggtttgctacgaaggcagtactccgaaacgccgggaacccgagcacttcgaggtcaggatgagttcaagccaaagccgttccacttcccctacgatggtccgatgcccgaacagttcactaagggtgagggtcgacccgagcttaacaacatccaggatatcctgcagcatctgcacatcggaggcttagcgcccagtaagctgccaccaatggtgatgatgcccacgggtctacacatcgccggtacgttcaagaatttcaagtccagtggaatagggaacttctttcgcggcaagcgcaacaagaaacagatgcagttcaccataccgatgcccatgttccccatgatgtctatgccaatgccatggtataatcccggtgtgatgccccaccaaagggtggccatcgatcaactgtatccttacaagccccgttcaccgcaggatgtaaatctgttagccatgcagccagtgggaaacggaaaaccattgtctaaaaagaagaaaaagaagcaacaacagcaccttcagcagcaactgcagcaacaacatcagcaacaacagcagcaacaacagctactggagcatggcagtcagcagcattttgtggcagatcccttcgtgcaccagcattttgcacagcctgtggtcacgctgaatgccacacggcaaccgcatctgaaaagggttccttttaaggtcaatctggacatatatcctgtgctgccgccttcgcggcctgcctctgtgatgcggcatccatttcagcaggactatgcccttccctcgcctgctgcattgactggtaccacggctgccgcgtatcacatgggtcagggcatttaccagactccctttaagttccccacccaacagcccgtagtcttccctgaccaggctaccagatacagtcagcagcaggctctgtaccacaaccaggcccacaagtttccgccaccgaagagcgtgcatcctgaggagcccatttacggacagagttccggacagggtcaaagtcaagtggatagccaaacgaaccccatcatggtgcacttgaacgtgttccccaagcagaaaccaactgccacgattcgcgcctccaccaatccattctacaatcacaacatgcaacgcaacatgatcaactcgaatgacttgccgccacccaatccgcccagtcccattgaaccaagacaagaagtcaatggcagtggctctggtctgcaacaacagcagcagcagcaacaccatccgtcgcagcagcagcaacaccatccgtcgcataatcaaacccaacagcaacaggaagcgacacaacagcaacatctgcaatcccagccaggaaatcgatccagtaccatttcgcgcagcgatcacctgccgcttattgactttgagcatcctattgtggcggctgagctcccagatcattccgccttgggcagcattcggcaggattatcgatataggaaaacacctgcggatgagcactatcgttatccgaagagcgccaatatcgaacagatggcagcggaggcccagaccgcctcgcttttccgctttccggttgaggatctgatacagttccaggtggacgatgctctctaaccactaactacgctagttgtacttagagtaagttaaggctagctgttccgcattgcaaggacttaccttgaataattaaatgaaatatagctaaattgaatgttttgtatttataatattattaataaaggtatctcaatttctattaacagacgcgattcttattattcaaatcatgttttggcattttatcagaattaatttattcggtagtgggttgataaaaaatgaatagattttgctaatatgtagattgatagcgcataatttaatgtagttcaagttgtacaaattcttaaggcttatttttaatcggatcatgaagttaatttacatctctgtatgtaatttttattacaaatgttgtagtttgcttcatattaaattaaattaaagcagggctatggattgtaaataggaacccctttaaaaggtaggcaataatgaatcccgaaaatacttttttcgtgagcccaaaagtgggcttcaaacttcactgccagttttcattgccaattccattgcgcgtgcgcgaaacccgcagcaaaacagaaccggcaagagccgaaaaccagtattccgagccgagtctttgtgagcgcctctcattggaaagaacgggcagcaacaggtaagtccggccagaaggtaagcgagcgtcgcttcgtacagacgtggtcgcgcttgtaactcgactcaaatcggcatccgcaagatactttagagcaatccgtagcagcaaaaacaacaagagcagcaaggcgcaagatcaagtttcggaccctagcgtcatccgttgtgcggtttcgagtgtgtgtgttatttgcgtgcgttggccaaaaccgaaaatataaccgtggaatagttgaccagaaatggtcattccgcattagtgttaattatagtttatttgcccgaactgcttgccctaagccgaccgcccaaattgcatttacttcctgctttttcgccacgctctctccttcttcctctccgccat

SEQ ID NO: 32390 - DNA, 1501 bp, DROSOPHILA
gccgatataaccgacgctttttaggcgccgccagctcccaatgcaggcgacgcagggagctgctggggaaaccgcctacttattggagcgtgccgatagcaacattgcacccatctacgggacgtggcgcacgaaagcgcaacggcagcaacacgcaacatcttcgcacgaaacggacgacgcccatgtttacgagcgcctgcccaagcgatcggcgaccatgacgccactgagggggttgctgcgagatcagatgccacgccccccgcgcctcaccacccaggatatgcaattgtccctgggctcaccctctccgccaccggcgcccacaaagggtttgctacgaaggcagtactccgaaacgccgggaacccgagcacttcgaggtcaggatgagttcaagccaaagccgttccacttcccctacgatggtccgatgcccgaacagttcactaagggtgagggtcgacccgagcttaacaacatccaggatatcctgcagcatctgcacatcggaggcttagcgcccagtaagctgccaccaatggtgatgatgcccacgggtctacacatcgccggtacgttcaagaatttcaagtccagtggaatagggaacttctttcgcggcaagcgcaacaagaaacagatgcagttcaccataccgatgcccatgttccccatgatgtctatgccaatgccatggtataatcccgatcccttcgtgcaccagcattttgcacagcctgtggtcacgctgaatgccacacggcaaccgcatctgaaaagggttccttttaaggtcaatctggacatatatcctgtgctgccgccttcgcggcctgcctctgtgatgcggcatccatttcagcaggactatgcccttccctcgcctgctgcattgactggtaccacggctgccgcgtatcacatgggtcagggcatttaccagactccctttaagttccccacccaacagcccgtagtcttccctgaccaggctaccagatacagtcagcagcaggctctgtaccacaaccaggcccacaagtttccgccaccgaagagcgtgcatcctgaggagcccatttacggacagagttccggacagggtcaaagtcaagtggatagccaaacgaaccccatcatggtgcacttgaacgtgttccccaagcagaaaccaactgccacgattcgcgcctccaccaatccattctacaatcacaacatgcaacgcaacatgatcaactcgaatgacttgccgccacccaatccgcccagtcccattgaaccaagacaagaagtcaatggcagtggctctgatcattccgccttgggcagcattcggcaggattatcgatataggaaaacacctgcggatgagcactatcgttatccgaagagcgccaatatcgaacagatggcagcggaggcccagaccgcctcgcttttccgctttccggttgaggatctgatacagttccaggtggacgatgctctctaa

SEQ ID NO: 32391 - protein, 486 aa, DROSOPHILA
MQATQGAAGETAYLLERADSNIAPIYGTWRTKAQRQQHATSSHETDDAHVYERLPKRSATMTPLRGLLRDQMPRPPRLTTQDMQLSLGSPSPPPAPTKGLLRRQYSETPGTRALRGQDEFKPKPFHFPYDGPMPEQFTKGEGRPELNNIQDILQHLHIGGLAPSKLPPMVMMPTGLHIAGTFKNFKSSGIGNFFRGKRNKKQMQFTIPMPMFPMMSMPMPWYNPDPFVHQHFAQPVVTLNATRQPHLKRVPFKVNLDIYPVLPPSRPASVMRHPFQQDYALPSPAALTGTTAAAYHMGQGIYQTPFKFPTQQPVVFPDQATRYSQQQALYHNQAHKFPPPKSVHPEEPIYGQSSGQGQSQVDSQTNPIMVHLNVFPKQKPTATIRASTNPFYNHNMQRNMINSNDLPPPNPPSPIEPRQEVNGSGSDHSALGSIRQDYRYRKTPADEHYRYPKSANIEQMAAEAQTASLFRFPVEDLIQFQVDDAL

SEQ ID NO: 32392 - DNA, 2537 bp, DROSOPHILA
gagatggccgcgtctttgaatgccaactatgtggttctgcccaagatacgatgcaagagctttcttcgtgccgtgcggcagaccttgaactcggacttcaaccttaagttgatcggaatgatagatttcgagtatgtgcgaagtaacatgcttgatttgctaggcatcattaagcttgtggactacatttggatacccgacatgttcaacgtaaactgttgcgtatataactacattatggaggacgtgcttccgatttcgcagtgccagaagaagccagtcattggcactgttccgctggagcgttgcagtgattttaagcgatttgagttgcacgatttcctgtggaaggtcgacgctattcacatccaaaaaagtccatggtgcaacaaatatccgctgatagtcaaaaagctgatgcccataaaagattatcgtgttggcgcggtccagaataagatggtactgaagagcatcctaacctcataccagaccattgtgaattttattatccgcacaattagctcgattgagtgtcaagccatatttttgttcaccacttgcgagaccgccagcgtggccctttcgcgtattgagatctattgcccagtatatgtgatggtgccgctggaggagacagatgatgcggaaaccattacctgcaaggtggagctcgctcgtgcgcttcatttgcgccgtaacatgcacccggttctttacaccaaggatctcaacgagtgcagctacagtccgattgagtttggagtggactttatgaggaagaagggctgcttggaggttggagactttgtagttaccctggaggtgggcaaagaggataaggataacgtggtcatcggcataggagaggatgtttgcatcctgcgggcattttacgtgtcgccgctctttgcctgcgagaagtttaagtacggtggataactttacggcgtgcagttgtgcagattacacagataataaactctaaattaaatgtatcttatgccaccaactcactttttcgggattcctgacctccgatgtcgctgtcggatgatatctcctctagcgagatgtgttctgaaatgagactttataatgaatggtgggtttatagggcaaggaagtgattcaacataccttctttgtgctccacatcggaatcttcggagctttcagtgtctgtgggacatttggtgttttctattatggattttagccgcttcgtagacaagcagagtaactcctccagacaaagttcctcgatttcgtctagtggcgttttctgcgtgaaattattgataaatagctttttataaaaagaactataacacacctttagaaactctggggctaggttcaaaatggttttcggttttaaggtcccaaatatctgtttcaccaattccaggcggtcgtctatgtaatgggacatgggatgcagctttcgttcctcctcgatcttctccttcttaatgctaatgggcttggggatttggtcgcccttgctggattttttcgccttcaagccactcattttatccaatttgttgtcaaaataaaaaccaagtaatttcggtctttcgggcagcgttgccactactatttataccttgtggacagtgggacgaaggcaacaattttgtgggattagtgtgaatggctctattttaaaattcaaaacgcaaagaaaaacgagcagtattacgaaaatgtatttaataaaaattatttcgtatactagggaatggcacatagaatcaataattaaaaatgtacaatggtgtatattgcctttaggactgtattatccactgtgcgctgttgttaacagtgttattgttttttgtacagaacagctgattatcaagcggtgtaggttgaattaaattgtgggagtgttagttgtcttaaaattgttaaggtaagttgatgtattaattgaacttgtaatccatcagtgtaaaagtgtttacggaaagcggtgatagcaattttatatcagcaaacagtttcttgtcgtagatatcatgtgaaatccgttagtaaggtgttacgtgagaaatagtacttgtggcagaattttagagtttggcttttattaatggggatctgttactagtgtaagttacatttaaacacattagtccaatatatatttagcattttctatatttttgtttttttgacatgccgctagaaaagtaacagaaactgttaagtaacagtgatggcacatttaggttatttcattggggagcgtgttttgacaactctgctgcggccacactgaacatatgttccggggagaatggctgcgatttcgcgtcggtaaaaatagcaaatactcgttaatgtgctgtgggaacgcttcctccccggccccaaagtggccccgaagaaagtgagcaaatgtgcgcgccgcaagatagtcgccgccgaacaaacgatagtgacgaaagtgatttaattcaactaccagcactcccgcaaatacgatgagtatgtcgcgcggcggcaacacaactctggacttg

SEQ ID NO: 32393 - DNA, 360 bp, DROSOPHILA
atgagtggcttgaaggcgaaaaaatccagcaagggcgaccaaatccccaagcccattagcattaagaaggagaagatcgaggaggaacgaaagctgcatcccatgtcccattacatagacgaccgcctggaattgaaaacgccactagacgaaatcgaggaactttgtctggaggagttactctgcttgtctacgaagcggctaaaatccataatagaaaacaccaaatgtcccacagacactgaaagctccgaagattccgatgtggagcacaaagaagaacacatctcgctagaggagatatcatccgacagcgacatcggaggtcaggaatcccgaaaaagtgagttggtggcataa

SEQ ID NO: 32394 - protein, 119 aa, DROSOPHILA
MSGLKAKKSSKGDQIPKPISIKKEKIEEERKLHPMSHYIDDRLELKTPLDEIEELCLEELLCLSTKRLKSIIENTKCPTDTESSEDSDVEHKEEHISLEEISSDSDIGGQESRKSELVA

SEQ ID NO: 32395 - DNA, 3335 bp, DROSOPHILA
aggacatgcgtattagataagccaaatataaaaatgacactcagagaacaactctccggaccattttttgttgttgttgctaaaacagtttatcaacacgcccgagtctctgataaaacaatcatcgtttatggtgcaacacgcttcaaccgccgccccccagcagcataattgagatatagtccagtgaccagaccagtaacaccgaactggggtggctaacaaatcgagtcgagtggaatagcaaggagaacagtgaaaagtggtgggagtagactcaagtgtagagtggtgtggacatgttctgcaaccgcatgattagaaattgagcaaagtcgatgataaagcggcgggtggagctgaatcccttacatgtatagaaaaacgggtgggaagccgaaactgggttaaaccaaaacccttccatttaaatgcgtacccaatgattttttagcttgtttatgacaagtaatatcaatgcacaagcgtaaccttcgtgcggctcgtttaactgcctattccaggctgctcagctcacgcaaactcttcttaaacaaaaaagcacagttatcgcattttcttttaaactacaaaacatagctgaaaactacaaataaacatgtcgacgcatcgaatacataaataaatctttttaagtaatatatatgaattcaatttaaataaatactaaatccaaaaactgcgttacacggctttttcaacccttacacggcttgttactcaaactaaaaacgatggcttaaaattatatttataaaaagcaactacttctacacaacgtatacttactctacacgaatagagtatcgaaaagacgaataagaaattaaatatccgcttagcacgatatattcaaattttttgttgccttccgcccccgaggacagcaaatttttatttgactttttatatgccatataaactagggccgtgcgtcagtacgcgacttttcaataaatcccgcccttagcggctaaacttatttatcccccttgctactgtttgaagttttacgctgtcggtgctgcagaagctcctggtattgctctatggatccgtcttcatgcttggaagtaaatgaatccggcttttcaaccttggcctgctcctcgccggcggtgactttggtgcgcttcgatttcttgagcttgtcacggacgcgttttcccaaacgcgattcggccagcacctggctgaccttggagctcttcatgtagcgtgaacgccaggactacaaacaaaaggattattgtgttgaaaaaaaggtactgttttgaggagcatttaaaaatacctcggagtctgcctgctgtagtttgtcgcgttcatcctcgcttgtgtccagggatatgacatcgttgtccagttcctcaggatcctgcatcttctcctttttctcgcttttaatgcttacccaaggtgaatcgtcatccttcgtcatttcctcaatcatttctagatccccacctattgaaatgacgtcgtcgttttgatcttcgtcgtcaagggcagttggctcggctgcactcggcttctttggctctgcagggggattagctgggagagcttcttccgacggtggttccttatcccctgttttatctagcttatcagacgtatccgatacttctggcttattactttccagttctttcgaaatagctgctgcttctgactctgttggctcatctggattggctgggtcaactaccttagctggctcttcgggttcatcgcgcacttctccctcctctggctcgctctcaacgactggggctggtgggtccgattcgacttgcttagttgtagttgtttcagttgtcttctttttggtggcctcatcatccgtactgtcgctgatcagcagtgtttcgggttccgtttgtataggtatcacatctggtgaggctgaacgtgatttggaacgtggcagtttgtttaaatcgttagatgcaaccaaagtttcggatgaagtagtagatgttggaggtttgacttccttttctggcgactttgaagtccgcctatagtttcttttgatcttgattcttttgcggggcgcttcctgctccttgctgctgctatcaggctgggatggagatgttggtctagctgattcctgcgatttgcgcttgctcgaatccgtttttttagtgctgcgtttatccttttcctttcgctgtactttctccactggtacttcgtcaatatcatcatctgacttgacctctattttggtgattggctccattgccagttgggagcggatggccctggcacgtgcctgaagttccaacagttccagcacgctcatttgaccacccgctgtgggagaaaagaataccttagtaacctgaacaaatttgccgtcaaacgggcgcacagtctcagatggctgttgttatcatactttcggtcgatttcgattagtttttatacattcgtaaagtttgtacttacactctttgttttcattcccattgttcgttttcttggatctaagcttcttcttggctgaaaatcagacaagattgacacagattgcattacaaattgtgctaaagtatacataaattaactgcacgccaggatgccgatcaaccagaaagaagtaacgccgcaactagacagtcagacaggtgaggatcagggggaggaggaggagcagccggaagacgagaatcgtctggagaagtttacggtgcgtcttaatggacaacatgacctggagcagcgtttaaaggatttcaaagcggcatgcgaggctcacgagaagcacgccagacggcgaaaacggaagagatactatcatttgggtcttgtggccaagctggtgacggaaaccactcacgacgagctgcgacgtatgctggaaaatggaacctacacctttcacgtggatacggtgggcaacaagcccgatgaactgaaagccattttggacaccatgaacattgcgatatcggcgcattctgcagagagggaactacgtctgacaactggcttggctctggagattaacggcgagtgctgtcgcgttgggagactgaggaacaactgcaccgtgatgctggcacgaggtggggtggtcacactcaccacggatgagtcctaccgctacaaaggctttaaagaaatagtgtacgtaatcaatctgcggtgttatctcgcctccgttcagttgggcgatattgtgatgatcggacgtgaagttagaggtaaggtggtgaagaccctgcgggaagcactaaccgtgatgatcatagatgccggtctggtagcctcctacgactttatagagcttcctagacagt

SEQ ID NO: 32396 - DNA, 1272 bp, DROSOPHILA
atgagcgtgctggaactgttggaacttcaggcacgtgccagggccatccgctcccaactggcaatggagccaatcaccaaaatagaggtcaagtcagatgatgatattgacgaagtaccagtggagaaagtacagcgaaaggaaaaggataaacgcagcactaaaaaaacggattcgagcaagcgcaaatcgcaggaatcagctagaccaacatctccatcccagcctgatagcagcagcaaggagcaggaagcgccccgcaaaagaatcaagatcaaaagaaactataggcggacttcaaagtcgccagaaaaggaagtcaaacctccaacatctactacttcatccgaaactttggttgcatctaacgatttaaacaaactgccacgttccaaatcacgttcagcctcaccagatgtgatacctatacaaacggaacccgaaacactgctgatcagcgacagtacggatgatgaggccaccaaaaagaagacaactgaaacaactacaactaagcaagtcgaatcggacccaccagccccagtcgttgagagcgagccagaggagggagaagtgcgcgatgaacccgaagagccagctaaggtagttgacccagccaatccagatgagccaacagagtcagaagcagcagctatttcgaaagaactggaaagtaataagccagaagtatcggatacgtctgataagctagataaaacaggggataaggaaccaccgtcggaagaagctctcccagctaatccccctgcagagccaaagaagccgagtgcagccgagccaactgcccttgacgacgaagatcaaaacgacgacgtcatttcaataggtggggatctagaaatgattgaggaaatgacgaaggatgacgattcaccttgggtaagcattaaaagcgagaaaaaggagaagatgcaggatcctgaggaactggacaacgatgtcatatccctggacacaagcgaggatgaacgcgacaaactacagcaggcagactccgagtcctggcgttcacgctacatgaagagctccaaggtcagccaggtgctggccgaatcgcgtttgggaaaacgcgtccgtgacaagctcaagaaatcgaagcgcaccaaagtcaccgccggcgaggagcaggccaaggttgaaaagccggattcatttacttccaagcatgaagacggatccatagagcaataccaggagcttctgcagcaccgacagcgtaaaacttcaaacagtagcaagggggataaataa

SEQ ID NO: 32397 - protein, 423 aa, DROSOPHILA
MSVLELLELQARARAIRSQLAMEPITKIEVKSDDDIDEVPVEKVQRKEKDKRSTKKTDSSKRKSQESARPTSPSQPDSSSKEQEAPRKRIKIKRNYRRTSKSPEKEVKPPTSTTSSETLVASNDLNKLPRSKSRSASPDVIPIQTEPETLLISDSTDDEATKKKTTETTTTKQVESDPPAPVVESEPEEGEVRDEPEEPAKVVDPANPDEPTESEAAAISKELESNKPEVSDTSDKLDKTGDKEPPSEEALPANPPAEPKKPSAAEPTALDDEDQNDDVISIGGDLEMIEEMTKDDDSPWVSIKSEKKEKMQDPEELDNDVISLDTSEDERDKLQQADSESWRSRYMKSSKVSQVLAESRLGKRVRDKLKKSKRTKVTAGEEQAKVEKPDSFTSKHEDGSIEQYQELLQHRQRKTSNSSKGDK

SEQ ID NO: 32398 - DNA, 12122 bp, DROSOPHILA
tgtatggctcgagttaatcgattccacataaaaatatagtttagccacgcagaactgcattgaggtggctcccatggtggagtatcattaggccagccactaaaatgctaatcgatccgatccgagctcaacaggtacaaatatatctttatatatgctataagttggacttggtcttcttcctctgctttgcataatgcccacacacacacacacaggtacgcacgcacactcacacacatacacacattggccacaaagtttgaatcttgtattaccagctgacgtatttgctaactgatgaattttatacaaatttgatacactcgaggtgaacttgattttgttcggcggtgttgttttgtgtcgttttatgttttcgcatagaagcatctatgtctaaatgtatcgccgtgcagaagaagcagcgcctcaacgagttttgttcgcggttttattttatatatgaaaattcaaattaaagctaataaatacttaggcgttcattgtggctctagtccgagccgaactctatctgaaattcattagaaaactggtccatctaaccttcgagacgaaaagatgccaccgagagcggggattgggcaggggacttccaactgattgacgtctttggattgcataatccaattaagttggtgctaatcgcctgaaatgcgatgtcaagtcgagttaatgccacgagacatgtaaggatactgcaggattggggcctccttgaaggttgcatagcgtgtccaagtcaaggccccgaaaggcggaagacagcgggatgctcccaaaaactccgtggatgaatgtgtggtcttggacacaggtcaacaaatcataaagcaacagctaaaatttatgaccaggtggaaattatgagggctttttgtggctttacaagtgcagagtggtgttcgtggctgccattacgatcagacacttctcatgccaccaccgatcgcccagacttcgataaattatgaatatatatatgtatataatttgtggtgttcgtcgtgtctgtctcagtgatatcttatggagcttctttaaatcaaaattaaatacagacttgcacgaagagtctaagggtgaataccctttagttcaagctttgtatattttgacaatatataaagaattattattttatattataaattttataatcccattttgcttcctgtttcaaaaatatgattattgaaactgctaaatttctagtattttggtgcatgaataatttgttagttaagtaagcttacttacttaagatagaaaaccaattttcactttttttgaaagtttacaaaaacaatgggaaatttttaagatatttaagctggtaacaaataaaaatatttaactattaaaaaaaatatatatttatttttttttaagaacttgctaagtgatctatgttaacctgtaaataaaagggtgtgctcgatgagaaataaaagactgacaaatttgcatgtctgccttttaatttggcttttcaggcgtagaatcgacgctgtcaaaagtgttggtctgcctacaagatataagtaaatggcaatatattatatactgggacgaaccagttggctattgaaatgaggcgatataaccagttgtccagatcccggggctaaaacaaatgaattttattcgagattaaaattttggctcgttgtttttatttgggcagaccgtgtagaatttacacatccacgtcaaagccttaagcctgatctgtagctccaattcatacattatatgtatctcatttgtgtatatttaattttgagttcaatttcggtcctaaacagccttgtggccgtcgacgcgtgtgactctgagtgctctagtttctgttttatttgcgctccaaaatgtttgtgcctccgacgaggggagtaacgtgttgagtgcttgtatccgattgccactgacccaagtaggctaatttggcaccagagatgggtaaaggggtgacgtgaagtgctctcttgagttggccattaatcaggtctcgatgtgagccatcatctcaagctccatttcaagcaccttccgttttttgtgacccacgtagcatggggtctcgagctgaacttgatctcgagacggggtgtcgccttaagtgaacaataggctcaattctgtagtccttgcatgattgatgatagcggtccgcagatcttgtaaattctgttcaagcccgacactttcgctttaaaaggccagtcagtcgagtcgagttggttaaactttcaagggtcactcggttatgtaatggtcgaagcacagattctgtgtaaccggttctcatggatgctggctacctgttcgtcccacagttcccagcgcggtgaccctcagcggttcccaaaaaatggtctgtgtgttttatgcggtgcggcaaggatcccaatggcaatggcccgcaattgtggcccataaattgctggtcaaaaactggttaacgctcgcctgccggtgtccttgataaggcttattaatatttttgttgtttctgggtctttcgcaggggaaaaacacgtatttttcttttttttttacttctctcgccgcaccgtttataatttgcagctttttgtttcaagtaaatttcacagattttaaatgaatatcaaacatcatttattcatcgtattcgtagacttggaatatccattaactaaatgccgttaacaagttgtctatgcgattgctaacaattattcactcgcatcgcaaacattttacattttgccaaatcatattcataaatttacggtcggtatttctgttttgaattcttctaactgtactttttattgtttgaacaaaggcgagcgacaacttgttgaaagaattaattaggtctttctggccgatccgaatcaaattaaggtgaatgtttcacagatcagtggtcgataagtcaggctttatttatttgcattcagcccatctagatatggttaaaagacttaatcgatattcgaatacattttgtcagcctgattaattgagtcaatgaatgaaatatgtcttttattcaagggcgaaataacccgaatatagttcagtttaatacgtaattgtcgtctatttcgttgtatatacatacttaagagtattattatagaaggatttaaggactcaattatattttaatcaagactttccaactctctaatttaaagatattttggacttgggtttcaggaacttctaaaaattggtaaaaatttttcctactaagaactttccatttcaaagttgctgtgttgtaaaatccagttcgaaccttttataaaacctttggtaattccacttcctagaccagaactcgaatccaaatttcaaactgagcacaaaaaagcgaaacaatgtggcaaactagttagtcgggttgggcgtctgtttagctggcggatttacataagtataaatcttaagcagaaaacaatatagtccgccttgagtgaagccatgtagaagttaccagagattcgcgttatgtattgggacaaatttgcataaatcataagcacaattaacaatctttcggtgctcccttctctgccaaccgctgacgcaggtgacgtgacatttgactcggaaatttatatgattctctccaagacaagatccgcgaaatttgaatatccacgcactctgagacgcttctttatccattcaaagatgcgtgaatcttctgggtgggtagagagtcatcggccttcttataaatattcagtggcgacatcttcttctcggttttctattcttcggcgaacactttttattagccgatttgcggttgagtttttcgagttgctggccaagagacttgatttcaattttaatggccggtgcgtgagggtatttaatttgctctaggattagataagtaatattaattgtctacctgaatgggtacacgtctttaaaaacaagcgtcgaggcatttaagaatacaattaatctactcagcagtttcaacatgatttatataatatttaattgtgttacaaaaaatttgcatctgcagaatatggttctttgtgacgatttttttttttgtatttaccagaaaaagagtgtagttagttttatgatttaagatttgtttatctcgcttctcgttttgtttttgatgactaaaaatcccatttatacaaaataatgttcggaaatagcgccaagacaagatctccattctgataaaacataatgaaaaactagatattatgatttccgcgcccgaagacaaaggctcataacaattcacatacgagctctgaaacttccctagattaacaaatatatttttaaattatccaaatagcaacctgtctagaatgcggtttagaacaggctcaagcgacggtcttgtttgattcgaaaaccgctaacgtccttcagtggagtccaaaatttgaggcagcaaattatcagacactcggtatggaagttgaataatcgtctgttgcaatgtcggatgaggtgacaaaaaaaggcttttcctctagccggcagtcaagaagcattcgatgagccaaaaactaaaaaagaaaaaaataataaaaacaattcagtcgcttcagttatccgcaatgacaaatttgaaatgtcagcagtcgccgccaagtgtcattgcctttgtgaagatgtgcgaagcaagttatgacccgaataagttagccagcaattatgtaataaaagacaagaattaatgtggctctaagtggcgtctgatggccgcaggggtgacttccgttcggctgcacttcctctgggtgttgttccgccgttttatctagaccctgactacccagtgaccacgcacctttgggccgaaagagttcaaagtcacatctattttgggcccgctcatgactgcgcgtggccagtgggtgtcactctgattggttcattaaaatcaagacgtgactgcttgcgaataaataaattctagttattaaactggcgaaatgcaggcgatgacaaatgccgaaacccgtttgggagtcgctcgaagaatgcagcactgaacaccgatcaccgatcaccgatcatcgagatcttcgagtgtgcgtttaaaggtcactcggctgacacggagtcagagatgagctgagccgagctgagcctaccttaacattcaactccggctgccatctgctgacccccgggcacacgcatttttggccaagtcaaccggttcatgttcaattggccgactccaactccaacatcgactcgcaactccaactgcatttaggcctgatccgaggggtaagtgccattagccaacgcctgatcttctcggccttatttgccttggcaagcttcgttgggagccttgacttggctctcgatcgtcgagccagcttcggcttgtctcatcgattgatgaaattcggtggctcggacccatttaccaaattaaatgctgcacgacaacgtgtttaacactcgccgcagacttctgccaaaagtacgagcatatttgccagccatcggagttggctaaatagaaatgccaacaagagcaggcgttggtggatggatggtcggatggccggatggtgcgtctggcttagttgctcttctgccataattgctgggccttaatttggctgcctttttgtcttagccatgttatctggctgttaactcacaaacatcaaacaaccgagactggttggctttctggtcagcattcagctgtcggcgtcgctgtcgacgaaggctgaggcatcagcagcggcagagacttcgtattcggctcatcttcatctggccaaaacgctttcgatttcggcttttggccgtgtgttaacagctgtcgcccaggtgaagatgcctctgccgacgccgctgcccaagtgggcagatgctgggtccgagtatatatagaaaatctacaagttttgatgctttagttggtattccacactcgacctagaagttaaaccaacttagcttggcatcgatcaaattcaatcgtccattgaatttgatacgatcggtcgcgtcttctcctttccgatcctcacagtaccgtccgcaaggattattcacgcacaccgcctaggattacctacgcacccgggattaccgcaactgccgtttgtagcagtccgaaagtgtacaccatggtaaccgaacccagttccaatccaatctaaaccaaaacgaacaatgatcgtgtgcaaagtgcaaaataacgaaacaagtgtccctcggtgtgaagacaaacaagacagacatttcgcaaaggaaaagcagtgcagatgaagataaaaagtatcagttttgttggtccaaaatatttagggagtttccacgttttatagtttgggcttgtgacagtacagaaaataattgaacgaatacgaattttcaatgatatttgtattcaaactttaattttaaattaaaacatttcttgtgttaaaataatgtgtcagctatttagcgctagatcttcagaaatttattaatccgaacttgtataaaaggatactaaaaaagcatgttctacaattttatagggatacaatcataaaaaagggttataagataagatagggcctttaagttcattcaaaatcattccgatttttctctgtgcatacccaagcatcgcaaacaagaagaaatagcaaataaattgccaacaccgactgcagttccaattcaatcgccatctatttgcatttcacattttgtcgagggtccagctctggacccgggctatcatcgcgagttaagagttgaccagatggcggttgacatttaagccatgtagaaattgagcaagtggcatcgagtgcaatgttacgcatacgccgtgttggccgcccacagagcaaatcgccttggcgcgatccgcaatttgcgtattaagtcattaggatggaccagctgcatgtgcattctgccatgtggcggcagtttctatgtcagcattgacatggctgaagatgaaattaaaacttgtttttttttccataattttcgcttttgcttctgacatttgctagtcgcaatttgcgattggcgtatttaggtaaatagccataaaaacgttgccttaagttagattcttgacgttgccattgaatagacgtccattaatcaccatcattgttgccaaagaagatttcatttgttaaagggccgactgatcttttccccagactttaattcacccaaatctctcacagtttcggaaaaataaagttgccccaaaagtcttggcattggggctctgccctcgaggcggtgtgaatcagattaattagctgccaattagctcactgaacagtcgagggaatcggtttgcccctgcaaatatctctccaagtcctttcactttctaacctttaagcaccacccgccataagtcaaacccgatttggttctcgatatcctcagctcaattgtggctgatatttaaaacaagttagaacagcaaaaattttaggttcattagcataaattatttaaaatcatttacatacaaagatcaaatatttttgaaattagcaaacaatcagaaaccaacaaaaaaaataaatgaaactggacccagtcgattttggaggtatggcttaaaatctaacagatttggttataaatgacaaccggggcttactattcttcgcatgccagatgcgtatgctaattttgcgttttctcactagttttatggccagtctttgctgattattatataatcatggctagaactggtctggagtttggggcccggatccgggccggtttctttcataatcggctatttttatagcccccgaaaattctccgtcagccaattaattgagctcatcgacactggccatctgcggccatcgacgagcactttcattaactaacaatgaccttgccgaaactccagcgacaaatgcaaataaacccgctgacagcatcgtcggaagccataattcaggggctacttcctcggatccccattgagcttcggatctgttgtgtcgctccgcatttgcatgggcattatgtatcaatcgcgtcaatctgcgatatttacatacatagctccgggggaggggactgacctagagatgctaatgcccgtcaaagttgaatgtctgcgttagcatttcgggtgattttcaatgcattatggtaaatcgattcgccagcttggctgtttgttggctgaactttaccacagttttgaactgcaggccagcggagttgccttgcctcctccgaccccgaccaagttgccacgaagcgtgaataggcgattagcctagaaggcgatcaattagtcgcaatcaggttgttagagccagtcgttagtctgagcacctctgtacggcgacaccatcgaagtccatcaatatgtagcatcactaatcaggctgtgtttttcgttccttccccacagagaagtgcactgttcgtcttggcgctttgcgttgtggctgtggccaccgcatcggccgataaccatgaggtaagtgcggaaatctgacgattccctgccaacaggaacttacaagccactttttacagcgcaagactcgtgccgccgagggatacttctacccccctcccgatgttccattcgatctgcccgtccgcaccacacagccgccaacaaggccgccaacgcgccctcctactaggccacccaccaggccacccaccaggcctcccacgccaccaccaacctacctgccgcccaccaacaagccactgccaccagtgaccacccgtcttcctccaccaccaccaccaccaaggactcctcccccaacgaggcccccaactaggccaccaaccactcgtcctccggcaacctacctgccacccaccaacaagccactgccaccagtgaccacccgtctgcctcctccaccaccaccaccaaggactcctccaccaacgaggcccccaactaagccaccaaccactcgtcctccagcaacctacttgccacccaccaacaagccaccgccaccagtgaccactcgtcgtccaacaccaccaccaacgaggccaccaccaccaccgacccgtgcatcgactccagctcctacctacctgcctcccaccaacaaaccactgccaccagtcaccgtgcgcaccactgttcgcaccactcctcgtccaactcctcctcctaccaagccaccaactcgcccaccaaccacttatctgccacccccaactgtgcgcaccacccgccctctctccaccacccactatggccaccaactaagccaccaaccacttacttgcgctctccgttaccgtgcgcaccacccgtgccacccccccaccaactttggccaccaacccgggcaccaacctacaccaccgaccactcgtcgtctgaccactccggctcctacttacttgccacccaccaacaagcctctgccaccggtcaccgttcggcaccaccgttcggtaccactcctcgtccaactttgcctcctaccaaagccaccaactcgcccaccaaccacttacctgccacccgccaactgtgcgcaccacccgccctcctccaccacccactcgtccaccaactaagccaccaaccacttacttgcctcccgttaccgtgcgcaccacccgtgccaccccaccaccaactcgtcccccaactcgccccccaacccctcctccaactaggccaccaccaccaccaacccgtgcatcgactccagctcctacctacctgcctcccaccaacaaaccactgccaccagtcaccgtgcgcacaactgttcgtaccactcctcgtccaactttgcctcctaccaagccaccaactcgcccaccaaccacttacttgccacccccaagtggtgcgcaccacccgccctcctccaccacccactcgtccaccaactaagccaccaaccacttacttgcctcccgttaccgtgcgcaccacccgtgccaccccaccaccaactcgcccaccaacccggccaccaacctacccacccaccactcgtcgtctaacaaccccggctcctacttacctgccacccaccaacaagcctctgccaccggtcaccgttcgcaccaccgttcgtaccactcctcggccaactctgcctcctaccaagccaccaactcgcccaccaaccacttacctgccacccccaactgtgcgcaccacccgccctcctccaccacccactcggccaccaactaagccaccaaccacttacttgcctcccgttaccgtgcgcaccacccgtgccaccccaccaccaactcgcccaccaacccggccaccaacctacccacccaccactcgtcgtttgacaaccccggctcctacttacctgccacccaccaacaagcctctgccaccggtcaccgttcgcaccaccgttcgtaccactcctcggccaactcttccacccacgaggcccccaactaagccaccaaccacctacctgcctcccccaactgtgcgcaccacccgccctcctccaccacccactcggccaccaactaagccaccaaccacctacctgccccccgtcactgttgtgcgcaccacccgacctcctccaccacccactcgtaggaccaccgtgtacgtgccaccaccaacagtgcgcaccaccgtgtacgtgccaccccctacgcagcgcaccacagtctacgtcccacccgcacccaccaagcaccagggctaccagtaccccgtgcccagcatccccttcaacttctagatctagagatccagatgtgattagggatagggccatcgtctagggctagattgatctagtcaattctcgtacagtctaactttacacgatccggcgccagcggtgctagagggcgccactggtgcgcctgcaaggacgacatttgtttgtttttattttatttttgtaattaatgaatcgcatactcatacagctagggatcattgtaaatgagtgccccaattgtacagctaacagtctatccaactcttgctatgttctatcactattctacaatcgatgggcggccgtcgtctgtgacggacgccagctcaagactatatagctctatattacgattaaataaacttttaattcggatcgctgaaacctgaacaataaaataagtttttcgaatatttacaagcatttttttcatctgtttttgggaagcggaaattacatgcggtcctgttatgttatgtgcgatgtttgaaacccaaacaataataacatattttctttttcactcctaaccgggaaatgggatcaagccatgtccgggagattttgtggtctggttggtctcgtgggttcctcctcttttgggagttatcttaaaagtcggttttaacgactatgcaaaggagatcgttgcttgcaagtcataaagcgcccaaagtgcaggttaggcagttaaccttgacctccacttctggtctctactaatttaagttatggatgtgaaacacgttagcttagttaataggtttgaaaagttcgtatgagtaggtatttaaatacatgtatgtttactatgagcgatgtatattttcatgaaatatgaaataatttaaccttaggttataattaaatgtcaaatttgagatatagttaaaatgtgatttgaacttatgacttttaaaatattgaatcgatttttttaatataattattgattatcactaaatgttatcatttccctttttaaaaagtatttcacttatatacaaaattagagctatggctagtcagctccttcgtgagtgcataaccacttcggtttcatcacgccccgaagatatttctagttacttcgcagctatcttcagattttcatggtcaatgcgttttttaatatctctttcttttccacttgcctgggagcacgaattcgcctgagcaattaatttatttatctgtctgtagcttgctgttttgctttcgcagccaaactctattaaactttctaattaagctgttgcacttgggccgatataaccgacgctttttaggcgccgccagctcccagttgcaatcagtcatcgttgcgatccgcgatgaggcagaagctcaggcccacattca

SEQ ID NO: 32399 - DNA, 844 bp, DROSOPHILA
tatatgtatataatttgtggtgttcgtcgtgtctgtctcaatgccgaaacccgtttgggagtcgctcgaagaatgcagcactgaacaccgatcaccgatcaccgatcatcgagatcttcgagttcaaccggttcatgttcaattggccgactccaactccaacatcgactcgcaactccaactgcatttaggcctgatccgagggacttctgccaaaagtacgagcatatttgccagccatcggagttggctaaatagaaatgccaacaagagcaggcgttggtggatggatggtcggatggccggatgcattcagctgtcggcgtcgctgtcgacgaaggctgaggcatcagcagcggcagagacttcgtattcggctcatcttcatctggccaaaacgctttcgatttcggcttttggccgtgtgttaacagctgtcgcccagagaagtgcactgttcgtcttggcgctttgcgttgtggctgtggccaccgcatcggccgataaccatgaggccaccaccaccaccaacccgtgcatcgactccagctcctacctacctgcctcccaccaacaaaccactgccaccagtcaccgtgcgcacaactgttcgtaccactcctcgtccaactttgcctcctaccaagccaccaactcgcccaccaaccacttacttgccacccccaagtggaccaccgtgtacgtgccaccaccaacagtgcgcaccaccgtgtacgtgccaccccctacgcagcgcaccacagtctacgtcccacccgcacccaccaagcaccagggctaccagtaccccgtgcccagcatccccttcaacttctagaataaa

SEQ ID NO: 32400 - protein, 265 aa, DROSOPHILA
MPKPVWESLEECSTEHRSPITDHRDLRVQPVHVQLADSNSNIDSQLQLHLGLIRGTSAKSTSIFASHRSWLNRNANKSRRWWMDGRMAGCIQLSASLSTKAEASAAAETSYSAHLHLAKTLSISAFGRVLTAVAQRSALFVLALCVVAVATASADNHEATTTTNPCIDSSSYLPASHQQTTATSHRAHNCSYHSSSNFASYQATNSPTNHLLATPKWTTVYVPPPTVRTTVYVPPPTQRTTVYVPPAPTKHQGYQYPVPSIPFNF

SEQ ID NO: 32401 - DNA, 2633 bp, DROSOPHILA
tcgaacatttatatcataaaaaagtaaacagttcagttgcttatttattacgcagaattgccttaagagttcaattaaccattaaatatttttagaggtgaaacaacgtttgccctcacttaatcgacaaaatttgaactaattcgaataaaattaagagtcagaacgaattcacgagtggctaaattattgtttaaaatgaccaagggcgtgaggatttgcaacgatggattgcctggtttgccgaatgaaaggccatattcccgaagaactttagatacgcggcaaaagactcagaagatgtcctccaggccatctaggaaaccattgcagtctctacaaactgtcggtcggaatacgagttccagcctgaagcgcataggaagtccgatctccgaggaagaatttggtgtcctggtgcagcaggattgtaaggcagagcagcatcacaccgatcgccaaaacctggcggacataatccttatgcaggcccgtcgcatcgagaagcagcagcgggagatgaaaagaataaaggcgcactatgagcgccaggtgtccaccatcaagaacaatgccatcatgctggagtcgcatctgcaaaaggtgctggccagtgtcgaaagggatcgggccaagcggattggccaccactgccaggacatgctcggtgccgtggagaagctgcaaaggagcgacatccaagtgaagccgcaatcttcggccaaccaattgctgatccagtatcttcactccaagaaaatttcgcattcgaccaagaagtccaatgaaaacacaagtaggtacaggaatatgttgtgaatcgtattcttgtgtgtacattgtggtttcactgggttttgtggtcagcttaaattagcatatatgtgtattaatagaagtacaagttattataaaataaaataatggcaacaatgaatttattttattttactaagttaattctcaacaaggacggagttgggcacaatcattatctgttctattcctcgtcctcctccgaggcagttacatccacgatcgcgttagacatgctctgttgtatcttttgctggacattggcgtcctggaccaggtgatctggctggatgtagcacaagttggcgcagccgagcaccgggcatcggatgccaatgcggtccattatgatcggcatcaccgagtcgcggtcgtagatgtgaccgcacattttgttgcgcatggggttctttatcagggccttggaccagggatcgtagaacgagaagacctcgctgccggagtcttccataataaggtcctcatcataggcggtgccattcgcttgatcattgacttccgcacccgcctgaccagctgctgattcaactgcttttacgaagttcttgaactcgtgtagattcttgacattgatgcgcttctgctccaccgctttggagcgttccttccagacttcctcgaactcctcgatggtggcgctagagtttttgacctgattcatagccttgttgagcgattggtgctttatcttcatatggactacattcacggcgtgctccacgctctgctcaacgctctgctcgagcaacttcttgatcttcccgccatcgctgaaatcggacacgaaatctgacatttccttgaagaactttttgttttccactaaagtggaaagtgcggaatcagcaaggtaattgaattccattttatccagaatatttaagccaaatgttcaagactgatggttagttaggctagcctattaattagtggtctttgaatggacttatatttataaataacgttgatatttacctgaaattaggtttttaagcaaatgccacgtggaatgtaatcgcttaaaaactggaatcatcgagaatttatcgtaatttacgatatcgatcttaaatcgaaagcacagatttttcggttttcgtttcgttcgaatttttcgatttgtaaaacgggcacttttatctggtcgaaataaaaagtaaatgccttttttttatatcaaatcagatcttatttacaggggaacaaatatcgaaggttgccattgaattgcgtaatcaaaaaaaatttcaattaccggagcatgcttgcataacaacgttttatttaagtttttaaatgtcagatctcggattccccactgaatgccttcaaaatcccaatagacaccccaatcttgaagcaattttccaatagacaagccgtgtgttttggactaccaaaatttcattcgtccagcgcgatgccataccacgatcgagccaaagcccgattggagaacgaggtggttctcctgcggagcgaggtgtcctcgctgcgctccaagcacaaccaacatcgtaagtatcggcaggagcaggtggttctgcaggcgcgtatggaacaggagatccagcttctacagagcgaactagccgcagctcaatcgaatcggaatgagcgggagtgcggtggagccgagcagtgttcagtgttgagccagcagctggagaaacttgacgagcacgtggctaagcaggagaagtacattgccttcctggaggagcagatcaatctcacacgtaacaagtaccagcaacgtatgaccgaagtccggcagaatgccgaactggtggaaa

SEQ ID NO: 32402 - DNA, 633 bp, DROSOPHILA
atgtcagatttcgtgtccgatttcagcgatggcgggaagatcaagaagttgctcgagcagagcgttgagcagagcgtggagcacgccgtgaatgtagtccatatgaagataaagcaccaatcgctcaacaaggctatgaatcaggtcaaaaactctagcgccaccatcgaggagttcgaggaagtctggaaggaacgctccaaagcggtggagcagaagcgcatcaatgtcaagaatctacacgagttcaagaacttcgtaaaagcagttgaatcagcagctggtcaggcgggtgcggaagtcaatgatcaagcgaatggcaccgcctatgatgaggaccttattatggaagactccggcagcgaggtcttctcgttctacgatccctggtccaaggccctgataaagaaccccatgcgcaacaaaatgtgcggtcacatctacgaccgcgactcggtgatgccgatcataatggaccgcattggcatccgatgcccggtgctcggctgcgccaacttgtgctacatccagccagatcacctggtccaggacgccaatgtccagcaaaagatacaacagagcatgtctaacgcgatcgtggatgtaactgcctcggaggaggacgaggaatag

SEQ ID NO: 32403 - protein, 210 aa, DROSOPHILA
MSDFVSDFSDGGKIKKLLEQSVEQSVEHAVNVVHMKIKHQSLNKAMNQVKNSSATIEEFEEVWKERSKAVEQKRINVKNLHEFKNFVKAVESAAGQAGAEVNDQANGTAYDEDLIMEDSGSEVFSFYDPWSKALIKNPMRNKMCGHIYDRDSVMPIIMDRIGIRCPVLGCANLCYIQPDHLVQDANVQQKIQQSMSNAIVDVTASEEDEE

SEQ ID NO: 32404 - DNA, 2858 bp, DROSOPHILA
acgagaagacctcgctgccggagtcttccataataaggtcctcatcataggcggtgccattcgcttgatcattgacttccgcacccgcctgaccagctgctgattcaactgcttttacgaagttcttgaactcgtgtagattcttgacattgatgcgcttctgctccaccgctttggagcgttccttccagacttcctcgaactcctcgatggtggcgctagagtttttgacctgattcatagccttgttgagcgattggtgctttatcttcatatggactacattcacggcgtgctccacgctctgctcaacgctctgctcgagcaacttcttgatcttcccgccatcgctgaaatcggacacgaaatctgacatttccttgaagaactttttgttttccactaaagtggaaagtgcggaatcagcaaggtaattgaattccattttatccagaatatttaagccaaatgttcaagactgatggttagttaggctagcctattaattagtggtctttgaatggacttatatttataaataacgttgatatttacctgaaattaggtttttaagcaaatgccacgtggaatgtaatcgcttaaaaactggaatcatcgagaatttatcgtaatttacgatatcgatcttaaatcgaaagcacagatttttcggttttcgtttcgttcgaatttttcgatttgtaaaacgggcacttttatctggtcgaaataaaaagtaaatgccttttttttatatcaaatcagatcttatttacaggggaacaaatatcgaaggttgccattgaattgcgtaatcaaaaaaaatttcaattaccggagcatgcttgcataacaacgttttatttaagtttttaaatgtcagatctcggattccccactgaatgccttcaaaatcccaatagacaccccaatcttgaagcaattttccaatagacaagccgtgtgttttggactaccaaaatttcattcgtccagcgcgatgccataccacgatcgagccaaagcccgattggagaacgaggtggttctcctgcggagcgaggtgtcctcgctgcgctccaagcacaaccaacatcgtaagtatcggcaggagcaggtggttctgcaggcgcgtatggaacaggagatccagcttctacagagcgaactagccgcagctcaatcgaatcggaatgagcgggagtgcggtggagccgagcagtgttcagtgttgagccagcagctggagaaacttgacgagcacgtggctaagcaggagaagtacattgccttcctggaggagcagatcaatctcacacgtaacaagtaccagcaacgtatgaccgaagtccggcagaatgccgaactggtggaaaaggagatgaagcgggtgcgccgcgagatgaagaccattgccgagcaggctggggaagtggacagcctcaagaaccaagtcggtttcctcaccgccaagctggagcgccggaacgccatcatctccaggtacgaagcccagcaggaggaaatgataagtatcatggcaagtctccagaagaagaaagttaaaaaaacgcgccatcagaagattcacaacaaccatgacgataaagctgatgtcagatcgatcccttccgaacagctaccaatgcccaagccgagtgatcaaataaagcatcgcaagaaacggaaatttggcgaaggcgataaggaagattccagctcggcgggctctgataagccaccaagttttgaggcgaatcccaggtcttcaaaaattcgatcccataacttggactgcctctcctctgcgctgaaaaataagttaagtaaccagcaacagtcaactgtcgagggatgatctgatttcgtacccattatctgatggatattcaaatttatggtttttagataagctttttacaaaatttcttctgtaaccgaatatctctgtaaaaattgttatgtacatacatatatagatctcttatgaacagtaaatgattaaactaaccaaacggaacttcagtcagcacttcgttttcgacgggcgtcggagttcctggaactcccgatttacaagttcattgacaagctgctggattatccattcagcagtatggaatcgggttaatgatccggcttaatggatggctttattttgatttattttgtgtggtaagcaatagcttaactgcatttgttgggaaagtttgaatgatccgatgatgtaattaatacatatgaatatgtattaatcaatcaattattattgtttaatgcgtaagttgtgcttgtaataatggtcatttattcacggaaatttctaagaaatgcatatgttctctgattattataaactaataataaactactaaagatgtaacttttttgtttatattagtaagctgtgaagttaggtagattttcaggctatatgaaggattagacagttgcaggactatcagttgatgtttaagaatatttatgggatccttcatgttcgtataagcaacactaatcagaagaataggtagacttgtctcagtggcttatccgagggcttaaaggtagtgctgctatttctagccctgcaatcaagtcacgttcgctgggtgttctaatgcaatattttagcataagagcacgtaccgcagtattgcataaattctgaaagtgccgggcaatgagtcagtacgggattgcagaatggagccagctgaagtcgggcgtctattgaattctaatgctgcaccaggaagtgcgtgcagacattgggcaatcaatcgccggtcaattggaatcgtttgtggatagcaattgagtgtgattggatatggcttctactccggcaattgggg

SEQ ID NO: 32405 - DNA, 858 bp, DROSOPHILA
atgccataccacgatcgagccaaagcccgattggagaacgaggtggttctcctgcggagcgaggtgtcctcgctgcgctccaagcacaaccaacatcgtaagtatcggcaggagcaggtggttctgcaggcgcgtatggaacaggagatccagcttctacagagcgaactagccgcagctcaatcgaatcggaatgagcgggagtgcggtggagccgagcagtgttcagtgttgagccagcagctggagaaacttgacgagcacgtggctaagcaggagaagtacattgccttcctggaggagcagatcaatctcacacgtaacaagtaccagcaacgtatgaccgaagtccggcagaatgccgaactggtggaaaaggagatgaagcgggtgcgccgcgagatgaagaccattgccgagcaggctggggaagtggacagcctcaagaaccaagtcggtttcctcaccgccaagctggagcgccggaacgccatcatctccaggtacgaagcccagcaggaggaaatgataagtatcatggcaagtctccagaagaagaaagttaaaaaaacgcgccatcagaagattcacaacaaccatgacgataaagctgatgtcagatcgatcccttccgaacagctaccaatgcccaagccgagtgatcaaataaagcatcgcaagaaacggaaatttggcgaaggcgataaggaagattccagctcggcgggctctgataagccaccaagttttgaggcgaatcccaggtcttcaaaaattcgatcccataacttggactgcctctcctctgcgctgaaaaataagttaagtaaccagcaacagtcaactgtcgagggatga

SEQ ID NO: 32406 - protein, 285 aa, DROSOPHILA
MPYHDRAKARLENEVVLLRSEVSSLRSKHNQHRKYRQEQVVLQARMEQEIQLLQSELAAAQSNRNERECGGAEQCSVLSQQLEKLDEHVAKQEKYIAFLEEQINLTRNKYQQRMTEVRQNAELVEKEMKRVRREMKTIAEQAGEVDSLKNQVGFLTAKLERRNAIISRYEAQQEEMISIMASLQKKKVKKTRHQKIHNNHDDKADVRSIPSEQLPMPKPSDQIKHRKKRKFGEGDKEDSSSAGSDKPPSFEANPRSSKIRSHNLDCLSSALKNKLSNQQQSTVEG

SEQ ID NO: 32407 - DNA, 2924 bp, DROSOPHILA
aaaaaaattattatatacttgaaaataacttcatgttattacgttatttttcaaaaggagggagatgtagtatatacgaacataataacaataataataacaataataataataatattaataataattataatatgaatcataataataagtcgactaataagtaaacttaggaccaccctaattccttagggtcaccctagtagatctttagatacaccctaatactaaatatgcgaattcagcatgtacgcctttaggggtcgcactcgactcccattggttatcgagtatgaacttcatacatacatattgcagaatttgctagtgtcagcacttggctgtcacaagagatctgcctgtagaccacactaagatcagttataaatcaggaatagatctggaatgtacactcgcttaataaaaaccaaataaagataaaatgaccaactgcgttttgagactttattaactacatcagaagtaatgggaattctaattaactacactatataaacagcagaatatataaataataaagtctgaataatatatttccgattgacttgcttatgcaggcaaataaaattgatggaaaatattatttgcctgattggcttcggatgtgaagatattttgatttgattgactaatgaaataatatgttgtaatctgtgctactaactttttatgctaacaaaataataatatgcatatcataaagaatattttcctctttattaattttttaatcacaattttagtaaatacagttcatgctttacaaaacattgtcgattggctgtcgatgggattgctttcaaattaacggtaatctaattgaaaaggacaaatggcgaaaaacaagcaaggatgcggaaaatgtaaatttcttcgagctgcaacagaggagcaatggaaaggaaaggaaatgcagcaaactcaatccgcgaggattttcatctctcctcctgaggcgtcaggtggtcggactttaagctcagcccgtcttagcccagttgccacttggcaggtgttggatatgtatccggggaatccccatcccactcacctgtatcgtagtggataccgccggggcacagcatttgaccccgcgatggcaacggccacagagcttcggtcgatacagctttcgggaaacgcactcgcccagtcgtatcctggcaggacctaggcgctggatgctccgacactcgtggcccttctgcgacagaaaaatgtcagaaaaatggtgaaaaggttgatattatttgaaaagctttaagtaaaattgcttacttctatagaagcatattctatttattaaaaattattaaatattaacttccgtaaatatcctgtgaaataccggggaaaggtatcaagaaaaacatcttttcctttccattcccaaaatcatcaaattcgtttcactagtttctgcactttaaaatacactttccttaaacctcagttctactcgtttcgtgggtatttccccaaagtagcaaaagtgtttcgtcattaagaagacactcactcgtatcctgtgggccggctcctcgtgctccttgtggtgatgataacgctgatgggagtggctgtgggcgcgatgctgcttccgcttgtgcgtcaacgggcggctcctgctccacttattgtcctcgtggtcgtccttgtcgcacctgcgattctcgcagagccgcaaattgctcagttgatggcagcccgcgtgggtggtggtgtgccgcgtggcggtgccaaggccgcagctcctgctgcaggccgtccaattgccgctggtggtgctgttgtggcaggtggcgtaaactgcaacgagtgggaagttggagaggattactaatgagccagctcatgatcggggtgctcattaatcaccgccagaaacgcagttaggaaacatgattcttagtgcaataagaaccaaaccttattggtcacaatgtttgtcctgaacatattttgaatatttaaaaatgctaaacaaatatatatatagtgcttagaaaattatatcaaaaaatcaaaaaaattaatcaaaccttgagcgaattatatgaattcttctgcataatgaagtccgagagagaatcattttcaaccagtgaaatatacgctgttggagattgggataagctaaagctgcttatgtggaagaattggattcttcagtggaaccaaaaaatgcaaattgtatttgccctggtcctgccagttttgtttctttgtcttattctagtacttcgcataatagttttgcccgaaaagatggatgagatccgctacccaaccgtatccatatcggacctaaacctttatatgaggatggtaccacttggaaataggatattgcacgagaatggatcccttaatatacctcgaaacttcctttgctatactccaaataaccctatcaatagtgccattgtgggtgccactgcgataagactaagacttctgggcactagagcctatgacaccgctttgcacatggaacaggatatggtattgcacaacttcttggcaggagttcagtttgaagacaacgagaacgtgaacaccaatgatgcagggtatccacttaatcttaattactcgctccgatttcccagtgagctgcgaaccatgcaaggcccaatcatagacacctggcgtacttctcgtttatttctgtcctacgacacaagtggatcccgtaatagattggataacgatggaggagttccggtcggatatattagggagggctttctgccaattcagcatgccctaaccatgtcctggctggcattggcatcgggagttacggatacaggtattccagccatacaccttcagcgctttccctatagggcctatacctatgaccaattgctgagtggcctgcgtcaactactgccctt

SEQ ID NO: 32408 - DNA, 540 bp, DROSOPHILA
atgtttcctaactgcgtttctggcgtttacgccacctgccacaacagcaccaccagcggcaattggacggcctgcagcaggagctgcggccttggcaccgccacgcggcacaccaccacccacgcgggctgccatcaactgagcaatttgcggctctgcgagaatcgcaggtgcgacaaggacgaccacgaggacaataagtggagcaggagccgcccgttgacgcacaagcggaagcagcatcgcgcccacagccactcccatcagcgttatcatcaccacaaggagcacgaggagccggcccacaggatacgaaagggccacgagtgtcggagcatccagcgcctaggtcctgccaggatacgactgggcgagtgcgtttcccgaaagctgtatcgaccgaagctctgtggccgttgccatcgcggggtcaaatgctgtgccccggcggtatccactacgatacaggtgagtgggatggggattccccggatacatatccaacacctgccaagtggcaactgggctaagacgggctga

SEQ ID NO: 32409 - protein, 179 aa, DROSOPHILA
MFPNCVSGVYATCHNSTTSGNWTACSRSCGLGTATRHTTTHAGCHQLSNLRLCENRRCDKDDHEDNKWSRSRPLTHKRKQHRAHSHSHQRYHHHKEHEEPAHRIRKGHECRSIQRLGPARIRLGECVSRKLYRPKLCGRCHRGVKCCAPAVSTTIQVSGMGIPRIHIQHLPSGNWAKTG

SEQ ID NO: 32410 - DNA, 2288 bp, DROSOPHILA
ccgatgaaggcggacctgaggttcctcaaaagcctggccatcaactccatccggtacagtgccctggttggcgaggaaaagcgagtggggtaccgaaagtggcaggagaagtgggacaagtggatcgacgacgtggtggagcacaagtactgttaatgacccccttttagtaaataactcatgctgccttttattttcgcatttaatttactttgaatttcgccggcacacggataactctgacgctagctaagagttgacttacatcgatacatttgatatgggtgatggctaagcctcgctcgtcacatgacgtaaatcagagaactcgattcgggatattttcggggatatgtgtggttggggtataacgaaactatgactaggatcctcgtagctggcgatcatcctggctctgtccatttacatccatctaaattctttgttcaagcagagtcttaggcatacatacgtgtagatcggaatacaagtgagtatatagcacagttataacttgaatgcacacggatctcgcatttgctcgtttggtttagagttgcttaagccttttacatctatattattaaaattattattaccatatacgtcattattgggcagcattccattctaatgatcttctgaaaatgttccattttcatttcatttctattctctttttgtcgcgcttgtttctgtgtatacatagatgcttgcaaaaatattttttaatttccggcctgtgtttgttatttgcccttggtttagtactaaccctatcgttcacatacctaaacttactgcctcgatatgttcaaatcctaagtataacttgcatcgcctctcccatttccctttacagtcctaaccatccttggggccttaagtatcgctatgctgtacaaatcttaaactataccccttcgctatgcaactgccttatatccttgccctcggccgatcgaattctatcttatagtttgcgtgcgaatcgtttacgctatgtgttttgctgccagtggtgctgctgtcgcaacttttcggccttccaactggattcgcccacacttggcggatagggtataatatccggctgctgttccgaggacatgttgtccacatcgttgtggtcgaggttgttgccgctgtcgaccacatcctcttcgttgtccttgttgttgccagcattgttgttggtcggctcatttggttcgccattagtttcgtggttccggcctcggttattgtttttgtaattgtaataaccatatttattcgtgttagccatattgtcgttgctgttgctgttgctactaatgttgctgctgcccgcgttgcaattctgtggggcagtaaagagaaggggaaacccatgtgaaattttaatataaatttgtggcataaaaatatttcgttttaatagacgcttaattaaattcttatcccccgttgcaaaagaaaatgtatatatatattttttttgaatagttggcatgcagcgtgttttaattattgttcagcaattactttaccaatgatagcattcctatttgtatttgtactgtaggtatttgtcttaataaaaaagctgcaagttcactattcttcaagtattaatattattgataaatttataaaaagttccttgtaagcattgcattcatttactatcacttgagtttacagacttcaacttagtaaagtggtttctgcttgttgataaggtacaacttaaaccacaaaatgcacttcaaatacttgtaggtacaatcaaaactacagaatgactattaaaaaacgaaaactacatttattaatattcaattttaaagcagaaagaataggaatcagaaagtacggaaaaaacggaacgctttaatattattcctcgactatcctcagccgagtaacgaagaaatttttggtattgagcgtcggatcctctaaaattctaattctgatacacttcctatcacctgtggaacttattaaacgaatcagcgttcccttttaatttacgagtgactggtataatcattgtggctaatgtatagatagatgggaaccgcaaaaaggcaaggactaatttgatacgaaagtaacgataaacacacctataaaaggctgcatatccaaacatcatatcgcaatttagctttctacactcaagcttaagcaatccacaaagaaaattaatcctgttcctcaaatcatgagtgcctgttcagaaccaactactttttcaaaaaccaaggagacggccaagatcgtcataatcggagctggtg

SEQ ID NO: 32411 - DNA, 288 bp, DROSOPHILA
atggctaacacgaataaatatggttattacaattacaaaaacaataaccgaggccggaaccacgaaactaatggcgaaccaaatgagccgaccaacaacaatgctggcaacaacaaggacaacgaagaggatgtggtcgacagcggcaacaacctcgaccacaacgatgtggacaacatgtcctcggaacagcagccggatattataccctatccgccaagtgtgggcgaatccagttggaaggccgaaaagttgcgacagcagcaccactggcagcaaaacacatag

SEQ ID NO: 32412 - protein, 95 aa, DROSOPHILA
MANTNKYGYYNYKNNNRGRNHETNGEPNEPTNNNAGNNKDNEEDVVDSGNNLDHNDVDNMSSEQQPDIIPYPPSVGESSWKAEKLRQQHHWQQNT

SEQ ID NO: 32413 - DNA, 2237 bp, DROSOPHILA
agcgacatccaacaaaaagttgtttgtcagttgtagttgaaatcaaactggttactcagctgctgccgtctggctctggtccgtcctccagccatccagccatccagccatccagtctttcagtccgccagtccattggccatcgttcatcggtcggtcaagccggcccaaatggtgtcagctgtgtaaacagggctaagcaagcggatcgcaagccgtttagctgctcatttccccgctgccatagccatcgaaatcaatttcttgcgaaccgaaatccaaaatcttgccctgaacttgactgtctgcatgtgatacggttgaacgccttttgcggaaattattgcaattttcttgtcttgtcttctagccgaacacacatagcaccgtacattggggttttgacggtgggtttactttcacttttgccgcacttactcaacaagttgtgggggcccgctgaagtttgctcacaggggaaacattcatcaaaagattgaagagctcgtcttttcgctctaactcaaataagaagttaagtgcataagtgaagttagctgcacataaaaatagttttttattgcagcgcaattttttctagtttctagcgagttttaaaagcgttgtgtttacaatcttttaaaaagaaatttcaaagatttttactacgaagtattctttgcattactccttatataagttctactttatattgagatcaaatattaaagtcttgtcttaaagcttgatagaacttagtaatgacttataagcttcaaattagagtatttaattacacagaataattagttagttaaattgaattcattggtgtgacttagaaagcgccacaattccttttgtttattttccctcacttttccaaacgagtgcaacgtcaaacccttaaacaaagtccactccacactgattgcaactttgccaaagaccaacaaatcatttaaacaaatcaaacatcaacaggcgaccggcgaacaacatggagacctatttgacggagatcaaacagttgcgcataccacgcccgaaatttgagcccaacagttgccatcagcagcaccatcatgcggtgacagccgtcggagccacgcccatccagccgcccccgcccctgcaccaccgtcagtggcgacactttgtgcgaccctttacgccgccacgcgattaccatctgcccatggtggccgagggctcctccatgcacgacaagatgtgaggaggattcacattcagtggatgggcaaacatgatgcattactcccacacatagccccacataatatacgatacctacttaggatagtgcttaagtctagatgttagcttagttaacgtacgatagatacagatacagttgcagatacaaagaattaaagtatacaaaaaatggagatttctttataattcgggtttttaagtaagtgtgctgatcatgaaatgaaacttcatggcatgagcaaatggatttttgagagtgttacttggaactatgttgataatctgttgctctaccatttataaaatattatatttaatacccagagatatcagaacctacgacaaaatcacgatcgtttcgcttactcaccgcatctggttcgtattccggtaaaagggtttcgctgccccggcgagttctgtgctcatcacagccgtattcctaagccgggataaaagaatttacaagatacatttttcagcggcttatgtgcttctttgctcgacgaccaattcggtttggcactggtctaaatgcgacttaacagtattacaacactcaatagccaattggacaacatttaataaggaagtacaacataaccggaaacagagacaaaaacgcaaacatcaaccacattgagcagttggacaaacatggaaaaagattcaaaagtataaaaaacgacaatagacgttacacacaacaagagacaaagatacaaaaagtagatagacagagagagataaaaccactaaagatacaaaataaagtaagacatatacaacagacagacaagagctgcagattgcaaaactcggcgatgtaacagccgaatgtcaatttttttcaataaaagcttagaaaaacttaaaatacagcatattcatcaggcagagatttcggtgccaaaaaaaaaatattgttagaaaataaagaggaaactttatcaggagactcatcgagtaattttcttcaaagagcctagatacgaatg

SEQ ID NO: 32414 - DNA, 237 bp, DROSOPHILA
atggagacctatttgacggagatcaaacagttgcgcataccacgcccgaaatttgagcccaacagttgccatcagcagcaccatcatgcggtgacagccgtcggagccacgcccatccagccgcccccgcccctgcaccaccgtcagtggcgacactttgtgcgaccctttacgccgccacgcgattaccatctgcccatggtggccgagggctcctccatgcacgacaagatgtga

SEQ ID NO: 32415 - protein, 78 aa, DROSOPHILA
METYLTEIKQLRIPRPKFEPNSCHQQHHHAVTAVGATPIQPPPPLHHRQWRHFVRPFTPPRDYHLPMVAEGSSMHDKM

SEQ ID NO: 32416 - DNA, 4212 bp, DROSOPHILA
tggactttgagagattctagccaccttcgtttggctctattgttgtgtttagttggccgataatgttttaaaaatcatttaacattaattgtatatatatttgggtatttcgaaatttaaacctagagcggagactcatactaaactcattggtacatcctcgctaactaaagcaacctctgtaaataaacttttaatacccttaaatttaatggaactactactgaagttctttttggataatctgccttaacagccttataaatatccacccacctgtataaatccacgcatgtcaatacgccccccaatccgcaagaaacttaaaccctatttgatatccaagccgcatgaagcttaactaaagactaacttaaccctcttgcttaacactgtagttatatgttatccccccccccctgcccaaaacacccctgaccctagcaaaaccaaaaaccgaaaaaaagccccaataacaagtaactaaaaacgtgctggcaaacgctcaacgtgaccgtcgctccttttggccaacgattagacccgtcttggcgggcatacatatatatatataccacatttaatgctaattctcattacggctgtgtacttatacttatatatctaaccgaaatcaactgcagctcaaacacatcagtcgctttaaccacgggtctgctctcttttgggagcagctggtgtccatggaactatgctcggatatatcatcgtatcgccgcgccagctaatgctaatcctacgaccagatcagagccatctgaacacctaaccaacgataaacccaactaccaaaattgtgatctctgcatcgcactaaaacctaaactgatattaattgcatccaacttactgtgcgtgtgtgtgtgtgtgttatgtctgtaaatttggttcgttgctattatccgtacccgtaatatcacgtacacaccataccacacctacccgcctgaaataagtccaagcctgcccgctaacgatcatgcataaaccaaagctagcgaatgctataaccgctgccgccattgcctcatccatatccaccaaaaacaacaacaacaacagcatcgtcggcggcagcagcagcagcagctccggtggcaacaaatcgaagcgaccacgtcagtttggccaatactcgatcggagttggaactggagctggagctggggggctactccggtcggacgactccggcttcgaccacctcgactattcgtcactaattggggattcgattgatttagagcactacatcagcgccatggaggcacgtcgacacgaccaggagccggatgtttgggcccagctgcagcagaaggagtcggacatcctattggccgccgaactgggcaaggcactgctcgagaagaacgaggagctggtcaaacagcaggaaaagctcatcgaggactattcgagcaaaattgaggtgagtcatgaaacacatataaagttaacaggtggaattgccattataaatggcaaacaattgaaatggaagtcagttatttgggggaaaggaaaattggttagaattaaaagaaatttaggaagaggacatatagcttggaaggtactttagtgacttaaaagataggcaatgcatattatactttaatacacttacaatttaaaagatcatagagatgatagttatgtatctcttgaatatggttaagcagcaatttaaagaattgggaaatgaaaaaattaatttttgttatgttttctaaatgaatggaagagatctaagcactctttattattagtttaatgatatcttgcttattgagggaatgctttcatgttcttttatctctattctctatctgatttactaaagtgtgagcaataaacaaaataatcactttgcttctatctctatattagctaccaattgtgtgaaaccaacatttgtaaattcagacccatttattattttccctttttaagctccctaccttttcctctaatgatttcttgaacaatctaatagttatctctaaatgccggcgcatttatcaaatcggcaacggcagttatacctgagtaccagaattttgattgactcacctgatgatttgcattgattattggcggacatgtgttcgtaaatgaccccctctattgacgcattgctggcattcccaggtcgggagaattaaataatacatatacaatatggatttttttcgagagctgaaacacagcacctgtccaatgcagctctgtaaactgaacacacaaactccccaaactgtcaactgcaatttatattgtggggtgggttctttaactatttagacaaacaaaaatggttacagtcatgtcactttatggacgatgacatactgtgtgtgtgtgtgtgcgcagtaaactactgaactatatagtgtatcacgtaagggtatcgatttttgttccatcacaagttctaccctacacattttgtatgaaatagctgaagagctcttctgaagtctctctaaaaattggctttatcgagcactttcctgataacatggcaggaaaagcaaagtctgttcacaacacctccaaatgtttccaaagtctatgtctgccgcccgaccttgaaccgctcgaatgggtggtttctgtgtgggtgggtgcggttcgttcgcctgtcacctgttcacacacacgcacacacacacacactacagatacttccaggtaactgacaatagaagaaatagaagaagataggtaaacataaaacacccgttccagcaatcgctccaagtgaagttcaagccgcggctcaagttcgtggccgttcacattagcatattggttgcctcaaacttagttacctcgcttttccatcctgaaccgatagttaggctaatgtacttttgttgaccgaccggtaaacaacaatgtattcttatcaattaggcttcaacgccgattaatggcaattcaatgcacgaaaagagaacaggaaatgtgaggatggtttggggaccacctgatggtgtgagtaacccaaacagaggacacagcaatgcgttgaacttgaataatttcgttggtacatattttccgtgggtttgggccatatttacgtagttggcttagtcactttaactgggttttgtattctcctttttttttttttgcttttgtagttaagcacgttgagtgacttcatcttcattgagaaatgaaagtgcgaaggccaattgcgggggggctagtcgcgtaatatcctggatatttagtcagatgatgtcatcgtgaaaattttgtacatatgttcgagtctttttgagtcatttttgatatgcaaaaacttttgtgcaatgaattttttattgaaaatcgagaacaactccattgcttattaaatttatatgccctcattgagtttaaaaccaaaattatacaatatatatgtatacattatacattgtaaatatcaaactaagttcaataataataaaatgctctctctgttcgagtttagtttttacgtgtcttcaaagtctgtgttttaatcccgtaaaattcccattaaaataatagtttgcttgctcacctcatgcattccataaccattaacaatttaaatgaaaatcgcttggcacccgaaaaaaccattaagtttattatagagcgctccaatttaaagccgaaaagtgagaaattcccatgttccattttccattggccattaaatggaaatcgctttagactaatgaaattgggccagtccaaaaaaaaaaggttaacacctgacagttgaacaacgccaattgtcgctttaattatttgcttgtttctttttttaataacaattattgcttagggaattctggcgtggagctgccgcataaatctcttgaattttagtcaccttgactttaccttttagtctttgtttagcaaagtgacgtgagccacattttcgctggattcacttttatttgcgtgtttttggcaatatgcaaaatggctggtcgcgtatctaattaatttcttcaaaaagttatggagcgcacaatgtcacttcgctgcttggatggatgaaccagtggtcagctaaaccaggcccatcccattcgtatactatatagtattgtatactatatgtggtcggtctgcgattgactgacgtaattagaccgctcggttgtaggtgttttggttctgaccaaaatggcagta

SEQ ID NO: 32417 - DNA, 489 bp, DROSOPHILA
atgcataaaccaaagctagcgaatgctataaccgctgccgccattgcctcatccatatccaccaaaaacaacaacaacaacagcatcgtcggcggcagcagcagcagcagctccggtggcaacaaatcgaagcgaccacgtcagtttggccaatactcgatcggagttggaactggagctggagctggggggctactccggtcggacgactccggcttcgaccacctcgactattcgtcactaattggggattcgattgatttagagcactacatcagcgccatggaggcacgtcgacacgaccaggagccggatgtttgggcccagctgcagcagaaggagtcggacatcctattggccgccgaactgggcaaggcactgctcgagaagaacgaggagctggtcaaacagcaggaaaagctcatcgaggactattcgagcaaaattgagttaagcacgttgagtgacttcatcttcattgagaaatga

SEQ ID NO: 32418 - protein, 162 aa, DROSOPHILA
MHKPKLANAITAAAIASSISTKNNNNNSIVGGSSSSSSGGNKSKRPRQFGQYSIGVGTGAGAGGLLRSDDSGFDHLDYSSLIGDSIDLEHYISAMEARRHDQEPDVWAQLQQKESDILLAAELGKALLEKNEELVKQQEKLIEDYSSKIELSTLSDFIFIEK
